United States Patent Application Publication US 2025/0333767 A1 - sequence listing, part 14

SEQ ID NO: 46966 - protein, 979 aa, synthetic construct
  REGION 1..979: note = engineered CasX variant
QEIKRINKIRRRLVKDSNTKKAGKTGPMKTLLVRVMTPDLRERLENLRKKPENIPQPISNTSRANLNKLLTDYTEMKKAILHVYWEEFQKDPVGLMSRVAQPASKKIDQNKLKPEMDEKGNLTTAGFACSQCGQPLFVYKLEQVSEKGKAYTNYFGRCNVAEHEKLIKLAQLKPEKDSDEAVTYSLGKFGQRALDFYSIHVTKESTHPVKPLAQIAGNRYASGPVGKALSDACMGTIASFLSKYQDIIIEHQKVVKGNQKRLESLRELAGKENLEYPSVTLPPQPHTKEGVDAYNEVIARVRMWVNLNLWQKLKLSRDDAKPLLRLKGFPSFPLVERQANEVDWWDMVCNVKKLINEKKEDGKVFWQNLAGYKRQEALRPYLSSEEDRKKGKKFARYQLGDLLLHLEKKHPEDWGKVYDEAWERIDKKVEGLSKHIKLEEERRSEDAQSKAALTDWLRAKASFVIEGLKEADKDEFCRCELKLQKWYGDLRGKPFAIEAENSILDISGFSKQYNCAFIWQKDGVKKLNLYLIINYFKGGKLRFKKIKPEAFEANRFYTVINKKSGEIVPMEVNFNFDDPNLIILPLAFGKRQGREFIWNDLLSLETGSLKLANGRVIEKTLYNRRTRQDEPALFVALTFERREVLDSSNIKPMNLIGVDRGENIPAVIALTDPEGCPLSRFKDSLGNPTHILRIGESYKEKQRTIQAKKEVEQRRAGGYSRKYASKAKNLADDMVRNTARDLLYYAVTQDAMLIFENLSRGFGRQGKRTFMAERQYTRMEDWLTAKLAYEGPLPSKTYLSKTLAQYTSKTCSNCGFTITSADYDRVLEKLKKTATGWMTTINGKELKVEGQITYYNRYKRQNVVKDLSVELDRLSEESVNNDISSWTKGRSGEALSLLKKRFSHRPVQEKFVCLNCGFETHADEQAALNIARSWLFLRSQEYKKYQTNKTTGNTDKRAFVETWQSFYRKKLKEVWKPAV

SEQ ID NO: 46967 - protein, 978 aa, synthetic construct
  REGION 1..978: note = engineered CasX variant
QEIKRINKIRRRLVKDSNTKKAGKTGPMKTLLVRVMTPDLRERLENLRKKPENIPQPISNTSRANLNKLLTDYTEMKKAILHVYWEEFQKDPVGLMSRVAQPASKKIDQNKLKPEMDEKGNLTTAGFACSQCGQPLFVYKLEQVSEKGKAYTNYFGRCNVAEHEKLILLAQLKPEKDSDEAVTYSLGKFGQRALDFYSIHVTKESTHPVKPLAQIAGNRYASPVGKALSDACMGTIASFLSKYQDIIIEHQKVVKGNQKRLESLRELAGKENLEYPSVTLPPQPHTKEGVDAYNEVIARVRMWVNLNLWQKLKLSRDDAKPLLRLKGFPSFPLVERQANEVDWWDMVCNVKKLINEKKEDGKVFWQNLAGYKRQEALRPYLSSEEDRKKGKKFARYQLGDLLLHLEKKHPEDWGKVYDEAWERIDKKVEGLSKHIKLEEERRSEDAQSKAALTDWLRAKASFVIEGLKEADKDEFCRCELKLQKWYGDLRGKPFAIEAENSILDISGFSKQYNCAFIWQKDGVKKLNLYLIINYFKGGKLRFKKIKPEAFEANRFYTVINKKSGEIVPMEVNFNFDDPNLIILPLAFGKRQGREFIWNDLLSLETGSLKLANGRVIEKTLYNRRTRQDEPALFVALTFERREVLDSSNIKPMNLIGVDRGENIPAVIALTDPEGCPLSRFKDSLGNPTHILRIGESYKEKQRTIQAKKEVEQRRAGGYSRKYASKAKNLADDMVRNTARDLLYYAVTQDAMLIFENLSRGFGRQGKRTFMAERQYTRMEDWLTAKLAYEGPLPSKTYLSKTLAQYTSKTCSNCGFTITSADYDRVLEKLKKTATGWMTTINGKELKVEGQITYYNRYKRQNVVKDLSVELDRLSEESVNNDISSWTKGRSGEALSLLKKRFSHRPVQEKFVCLNCGFETHADEQAALNIARSWLFLRSQEYKKYQTNKTTGNTDKRAFVETWQSFYRKKLKEVWKPAV

SEQ ID NO: 46968 - protein, 980 aa, synthetic construct
  REGION 1..980: note = engineered CasX variant
QEIKRINKIRRRLVKDSNTKKAGKTGPMKTLLVRVMTPDLRERLENLRKKPENIPQPISNTSRANLNKLLTDYTEMKKAILHVYWEEFQKDPVGLMSRVAQPASKKIDQNKLKPEMDEKGNLTTAGFACSQCGQPLFVYKLEQVSEKGKAYTNYFGRCNVAEHEKLILLAQLKPEKDSDEAVTYSLGKFGQRALDFYSIHVTKESTHPVKPLAQIAGNRYASYPVGKALSDACMGTIASFLSKYQDIIIEHQKVVKGNQKRLESLRELAGKENLEYPSVTLPPQPHTKEGVDAYNEVIARVRMWVNLNLWQKLKLSRDDAKPLLRLKGFPSFPLVERQANEVDWWDMVCNVKKLINEKKEDGKVFWQNLAGYKRQEALRPYLSSEEDRKKGKKFARYQLGDLLLHLEKKHGERDWGKVYDEAWERIDKKVEGLSKHIKLEEERRSEDAQSKAALTDWLRAKASFVIEGLKEADKDEFCRCELKLQKWYGDLRGKPFAIEAENSILDISGFSKQYNCAFIWQKDGVKKLNLYLIINYFKGGKLRFKKIKPEAFEANRFYTVINKKSGEIVPMEVNFNFDDPNLIILPLAFGKRQGREFIWNDLLSLETGSLKLANGRVIEKTLYNRRTRQDEPALFVALTFERREVLDSSNIKPMNLIGVDRGENIPAVIALTDPEGCPLSRFKDSLGNPTHILRIGESYKEKQRTIQAKKEVEQRRAGGYSRKYASKAKNLADDMVRNTARDLLYYAVTQDAMLIFENLSRGFGRQGKRTFMAERQYTRMEDWLTAKLAYEGPLPSKTYLSKTLAQYTSKTCSNCGFTITSADYDRVLEKLKKTATGWMTTINGKELKVEGQITYYNRYKRQNVVKDLSVELDRLSEESVNNDISSWTKGRSGEALSLLKKRFSHRPVQEKFVCLNCGFETHADEQAALNIARSWLFLRSQEYKKYQTNKTTGNTDKRAFVETWQSFYRKKLKEVWKPAV

SEQ ID NO: 46969 - protein, 980 aa, synthetic construct
  REGION 1..980: note = engineered CasX variant
QEIKRINKIRRRLVKDSNTKKAGKTGPMKTLLVRVMTPDLRERLENLRKKPENIPQPISNTSRANLNKLLTDYTEMKKAILHVYWEEFQKDPVGLMSRVAQPASKKIDQNKLKPEMDEKGNLTTAGFACSQCGQPLFVYKLEQVSEKGKAYTNYFGRCNVAEHEKLILLAQLKPEKDSDEAVTYSLGKFGQRALDFYSIHVTKESTHPVKPLAQIAGNRYASHPVGKALSDACMGTIASFLSKYQDIIIEHQKVVKGNQKRLESLRELAGKENLEYPSVTLPPQPHTKEGVDAYNEVIARVRMWVNLNLWQKLKLSRDDAKPLLRLKGFPSFPLVERQANEVDWWDMVCNVKKLINEKKEDGKVFWQNLAGYKRQEALRPYLSSEEDRKKGKKFARYQLGDLLLHLEKKHGERDWGKVYDEAWERIDKKVEGLSKHIKLEEERRSEDAQSKAALTDWLRAKASFVIEGLKEADKDEFCRCELKLQKWYGDLRGKPFAIEAENSILDISGFSKQYNCAFIWQKDGVKKLNLYLIINYFKGGKLRFKKIKPEAFEANRFYTVINKKSGEIVPMEVNFNFDDPNLIILPLAFGKRQGREFIWNDLLSLETGSLKLANGRVIEKTLYNRRTRQDEPALFVALTFERREVLDSSNIKPMNLIGVDRGENIPAVIALTDPEGCPLSRFKDSLGNPTHILRIGESYKEKQRTIQAKKEVEQRRAGGYSRKYASKAKNLADDMVRNTARDLLYYAVTQDAMLIFENLSRGFGRQGKRTFMAERQYTRMEDWLTAKLAYEGPLPSKTYLSKTLAQYTSKTCSNCGFTITSADYDRVLEKLKKTATGWMTTINGKELKVEGQITYYNRYKRQNVVKDLSVELDRLSEESVNNDISSWTKGRSGEALSLLKKRFSHRPVQEKFVCLNCGFETHADEQAALNIARSWLFLRSQEYKKYQTNKTTGNTDKRAFVETWQSFYRKKLKEVWKPAV

SEQ ID NO: 46970 - protein, 980 aa, synthetic construct
  REGION 1..980: note = engineered CasX variant
QEIKRINKIRRRLVKDSNTKKAGKTGPMKTLLVRVMTPDLRERLENLRKKPENIPQPISNTSRANLNKLLTDYTEMKKAILHVYWEEFQKDPVGLMSRVAQPASKKIDQNKLKPEMDEKGNLTTAGFACSQCGQPLFVYKLEQVSEKGKAYTNYFGRCNVAEHEKLILLAQLKPEKDSDEAVTYSLGKFGQRALDFYSIHVTKESTHPVKPLAQIAGNRYASSPVGKALSDACMGTIASFLSKYQDIIIEHQKVVKGNQKRLESLRELAGKENLEYPSVTLPPQPHTKEGVDAYNEVIARVRMWVNLNLWQKLKLSRDDAKPLLRLKGFPSFPLVERQANEVDWWDMVCNVKKLINEKKEDGKVFWQNLAGYKRQEALRPYLSSEEDRKKGKKFARYQLGDLLLHLEKKHGERDWGKVYDEAWERIDKKVEGLSKHIKLEEERRSEDAQSKAALTDWLRAKASFVIEGLKEADKDEFCRCELKLQKWYGDLRGKPFAIEAENSILDISGFSKQYNCAFIWQKDGVKKLNLYLIINYFKGGKLRFKKIKPEAFEANRFYTVINKKSGEIVPMEVNFNFDDPNLIILPLAFGKRQGREFIWNDLLSLETGSLKLANGRVIEKTLYNRRTRQDEPALFVALTFERREVLDSSNIKPMNLIGVDRGENIPAVIALTDPEGCPLSRFKDSLGNPTHILRIGESYKEKQRTIQAKKEVEQRRAGGYSRKYASKAKNLADDMVRNTARDLLYYAVTQDAMLIFENLSRGFGRQGKRTFMAERQYTRMEDWLTAKLAYEGPLPSKTYLSKTLAQYTSKTCSNCGFTITSADYDRVLEKLKKTATGWMTTINGKELKVEGQITYYNRYKRQNVVKDLSVELDRLSEESVNNDISSWTKGRSGEALSLLKKRFSHRPVQEKFVCLNCGFETHADEQAALNIARSWLFLRSQEYKKYQTNKTTGNTDKRAFVETWQSFYRKKLKEVWKPAV

SEQ ID NO: 46971 - protein, 980 aa, synthetic construct
  REGION 1..980: note = engineered CasX variant
QEIKRINKIRRRLVKDSNTKKAGKTGPMKTLLVRVMTPDLRERLENLRKKPENIPQPISNTSRANLNKLLTDYTEMKKAILHVYWEEFQKDPVGLMSRVAQPASKKIDQNKLKPEMDEKGNLTTAGFACSQCGQPLFVYKLEQVSEKGKAYTNYFGRCNVAEHEKLILLAQLKPEKDSDEAVTYSLGKFGQRALDFYSIHVTKESTHPVKPLAQIAGNRYASTPVGKALSDACMGTIASFLSKYQDIIIEHQKVVKGNQKRLESLRELAGKENLEYPSVTLPPQPHTKEGVDAYNEVIARVRMWVNLNLWQKLKLSRDDAKPLLRLKGFPSFPLVERQANEVDWWDMVCNVKKLINEKKEDGKVFWQNLAGYKRQEALRPYLSSEEDRKKGKKFARYQLGDLLLHLEKKHGERDWGKVYDEAWERIDKKVEGLSKHIKLEEERRSEDAQSKAALTDWLRAKASFVIEGLKEADKDEFCRCELKLQKWYGDLRGKPFAIEAENSILDISGFSKQYNCAFIWQKDGVKKLNLYLIINYFKGGKLRFKKIKPEAFEANRFYTVINKKSGEIVPMEVNFNFDDPNLIILPLAFGKRQGREFIWNDLLSLETGSLKLANGRVIEKTLYNRRTRQDEPALFVALTFERREVLDSSNIKPMNLIGVDRGENIPAVIALTDPEGCPLSRFKDSLGNPTHILRIGESYKEKQRTIQAKKEVEQRRAGGYSRKYASKAKNLADDMVRNTARDLLYYAVTQDAMLIFENLSRGFGRQGKRTFMAERQYTRMEDWLTAKLAYEGPLPSKTYLSKTLAQYTSKTCSNCGFTITSADYDRVLEKLKKTATGWMTTINGKELKVEGQITYYNRYKRQNVVKDLSVELDRLSEESVNNDISSWTKGRSGEALSLLKKRFSHRPVQEKFVCLNCGFETHADEQAALNIARSWLFLRSQEYKKYQTNKTTGNTDKRAFVETWQSFYRKKLKEVWKPAV

SEQ ID NO: 46972 - protein, 980 aa, synthetic construct
  REGION 1..980: note = engineered CasX variant
QEIKRINKIRRRLVKDSNTKKAGKTGPMKTLLVRVMTPDLRERLENLRKKPENIPQPISNTSRANLNKLLTDYTEMKKAILHVYWEEFQKDPVGLMSRVAQPASKKIDQNKLKPEMDEKGNLTTAGFACSQCGQPLFVYKLEQVSEKGKAYTNYFGRCNVAEHEKLILLAQLKPEKDSDEAVTYSLGKFGQRALDFYSIHVTKESTHPVKPLAQIAGNRYASAPVGKALSDACMGTIASFLSKYQDIIIEHQKVVKGNQKRLESLRELAGKENLEYPSVTLPPQPHTKEGVDAYNEVIARVRMWVNLNLWQKLKLSRDDAKPLLRLKGFPSFPLVERQANEVDWWDMVCNVKKLINEKKEDGKVFWQNLAGYKRQEALRPYLSSEEDRKKGKKFARYQLGDLLLHLEKKHGERDWGKVYDEAWERIDKKVEGLSKHIKLEEERRSEDAQSKAALTDWLRAKASFVIEGLKEADKDEFCRCELKLQKWYGDLRGKPFAIEAENSILDISGFSKQYNCAFIWQKDGVKKLNLYLIINYFKGGKLRFKKIKPEAFEANRFYTVINKKSGEIVPMEVNFNFDDPNLIILPLAFGKRQGREFIWNDLLSLETGSLKLANGRVIEKTLYNRRTRQDEPALFVALTFERREVLDSSNIKPMNLIGVDRGENIPAVIALTDPEGCPLSRFKDSLGNPTHILRIGESYKEKQRTIQAKKEVEQRRAGGYSRKYASKAKNLADDMVRNTARDLLYYAVTQDAMLIFENLSRGFGRQGKRTFMAERQYTRMEDWLTAKLAYEGPLPSKTYLSKTLAQYTSKTCSNCGFTITSADYDRVLEKLKKTATGWMTTINGKELKVEGQITYYNRYKRQNVVKDLSVELDRLSEESVNNDISSWTKGRSGEALSLLKKRFSHRPVQEKFVCLNCGFETHADEQAALNIARSWLFLRSQEYKKYQTNKTTGNTDKRAFVETWQSFYRKKLKEVWKPAV

SEQ ID NO: 46973 - protein, 980 aa, synthetic construct
  REGION 1..980: note = engineered CasX variant
QEIKRINKIRRRLVKDSNTKKAGKTGPMKTLLVRVMTPDLRERLENLRKKPENIPQPISNTSRANLNKLLTDYTEMKKAILHVYWEEFQKDPVGLMSRVAQPASKKIDQNKLKPEMDEKGNLTTAGFACSQCGQPLFVYKLEQVSEKGKAYTNYFGRCNVAEHEKLILLAQLKPEKDSDEAVTYSLGKFGQRALDFYSIHVTKESTHPVKPLAQIAGNRYASVPVGKALSDACMGTIASFLSKYQDIIIEHQKVVKGNQKRLESLRELAGKENLEYPSVTLPPQPHTKEGVDAYNEVIARVRMWVNLNLWQKLKLSRDDAKPLLRLKGFPSFPLVERQANEVDWWDMVCNVKKLINEKKEDGKVFWQNLAGYKRQEALRPYLSSEEDRKKGKKFARYQLGDLLLHLEKKHGERDWGKVYDEAWERIDKKVEGLSKHIKLEEERRSEDAQSKAALTDWLRAKASFVIEGLKEADKDEFCRCELKLQKWYGDLRGKPFAIEAENSILDISGFSKQYNCAFIWQKDGVKKLNLYLIINYFKGGKLRFKKIKPEAFEANRFYTVINKKSGEIVPMEVNFNFDDPNLIILPLAFGKRQGREFIWNDLLSLETGSLKLANGRVIEKTLYNRRTRQDEPALFVALTFERREVLDSSNIKPMNLIGVDRGENIPAVIALTDPEGCPLSRFKDSLGNPTHILRIGESYKEKQRTIQAKKEVEQRRAGGYSRKYASKAKNLADDMVRNTARDLLYYAVTQDAMLIFENLSRGFGRQGKRTFMAERQYTRMEDWLTAKLAYEGPLPSKTYLSKTLAQYTSKTCSNCGFTITSADYDRVLEKLKKTATGWMTTINGKELKVEGQITYYNRYKRQNVVKDLSVELDRLSEESVNNDISSWTKGRSGEALSLLKKRFSHRPVQEKFVCLNCGFETHADEQAALNIARSWLFLRSQEYKKYQTNKTTGNTDKRAFVETWQSFYRKKLKEVWKPAV

SEQ ID NO: 46974 - protein, 980 aa, synthetic construct
  REGION 1..980: note = engineered CasX variant
QEIKRINKIRRRLVKDSNTKKAGKTGPMKTLLVRVMTPDLRERLENLRKKPENIPQPISNTSRANLNKLLTDYTEMKKAILHVYWEEFQKDPVGLMSRVAQPASKKIDQNKLKPEMDEKGNLTTAGFACSQCGQPLFVYKLEQVSEKGKAYTNYFGRCNVAEHEKLIKLAQLKPEKDSDEAVTYSLGKFGQRALDFYSIHVTKESTHPVKPLAQIAGNRYASGPVGKALSDACMGTIASFLSKYQDIIIEHQKVVKGNQKRLESLRELAGKENLEYPSVTLPPQPHTKEGVDAYNEVIARVRMWVNLNLWQKLKLSRDDAKPLLRLKGFPSFPLVERQANEVDWWDMVCNVKKLINEKKEDGKVFWQNLAGYKRQEALRPYLSSEEDRKKGKKFARYQLGDLLLHLEKKHGERDWGKVYDEAWERIDKKVEGLSKHIKLEEERRSEDAQSKAALTDWLRAKASFVIEGLKEADKDEFCRCELKLQKWYGDLRGKPFAIEAENSILDISGFSKQYNCAFIWQKDGVKKLNLYLIINYFKGGKLRFKKIKPEAFEANRFYTVINKKSGEIVPMEVNFNFDDPNLIILPLAFGKRQGREFIWNDLLSLETGSLKLANGRVIEKTLYNRRTRQDEPALFVALTFERREVLDSSNIKPMNLIGVDRGENIPAVIALTDPEGCPLSRFKDSLGNPTHILRIGESYKEKQRTIQAKKEVEQRRAGGYSRKYASKAKNLADDMVRNTARDLLYYAVTQDAMLIFENLSRGFGRQGKRTFMAERQYTRMEDWLTAKLAYEGPLPSKTYLSKTLAQYTSKTCSNCGFTITSADYDRVLEKLKKTATGWMTTINGKELKVEGQITYYNRYKRQNVVKDLSVELDRLSEESVNNDISSWTKGRSGEALSLLKKRFSHRPVQEKFVCLNCGFETHADEQAALNIARSWLFLRSQEYKKYQTNKTTGNTDKRAFVETWQSFYRKKLKEVWKPAV

SEQ ID NO: 46975 - protein, 979 aa, synthetic construct
  REGION 1..979: note = engineered CasX variant
QEIKRINKIRRRLVKDSNTKKAGKTGPMKTLLVRVMTPDLRERLENLRKKPENIPQPISNTSRANLNKLLTDYTEMKKAILHVYWEEFQKDPVGLMSRVAQPASKKIDQNKLKPEMDEKGNLTTAGFACSQCGQPLFVYKLEQVSEKGKAYTNYFGRCNVAEHEKLILLAQLKPEKDSDEAVTYSLGKFGQRALDFYSIHVTKESTHPVKPLAQIAGNRYASPVGKALSDACMGTIASFLSKYQDIIIEHQKVVKGNQKRLESLRELAGKENLEYPSVTLPPQPHTKEGVDAYNEVIARVRMWVNLNLWQKLKLSRDDAKPLLRLKGFPSFPLVERQANEVDWWDMVCNVKKLINEKKEDGKVFWQNLAGYKRQEALRPYLSSEEDRKKGKKFARYQLGDLLLHLEKKHGERDWGKVYDEAWERIDKKVEGLSKHIKLEEERRSEDAQSKAALTDWLRAKASFVIEGLKEADKDEFCRCELKLQKWYGDLRGKPFAIEAENSILDISGFSKQYNCAFIWQKDGVKKLNLYLIINYFKGGKLRFKKIKPEAFEANRFYTVINKKSGEIVPMEVNFNFDDPNLIILPLAFGKRQGREFIWNDLLSLETGSLKLANGRVIEKTLYNRRTRQDEPALFVALTFERREVLDSSNIKPMNLIGVDRGENIPAVIALTDPEGCPLSRFKDSLGNPTHILRIGESYKEKQRTIQAKKEVEQRRAGGYSRKYASKAKNLADDMVRNTARDLLYYAVTQDAMLIFENLSRGFGRQGKRTFMAERQYTRMEDWLTAKLAYEGPLPSKTYLSKTLAQYTSKTCSNCGFTITSADYDRVLEKLKKTATGWMTTINGKELKVEGQITYYNRYKRQNVVKDLSVELDRLSEESVNNDISSWTKGRSGEALSLLKKRFSHRPVQEKFVCLNCGFETHADEQAALNIARSWLFLRSQEYKKYQTNKTTGNTDKRAFVETWQSFYRKKLKEVWKPAV

SEQ ID NO: 46976 - protein, 980 aa, synthetic construct
  REGION 1..980: note = engineered CasX variant
QEIKRINKIRRRLVKDSNTKKAGKTGPMKTLLVRVMTPDLRERLENLRKKPENIPQPISNTSRANLNKLLTDYTEMKKAILHVYWEEFQKDPVGLMSRVAQPASKKIDQNKLKPEMDEKGNLTTAGFACSQCGQPLFVYKLEQVSEKGKAYTNYFGRCNVAEHEKLILLAQLKPEKDSDEAVTYSLGKFGQRALDFYSIHVTKESTHPVKPLAQIAGNRYASYPVGKALSDACMGTIASFLSKYQDIIIEHQKVVKGNQKRLESLRELAGKENLEYPSVTLPPQPHTKEGVDAYNEVIARVRMWVNLNLWQKLKLSRDDAKPLLRLKGFPSFPLVERQANEVDWWDMVCNVKKLINEKKEDGKVFWQNLAGYKRQEALRPYLSSEEDRKKGKKFARYQLGDLLLHLEKKHGEYDWGKVYDEAWERIDKKVEGLSKHIKLEEERRSEDAQSKAALTDWLRAKASFVIEGLKEADKDEFCRCELKLQKWYGDLRGKPFAIEAENSILDISGFSKQYNCAFIWQKDGVKKLNLYLIINYFKGGKLRFKKIKPEAFEANRFYTVINKKSGEIVPMEVNFNFDDPNLIILPLAFGKRQGREFIWNDLLSLETGSLKLANGRVIEKTLYNRRTRQDEPALFVALTFERREVLDSSNIKPMNLIGVDRGENIPAVIALTDPEGCPLSRFKDSLGNPTHILRIGESYKEKQRTIQAKKEVEQRRAGGYSRKYASKAKNLADDMVRNTARDLLYYAVTQDAMLIFENLSRGFGRQGKRTFMAERQYTRMEDWLTAKLAYEGPLPSKTYLSKTLAQYTSKTCSNCGFTITSADYDRVLEKLKKTATGWMTTINGKELKVEGQITYYNRYKRQNVVKDLSVELDRLSEESVNNDISSWTKGRSGEALSLLKKRFSHRPVQEKFVCLNCGFETHADEQAALNIARSWLFLRSQEYKKYQTNKTTGNTDKRAFVETWQSFYRKKLKEVWKPAV

SEQ ID NO: 46977 - protein, 980 aa, synthetic construct
  REGION 1..980: note = engineered CasX variant
QEIKRINKIRRRLVKDSNTKKAGKTGPMKTLLVRVMTPDLRERLENLRKKPENIPQPISNTSRANLNKLLTDYTEMKKAILHVYWEEFQKDPVGLMSRVAQPASKKIDQNKLKPEMDEKGNLTTAGFACSQCGQPLFVYKLEQVSEKGKAYTNYFGRCNVAEHEKLILLAQLKPEKDSDEAVTYSLGKFGQRALDFYSIHVTKESTHPVKPLAQIAGNRYASHPVGKALSDACMGTIASFLSKYQDIIIEHQKVVKGNQKRLESLRELAGKENLEYPSVTLPPQPHTKEGVDAYNEVIARVRMWVNLNLWQKLKLSRDDAKPLLRLKGFPSFPLVERQANEVDWWDMVCNVKKLINEKKEDGKVFWQNLAGYKRQEALRPYLSSEEDRKKGKKFARYQLGDLLLHLEKKHGEYDWGKVYDEAWERIDKKVEGLSKHIKLEEERRSEDAQSKAALTDWLRAKASFVIEGLKEADKDEFCRCELKLQKWYGDLRGKPFAIEAENSILDISGFSKQYNCAFIWQKDGVKKLNLYLIINYFKGGKLRFKKIKPEAFEANRFYTVINKKSGEIVPMEVNFNFDDPNLIILPLAFGKRQGREFIWNDLLSLETGSLKLANGRVIEKTLYNRRTRQDEPALFVALTFERREVLDSSNIKPMNLIGVDRGENIPAVIALTDPEGCPLSRFKDSLGNPTHILRIGESYKEKQRTIQAKKEVEQRRAGGYSRKYASKAKNLADDMVRNTARDLLYYAVTQDAMLIFENLSRGFGRQGKRTFMAERQYTRMEDWLTAKLAYEGPLPSKTYLSKTLAQYTSKTCSNCGFTITSADYDRVLEKLKKTATGWMTTINGKELKVEGQITYYNRYKRQNVVKDLSVELDRLSEESVNNDISSWTKGRSGEALSLLKKRFSHRPVQEKFVCLNCGFETHADEQAALNIARSWLFLRSQEYKKYQTNKTTGNTDKRAFVETWQSFYRKKLKEVWKPAV

SEQ ID NO: 46978 - protein, 980 aa, synthetic construct
  REGION 1..980: note = engineered CasX variant
QEIKRINKIRRRLVKDSNTKKAGKTGPMKTLLVRVMTPDLRERLENLRKKPENIPQPISNTSRANLNKLLTDYTEMKKAILHVYWEEFQKDPVGLMSRVAQPASKKIDQNKLKPEMDEKGNLTTAGFACSQCGQPLFVYKLEQVSEKGKAYTNYFGRCNVAEHEKLILLAQLKPEKDSDEAVTYSLGKFGQRALDFYSIHVTKESTHPVKPLAQIAGNRYASSPVGKALSDACMGTIASFLSKYQDIIIEHQKVVKGNQKRLESLRELAGKENLEYPSVTLPPQPHTKEGVDAYNEVIARVRMWVNLNLWQKLKLSRDDAKPLLRLKGFPSFPLVERQANEVDWWDMVCNVKKLINEKKEDGKVFWQNLAGYKRQEALRPYLSSEEDRKKGKKFARYQLGDLLLHLEKKHGEYDWGKVYDEAWERIDKKVEGLSKHIKLEEERRSEDAQSKAALTDWLRAKASFVIEGLKEADKDEFCRCELKLQKWYGDLRGKPFAIEAENSILDISGFSKQYNCAFIWQKDGVKKLNLYLIINYFKGGKLRFKKIKPEAFEANRFYTVINKKSGEIVPMEVNFNFDDPNLIILPLAFGKRQGREFIWNDLLSLETGSLKLANGRVIEKTLYNRRTRQDEPALFVALTFERREVLDSSNIKPMNLIGVDRGENIPAVIALTDPEGCPLSRFKDSLGNPTHILRIGESYKEKQRTIQAKKEVEQRRAGGYSRKYASKAKNLADDMVRNTARDLLYYAVTQDAMLIFENLSRGFGRQGKRTFMAERQYTRMEDWLTAKLAYEGPLPSKTYLSKTLAQYTSKTCSNCGFTITSADYDRVLEKLKKTATGWMTTINGKELKVEGQITYYNRYKRQNVVKDLSVELDRLSEESVNNDISSWTKGRSGEALSLLKKRFSHRPVQEKFVCLNCGFETHADEQAALNIARSWLFLRSQEYKKYQTNKTTGNTDKRAFVETWQSFYRKKLKEVWKPAV

SEQ ID NO: 46979 - protein, 980 aa, synthetic construct
  REGION 1..980: note = engineered CasX variant
QEIKRINKIRRRLVKDSNTKKAGKTGPMKTLLVRVMTPDLRERLENLRKKPENIPQPISNTSRANLNKLLTDYTEMKKAILHVYWEEFQKDPVGLMSRVAQPASKKIDQNKLKPEMDEKGNLTTAGFACSQCGQPLFVYKLEQVSEKGKAYTNYFGRCNVAEHEKLILLAQLKPEKDSDEAVTYSLGKFGQRALDFYSIHVTKESTHPVKPLAQIAGNRYASTPVGKALSDACMGTIASFLSKYQDIIIEHQKVVKGNQKRLESLRELAGKENLEYPSVTLPPQPHTKEGVDAYNEVIARVRMWVNLNLWQKLKLSRDDAKPLLRLKGFPSFPLVERQANEVDWWDMVCNVKKLINEKKEDGKVFWQNLAGYKRQEALRPYLSSEEDRKKGKKFARYQLGDLLLHLEKKHGEYDWGKVYDEAWERIDKKVEGLSKHIKLEEERRSEDAQSKAALTDWLRAKASFVIEGLKEADKDEFCRCELKLQKWYGDLRGKPFAIEAENSILDISGFSKQYNCAFIWQKDGVKKLNLYLIINYFKGGKLRFKKIKPEAFEANRFYTVINKKSGEIVPMEVNFNFDDPNLIILPLAFGKRQGREFIWNDLLSLETGSLKLANGRVIEKTLYNRRTRQDEPALFVALTFERREVLDSSNIKPMNLIGVDRGENIPAVIALTDPEGCPLSRFKDSLGNPTHILRIGESYKEKQRTIQAKKEVEQRRAGGYSRKYASKAKNLADDMVRNTARDLLYYAVTQDAMLIFENLSRGFGRQGKRTFMAERQYTRMEDWLTAKLAYEGPLPSKTYLSKTLAQYTSKTCSNCGFTITSADYDRVLEKLKKTATGWMTTINGKELKVEGQITYYNRYKRQNVVKDLSVELDRLSEESVNNDISSWTKGRSGEALSLLKKRFSHRPVQEKFVCLNCGFETHADEQAALNIARSWLFLRSQEYKKYQTNKTTGNTDKRAFVETWQSFYRKKLKEVWKPAV

SEQ ID NO: 46980 - protein, 980 aa, synthetic construct
  REGION 1..980: note = engineered CasX variant
QEIKRINKIRRRLVKDSNTKKAGKTGPMKTLLVRVMTPDLRERLENLRKKPENIPQPISNTSRANLNKLLTDYTEMKKAILHVYWEEFQKDPVGLMSRVAQPASKKIDQNKLKPEMDEKGNLTTAGFACSQCGQPLFVYKLEQVSEKGKAYTNYFGRCNVAEHEKLILLAQLKPEKDSDEAVTYSLGKFGQRALDFYSIHVTKESTHPVKPLAQIAGNRYASAPVGKALSDACMGTIASFLSKYQDIIIEHQKVVKGNQKRLESLRELAGKENLEYPSVTLPPQPHTKEGVDAYNEVIARVRMWVNLNLWQKLKLSRDDAKPLLRLKGFPSFPLVERQANEVDWWDMVCNVKKLINEKKEDGKVFWQNLAGYKRQEALRPYLSSEEDRKKGKKFARYQLGDLLLHLEKKHGEYDWGKVYDEAWERIDKKVEGLSKHIKLEEERRSEDAQSKAALTDWLRAKASFVIEGLKEADKDEFCRCELKLQKWYGDLRGKPFAIEAENSILDISGFSKQYNCAFIWQKDGVKKLNLYLIINYFKGGKLRFKKIKPEAFEANRFYTVINKKSGEIVPMEVNFNFDDPNLIILPLAFGKRQGREFIWNDLLSLETGSLKLANGRVIEKTLYNRRTRQDEPALFVALTFERREVLDSSNIKPMNLIGVDRGENIPAVIALTDPEGCPLSRFKDSLGNPTHILRIGESYKEKQRTIQAKKEVEQRRAGGYSRKYASKAKNLADDMVRNTARDLLYYAVTQDAMLIFENLSRGFGRQGKRTFMAERQYTRMEDWLTAKLAYEGPLPSKTYLSKTLAQYTSKTCSNCGFTITSADYDRVLEKLKKTATGWMTTINGKELKVEGQITYYNRYKRQNVVKDLSVELDRLSEESVNNDISSWTKGRSGEALSLLKKRFSHRPVQEKFVCLNCGFETHADEQAALNIARSWLFLRSQEYKKYQTNKTTGNTDKRAFVETWQSFYRKKLKEVWKPAV

SEQ ID NO: 46981 - protein, 980 aa, synthetic construct
  REGION 1..980: note = engineered CasX variant
QEIKRINKIRRRLVKDSNTKKAGKTGPMKTLLVRVMTPDLRERLENLRKKPENIPQPISNTSRANLNKLLTDYTEMKKAILHVYWEEFQKDPVGLMSRVAQPASKKIDQNKLKPEMDEKGNLTTAGFACSQCGQPLFVYKLEQVSEKGKAYTNYFGRCNVAEHEKLILLAQLKPEKDSDEAVTYSLGKFGQRALDFYSIHVTKESTHPVKPLAQIAGNRYASVPVGKALSDACMGTIASFLSKYQDIIIEHQKVVKGNQKRLESLRELAGKENLEYPSVTLPPQPHTKEGVDAYNEVIARVRMWVNLNLWQKLKLSRDDAKPLLRLKGFPSFPLVERQANEVDWWDMVCNVKKLINEKKEDGKVFWQNLAGYKRQEALRPYLSSEEDRKKGKKFARYQLGDLLLHLEKKHGEYDWGKVYDEAWERIDKKVEGLSKHIKLEEERRSEDAQSKAALTDWLRAKASFVIEGLKEADKDEFCRCELKLQKWYGDLRGKPFAIEAENSILDISGFSKQYNCAFIWQKDGVKKLNLYLIINYFKGGKLRFKKIKPEAFEANRFYTVINKKSGEIVPMEVNFNFDDPNLIILPLAFGKRQGREFIWNDLLSLETGSLKLANGRVIEKTLYNRRTRQDEPALFVALTFERREVLDSSNIKPMNLIGVDRGENIPAVIALTDPEGCPLSRFKDSLGNPTHILRIGESYKEKQRTIQAKKEVEQRRAGGYSRKYASKAKNLADDMVRNTARDLLYYAVTQDAMLIFENLSRGFGRQGKRTFMAERQYTRMEDWLTAKLAYEGPLPSKTYLSKTLAQYTSKTCSNCGFTITSADYDRVLEKLKKTATGWMTTINGKELKVEGQITYYNRYKRQNVVKDLSVELDRLSEESVNNDISSWTKGRSGEALSLLKKRFSHRPVQEKFVCLNCGFETHADEQAALNIARSWLFLRSQEYKKYQTNKTTGNTDKRAFVETWQSFYRKKLKEVWKPAV

SEQ ID NO: 46982 - protein, 980 aa, synthetic construct
  REGION 1..980: note = engineered CasX variant
QEIKRINKIRRRLVKDSNTKKAGKTGPMKTLLVRVMTPDLRERLENLRKKPENIPQPISNTSRANLNKLLTDYTEMKKAILHVYWEEFQKDPVGLMSRVAQPASKKIDQNKLKPEMDEKGNLTTAGFACSQCGQPLFVYKLEQVSEKGKAYTNYFGRCNVAEHEKLIKLAQLKPEKDSDEAVTYSLGKFGQRALDFYSIHVTKESTHPVKPLAQIAGNRYASGPVGKALSDACMGTIASFLSKYQDIIIEHQKVVKGNQKRLESLRELAGKENLEYPSVTLPPQPHTKEGVDAYNEVIARVRMWVNLNLWQKLKLSRDDAKPLLRLKGFPSFPLVERQANEVDWWDMVCNVKKLINEKKEDGKVFWQNLAGYKRQEALRPYLSSEEDRKKGKKFARYQLGDLLLHLEKKHGEYDWGKVYDEAWERIDKKVEGLSKHIKLEEERRSEDAQSKAALTDWLRAKASFVIEGLKEADKDEFCRCELKLQKWYGDLRGKPFAIEAENSILDISGFSKQYNCAFIWQKDGVKKLNLYLIINYFKGGKLRFKKIKPEAFEANRFYTVINKKSGEIVPMEVNFNFDDPNLIILPLAFGKRQGREFIWNDLLSLETGSLKLANGRVIEKTLYNRRTRQDEPALFVALTFERREVLDSSNIKPMNLIGVDRGENIPAVIALTDPEGCPLSRFKDSLGNPTHILRIGESYKEKQRTIQAKKEVEQRRAGGYSRKYASKAKNLADDMVRNTARDLLYYAVTQDAMLIFENLSRGFGRQGKRTFMAERQYTRMEDWLTAKLAYEGPLPSKTYLSKTLAQYTSKTCSNCGFTITSADYDRVLEKLKKTATGWMTTINGKELKVEGQITYYNRYKRQNVVKDLSVELDRLSEESVNNDISSWTKGRSGEALSLLKKRFSHRPVQEKFVCLNCGFETHADEQAALNIARSWLFLRSQEYKKYQTNKTTGNTDKRAFVETWQSFYRKKLKEVWKPAV

SEQ ID NO: 46983 - protein, 979 aa, synthetic construct
  REGION 1..979: note = engineered CasX variant
QEIKRINKIRRRLVKDSNTKKAGKTGPMKTLLVRVMTPDLRERLENLRKKPENIPQPISNTSRANLNKLLTDYTEMKKAILHVYWEEFQKDPVGLMSRVAQPASKKIDQNKLKPEMDEKGNLTTAGFACSQCGQPLFVYKLEQVSEKGKAYTNYFGRCNVAEHEKLILLAQLKPEKDSDEAVTYSLGKFGQRALDFYSIHVTKESTHPVKPLAQIAGNRYASPVGKALSDACMGTIASFLSKYQDIIIEHQKVVKGNQKRLESLRELAGKENLEYPSVTLPPQPHTKEGVDAYNEVIARVRMWVNLNLWQKLKLSRDDAKPLLRLKGFPSFPLVERQANEVDWWDMVCNVKKLINEKKEDGKVFWQNLAGYKRQEALRPYLSSEEDRKKGKKFARYQLGDLLLHLEKKHGEYDWGKVYDEAWERIDKKVEGLSKHIKLEEERRSEDAQSKAALTDWLRAKASFVIEGLKEADKDEFCRCELKLQKWYGDLRGKPFAIEAENSILDISGFSKQYNCAFIWQKDGVKKLNLYLIINYFKGGKLRFKKIKPEAFEANRFYTVINKKSGEIVPMEVNFNFDDPNLIILPLAFGKRQGREFIWNDLLSLETGSLKLANGRVIEKTLYNRRTRQDEPALFVALTFERREVLDSSNIKPMNLIGVDRGENIPAVIALTDPEGCPLSRFKDSLGNPTHILRIGESYKEKQRTIQAKKEVEQRRAGGYSRKYASKAKNLADDMVRNTARDLLYYAVTQDAMLIFENLSRGFGRQGKRTFMAERQYTRMEDWLTAKLAYEGPLPSKTYLSKTLAQYTSKTCSNCGFTITSADYDRVLEKLKKTATGWMTTINGKELKVEGQITYYNRYKRQNVVKDLSVELDRLSEESVNNDISSWTKGRSGEALSLLKKRFSHRPVQEKFVCLNCGFETHADEQAALNIARSWLFLRSQEYKKYQTNKTTGNTDKRAFVETWQSFYRKKLKEVWKPAV

SEQ ID NO: 46984 - protein, 979 aa, synthetic construct
  REGION 1..979: note = engineered CasX variant
QEIKRINKIRRRLVKDSNTKKAGKTGPMKTLLVRVMTPDLRERLENLRKKPENIPQPISNTSRANLNKLLTDYTEMKKAILHVYWEEFQKDPVGLMSRVAQPASKKIDQNKLKPEMDEKGNLTTAGFACSQCGQPLFVYKLEQVSEKGKAYTNYFGRCNVAEHEKLILLAQLKPEKDSDEAVTYSLGKFGQRALDFYSIHVTKESTHPVKPLAQIAGNRYASYPVGKALSDACMGTIASFLSKYQDIIIEHQKVVKGNQKRLESLRELAGKENLEYPSVTLPPQPHTKEGVDAYNEVIARVRMWVNLNLWQKLKLSRDDAKPLLRLKGFPSFPLVERQANEVDWWDMVCNVKKLINEKKEDGKVFWQNLAGYKRQEALRPYLSSEEDRKKGKKFARYQLGDLLLHLEKKHGEDWGDVYDEAWERIDKKVEGLSKHIKLEEERRSEDAQSKAALTDWLRAKASFVIEGLKEADKDEFCRCELKLQKWYGDLRGKPFAIEAENSILDISGFSKQYNCAFIWQKDGVKKLNLYLIINYFKGGKLRFKKIKPEAFEANRFYTVINKKSGEIVPMEVNFNFDDPNLIILPLAFGKRQGREFIWNDLLSLETGSLKLANGRVIEKTLYNRRTRQDEPALFVALTFERREVLDSSNIKPMNLIGVDRGENIPAVIALTDPEGCPLSRFKDSLGNPTHILRIGESYKEKQRTIQAKKEVEQRRAGGYSRKYASKAKNLADDMVRNTARDLLYYAVTQDAMLIFENLSRGFGRQGKRTFMAERQYTRMEDWLTAKLAYEGPLPSKTYLSKTLAQYTSKTCSNCGFTITSADYDRVLEKLKKTATGWMTTINGKELKVEGQITYYNRYKRQNVVKDLSVELDRLSEESVNNDISSWTKGRSGEALSLLKKRFSHRPVQEKFVCLNCGFETHADEQAALNIARSWLFLRSQEYKKYQTNKTTGNTDKRAFVETWQSFYRKKLKEVWKPAV

SEQ ID NO: 46985 - protein, 979 aa, synthetic construct
  REGION 1..979: note = engineered CasX variant
QEIKRINKIRRRLVKDSNTKKAGKTGPMKTLLVRVMTPDLRERLENLRKKPENIPQPISNTSRANLNKLLTDYTEMKKAILHVYWEEFQKDPVGLMSRVAQPASKKIDQNKLKPEMDEKGNLTTAGFACSQCGQPLFVYKLEQVSEKGKAYTNYFGRCNVAEHEKLILLAQLKPEKDSDEAVTYSLGKFGQRALDFYSIHVTKESTHPVKPLAQIAGNRYASHPVGKALSDACMGTIASFLSKYQDIIIEHQKVVKGNQKRLESLRELAGKENLEYPSVTLPPQPHTKEGVDAYNEVIARVRMWVNLNLWQKLKLSRDDAKPLLRLKGFPSFPLVERQANEVDWWDMVCNVKKLINEKKEDGKVFWQNLAGYKRQEALRPYLSSEEDRKKGKKFARYQLGDLLLHLEKKHGEDWGDVYDEAWERIDKKVEGLSKHIKLEEERRSEDAQSKAALTDWLRAKASFVIEGLKEADKDEFCRCELKLQKWYGDLRGKPFAIEAENSILDISGFSKQYNCAFIWQKDGVKKLNLYLIINYFKGGKLRFKKIKPEAFEANRFYTVINKKSGEIVPMEVNFNFDDPNLIILPLAFGKRQGREFIWNDLLSLETGSLKLANGRVIEKTLYNRRTRQDEPALFVALTFERREVLDSSNIKPMNLIGVDRGENIPAVIALTDPEGCPLSRFKDSLGNPTHILRIGESYKEKQRTIQAKKEVEQRRAGGYSRKYASKAKNLADDMVRNTARDLLYYAVTQDAMLIFENLSRGFGRQGKRTFMAERQYTRMEDWLTAKLAYEGPLPSKTYLSKTLAQYTSKTCSNCGFTITSADYDRVLEKLKKTATGWMTTINGKELKVEGQITYYNRYKRQNVVKDLSVELDRLSEESVNNDISSWTKGRSGEALSLLKKRFSHRPVQEKFVCLNCGFETHADEQAALNIARSWLFLRSQEYKKYQTNKTTGNTDKRAFVETWQSFYRKKLKEVWKPAV

SEQ ID NO: 46986 - protein, 979 aa, synthetic construct
  REGION 1..979: note = engineered CasX variant
QEIKRINKIRRRLVKDSNTKKAGKTGPMKTLLVRVMTPDLRERLENLRKKPENIPQPISNTSRANLNKLLTDYTEMKKAILHVYWEEFQKDPVGLMSRVAQPASKKIDQNKLKPEMDEKGNLTTAGFACSQCGQPLFVYKLEQVSEKGKAYTNYFGRCNVAEHEKLILLAQLKPEKDSDEAVTYSLGKFGQRALDFYSIHVTKESTHPVKPLAQIAGNRYASSPVGKALSDACMGTIASFLSKYQDIIIEHQKVVKGNQKRLESLRELAGKENLEYPSVTLPPQPHTKEGVDAYNEVIARVRMWVNLNLWQKLKLSRDDAKPLLRLKGFPSFPLVERQANEVDWWDMVCNVKKLINEKKEDGKVFWQNLAGYKRQEALRPYLSSEEDRKKGKKFARYQLGDLLLHLEKKHGEDWGDVYDEAWERIDKKVEGLSKHIKLEEERRSEDAQSKAALTDWLRAKASFVIEGLKEADKDEFCRCELKLQKWYGDLRGKPFAIEAENSILDISGFSKQYNCAFIWQKDGVKKLNLYLIINYFKGGKLRFKKIKPEAFEANRFYTVINKKSGEIVPMEVNFNFDDPNLIILPLAFGKRQGREFIWNDLLSLETGSLKLANGRVIEKTLYNRRTRQDEPALFVALTFERREVLDSSNIKPMNLIGVDRGENIPAVIALTDPEGCPLSRFKDSLGNPTHILRIGESYKEKQRTIQAKKEVEQRRAGGYSRKYASKAKNLADDMVRNTARDLLYYAVTQDAMLIFENLSRGFGRQGKRTFMAERQYTRMEDWLTAKLAYEGPLPSKTYLSKTLAQYTSKTCSNCGFTITSADYDRVLEKLKKTATGWMTTINGKELKVEGQITYYNRYKRQNVVKDLSVELDRLSEESVNNDISSWTKGRSGEALSLLKKRFSHRPVQEKFVCLNCGFETHADEQAALNIARSWLFLRSQEYKKYQTNKTTGNTDKRAFVETWQSFYRKKLKEVWKPAV

SEQ ID NO: 46987 - protein, 979 aa, synthetic construct
  REGION 1..979: note = engineered CasX variant
QEIKRINKIRRRLVKDSNTKKAGKTGPMKTLLVRVMTPDLRERLENLRKKPENIPQPISNTSRANLNKLLTDYTEMKKAILHVYWEEFQKDPVGLMSRVAQPASKKIDQNKLKPEMDEKGNLTTAGFACSQCGQPLFVYKLEQVSEKGKAYTNYFGRCNVAEHEKLILLAQLKPEKDSDEAVTYSLGKFGQRALDFYSIHVTKESTHPVKPLAQIAGNRYASTPVGKALSDACMGTIASFLSKYQDIIIEHQKVVKGNQKRLESLRELAGKENLEYPSVTLPPQPHTKEGVDAYNEVIARVRMWVNLNLWQKLKLSRDDAKPLLRLKGFPSFPLVERQANEVDWWDMVCNVKKLINEKKEDGKVFWQNLAGYKRQEALRPYLSSEEDRKKGKKFARYQLGDLLLHLEKKHGEDWGDVYDEAWERIDKKVEGLSKHIKLEEERRSEDAQSKAALTDWLRAKASFVIEGLKEADKDEFCRCELKLQKWYGDLRGKPFAIEAENSILDISGFSKQYNCAFIWQKDGVKKLNLYLIINYFKGGKLRFKKIKPEAFEANRFYTVINKKSGEIVPMEVNFNFDDPNLIILPLAFGKRQGREFIWNDLLSLETGSLKLANGRVIEKTLYNRRTRQDEPALFVALTFERREVLDSSNIKPMNLIGVDRGENIPAVIALTDPEGCPLSRFKDSLGNPTHILRIGESYKEKQRTIQAKKEVEQRRAGGYSRKYASKAKNLADDMVRNTARDLLYYAVTQDAMLIFENLSRGFGRQGKRTFMAERQYTRMEDWLTAKLAYEGPLPSKTYLSKTLAQYTSKTCSNCGFTITSADYDRVLEKLKKTATGWMTTINGKELKVEGQITYYNRYKRQNVVKDLSVELDRLSEESVNNDISSWTKGRSGEALSLLKKRFSHRPVQEKFVCLNCGFETHADEQAALNIARSWLFLRSQEYKKYQTNKTTGNTDKRAFVETWQSFYRKKLKEVWKPAV

SEQ ID NO: 46988 - protein, 979 aa, synthetic construct
  REGION 1..979: note = engineered CasX variant
QEIKRINKIRRRLVKDSNTKKAGKTGPMKTLLVRVMTPDLRERLENLRKKPENIPQPISNTSRANLNKLLTDYTEMKKAILHVYWEEFQKDPVGLMSRVAQPASKKIDQNKLKPEMDEKGNLTTAGFACSQCGQPLFVYKLEQVSEKGKAYTNYFGRCNVAEHEKLILLAQLKPEKDSDEAVTYSLGKFGQRALDFYSIHVTKESTHPVKPLAQIAGNRYASAPVGKALSDACMGTIASFLSKYQDIIIEHQKVVKGNQKRLESLRELAGKENLEYPSVTLPPQPHTKEGVDAYNEVIARVRMWVNLNLWQKLKLSRDDAKPLLRLKGFPSFPLVERQANEVDWWDMVCNVKKLINEKKEDGKVFWQNLAGYKRQEALRPYLSSEEDRKKGKKFARYQLGDLLLHLEKKHGEDWGDVYDEAWERIDKKVEGLSKHIKLEEERRSEDAQSKAALTDWLRAKASFVIEGLKEADKDEFCRCELKLQKWYGDLRGKPFAIEAENSILDISGFSKQYNCAFIWQKDGVKKLNLYLIINYFKGGKLRFKKIKPEAFEANRFYTVINKKSGEIVPMEVNFNFDDPNLIILPLAFGKRQGREFIWNDLLSLETGSLKLANGRVIEKTLYNRRTRQDEPALFVALTFERREVLDSSNIKPMNLIGVDRGENIPAVIALTDPEGCPLSRFKDSLGNPTHILRIGESYKEKQRTIQAKKEVEQRRAGGYSRKYASKAKNLADDMVRNTARDLLYYAVTQDAMLIFENLSRGFGRQGKRTFMAERQYTRMEDWLTAKLAYEGPLPSKTYLSKTLAQYTSKTCSNCGFTITSADYDRVLEKLKKTATGWMTTINGKELKVEGQITYYNRYKRQNVVKDLSVELDRLSEESVNNDISSWTKGRSGEALSLLKKRFSHRPVQEKFVCLNCGFETHADEQAALNIARSWLFLRSQEYKKYQTNKTTGNTDKRAFVETWQSFYRKKLKEVWKPAV

SEQ ID NO: 46989 - protein, 979 aa, synthetic construct
  REGION 1..979: note = engineered CasX variant
QEIKRINKIRRRLVKDSNTKKAGKTGPMKTLLVRVMTPDLRERLENLRKKPENIPQPISNTSRANLNKLLTDYTEMKKAILHVYWEEFQKDPVGLMSRVAQPASKKIDQNKLKPEMDEKGNLTTAGFACSQCGQPLFVYKLEQVSEKGKAYTNYFGRCNVAEHEKLILLAQLKPEKDSDEAVTYSLGKFGQRALDFYSIHVTKESTHPVKPLAQIAGNRYASVPVGKALSDACMGTIASFLSKYQDIIIEHQKVVKGNQKRLESLRELAGKENLEYPSVTLPPQPHTKEGVDAYNEVIARVRMWVNLNLWQKLKLSRDDAKPLLRLKGFPSFPLVERQANEVDWWDMVCNVKKLINEKKEDGKVFWQNLAGYKRQEALRPYLSSEEDRKKGKKFARYQLGDLLLHLEKKHGEDWGDVYDEAWERIDKKVEGLSKHIKLEEERRSEDAQSKAALTDWLRAKASFVIEGLKEADKDEFCRCELKLQKWYGDLRGKPFAIEAENSILDISGFSKQYNCAFIWQKDGVKKLNLYLIINYFKGGKLRFKKIKPEAFEANRFYTVINKKSGEIVPMEVNFNFDDPNLIILPLAFGKRQGREFIWNDLLSLETGSLKLANGRVIEKTLYNRRTRQDEPALFVALTFERREVLDSSNIKPMNLIGVDRGENIPAVIALTDPEGCPLSRFKDSLGNPTHILRIGESYKEKQRTIQAKKEVEQRRAGGYSRKYASKAKNLADDMVRNTARDLLYYAVTQDAMLIFENLSRGFGRQGKRTFMAERQYTRMEDWLTAKLAYEGPLPSKTYLSKTLAQYTSKTCSNCGFTITSADYDRVLEKLKKTATGWMTTINGKELKVEGQITYYNRYKRQNVVKDLSVELDRLSEESVNNDISSWTKGRSGEALSLLKKRFSHRPVQEKFVCLNCGFETHADEQAALNIARSWLFLRSQEYKKYQTNKTTGNTDKRAFVETWQSFYRKKLKEVWKPAV

SEQ ID NO: 46990 - protein, 979 aa, synthetic construct
  REGION 1..979: note = engineered CasX variant
QEIKRINKIRRRLVKDSNTKKAGKTGPMKTLLVRVMTPDLRERLENLRKKPENIPQPISNTSRANLNKLLTDYTEMKKAILHVYWEEFQKDPVGLMSRVAQPASKKIDQNKLKPEMDEKGNLTTAGFACSQCGQPLFVYKLEQVSEKGKAYTNYFGRCNVAEHEKLIKLAQLKPEKDSDEAVTYSLGKFGQRALDFYSIHVTKESTHPVKPLAQIAGNRYASGPVGKALSDACMGTIASFLSKYQDIIIEHQKVVKGNQKRLESLRELAGKENLEYPSVTLPPQPHTKEGVDAYNEVIARVRMWVNLNLWQKLKLSRDDAKPLLRLKGFPSFPLVERQANEVDWWDMVCNVKKLINEKKEDGKVFWQNLAGYKRQEALRPYLSSEEDRKKGKKFARYQLGDLLLHLEKKHGEDWGDVYDEAWERIDKKVEGLSKHIKLEEERRSEDAQSKAALTDWLRAKASFVIEGLKEADKDEFCRCELKLQKWYGDLRGKPFAIEAENSILDISGFSKQYNCAFIWQKDGVKKLNLYLIINYFKGGKLRFKKIKPEAFEANRFYTVINKKSGEIVPMEVNFNFDDPNLIILPLAFGKRQGREFIWNDLLSLETGSLKLANGRVIEKTLYNRRTRQDEPALFVALTFERREVLDSSNIKPMNLIGVDRGENIPAVIALTDPEGCPLSRFKDSLGNPTHILRIGESYKEKQRTIQAKKEVEQRRAGGYSRKYASKAKNLADDMVRNTARDLLYYAVTQDAMLIFENLSRGFGRQGKRTFMAERQYTRMEDWLTAKLAYEGPLPSKTYLSKTLAQYTSKTCSNCGFTITSADYDRVLEKLKKTATGWMTTINGKELKVEGQITYYNRYKRQNVVKDLSVELDRLSEESVNNDISSWTKGRSGEALSLLKKRFSHRPVQEKFVCLNCGFETHADEQAALNIARSWLFLRSQEYKKYQTNKTTGNTDKRAFVETWQSFYRKKLKEVWKPAV

SEQ ID NO: 46991 - protein, 978 aa, synthetic construct
  REGION 1..978: note = engineered CasX variant
QEIKRINKIRRRLVKDSNTKKAGKTGPMKTLLVRVMTPDLRERLENLRKKPENIPQPISNTSRANLNKLLTDYTEMKKAILHVYWEEFQKDPVGLMSRVAQPASKKIDQNKLKPEMDEKGNLTTAGFACSQCGQPLFVYKLEQVSEKGKAYTNYFGRCNVAEHEKLILLAQLKPEKDSDEAVTYSLGKFGQRALDFYSIHVTKESTHPVKPLAQIAGNRYASPVGKALSDACMGTIASFLSKYQDIIIEHQKVVKGNQKRLESLRELAGKENLEYPSVTLPPQPHTKEGVDAYNEVIARVRMWVNLNLWQKLKLSRDDAKPLLRLKGFPSFPLVERQANEVDWWDMVCNVKKLINEKKEDGKVFWQNLAGYKRQEALRPYLSSEEDRKKGKKFARYQLGDLLLHLEKKHGEDWGDVYDEAWERIDKKVEGLSKHIKLEEERRSEDAQSKAALTDWLRAKASFVIEGLKEADKDEFCRCELKLQKWYGDLRGKPFAIEAENSILDISGFSKQYNCAFIWQKDGVKKLNLYLIINYFKGGKLRFKKIKPEAFEANRFYTVINKKSGEIVPMEVNFNFDDPNLIILPLAFGKRQGREFIWNDLLSLETGSLKLANGRVIEKTLYNRRTRQDEPALFVALTFERREVLDSSNIKPMNLIGVDRGENIPAVIALTDPEGCPLSRFKDSLGNPTHILRIGESYKEKQRTIQAKKEVEQRRAGGYSRKYASKAKNLADDMVRNTARDLLYYAVTQDAMLIFENLSRGFGRQGKRTFMAERQYTRMEDWLTAKLAYEGPLPSKTYLSKTLAQYTSKTCSNCGFTITSADYDRVLEKLKKTATGWMTTINGKELKVEGQITYYNRYKRQNVVKDLSVELDRLSEESVNNDISSWTKGRSGEALSLLKKRFSHRPVQEKFVCLNCGFETHADEQAALNIARSWLFLRSQEYKKYQTNKTTGNTDKRAFVETWQSFYRKKLKEVWKPAV

SEQ ID NO: 46992 - protein, 979 aa, synthetic construct
  REGION 1..979: note = engineered CasX variant
QEIKRINKIRRRLVKDSNTKKAGKTGPMKTLLVRVMTPDLRERLENLRKKPENIPQPISNTSRANLNKLLTDYTEMKKAILHVYWEEFQKDPVGLMSRVAQPASKKIDQNKLKPEMDEKGNLTTAGFACSQCGQPLFVYKLEQVSEKGKAYTNYFGRCNVAEHEKLILLAQLKPEKDSDEAVTYSLGKFGQRALDFYSIHVTKESTHPVKPLAQIAGNRYASYPVGKALSDACMGTIASFLSKYQDIIIEHQKVVKGNQKRLESLRELAGKENLEYPSVTLPPQPHTKEGVDAYNEVIARVRMWVNLNLWQKLKLSRDDAKPLLRLKGFPSFPLVERQANEVDWWDMVCNVKKLINEKKEDGKVFWQNLAGYKRQEALRPYLSSEEDRKKGKKFARYQLGDLLLHLEKKHGEDWGKVYGEAWERIDKKVEGLSKHIKLEEERRSEDAQSKAALTDWLRAKASFVIEGLKEADKDEFCRCELKLQKWYGDLRGKPFAIEAENSILDISGFSKQYNCAFIWQKDGVKKLNLYLIINYFKGGKLRFKKIKPEAFEANRFYTVINKKSGEIVPMEVNFNFDDPNLIILPLAFGKRQGREFIWNDLLSLETGSLKLANGRVIEKTLYNRRTRQDEPALFVALTFERREVLDSSNIKPMNLIGVDRGENIPAVIALTDPEGCPLSRFKDSLGNPTHILRIGESYKEKQRTIQAKKEVEQRRAGGYSRKYASKAKNLADDMVRNTARDLLYYAVTQDAMLIFENLSRGFGRQGKRTFMAERQYTRMEDWLTAKLAYEGPLPSKTYLSKTLAQYTSKTCSNCGFTITSADYDRVLEKLKKTATGWMTTINGKELKVEGQITYYNRYKRQNVVKDLSVELDRLSEESVNNDISSWTKGRSGEALSLLKKRFSHRPVQEKFVCLNCGFETHADEQAALNIARSWLFLRSQEYKKYQTNKTTGNTDKRAFVETWQSFYRKKLKEVWKPAV

SEQ ID NO: 46993 - protein, 979 aa, synthetic construct
  REGION 1..979: note = engineered CasX variant
QEIKRINKIRRRLVKDSNTKKAGKTGPMKTLLVRVMTPDLRERLENLRKKPENIPQPISNTSRANLNKLLTDYTEMKKAILHVYWEEFQKDPVGLMSRVAQPASKKIDQNKLKPEMDEKGNLTTAGFACSQCGQPLFVYKLEQVSEKGKAYTNYFGRCNVAEHEKLILLAQLKPEKDSDEAVTYSLGKFGQRALDFYSIHVTKESTHPVKPLAQIAGNRYASHPVGKALSDACMGTIASFLSKYQDIIIEHQKVVKGNQKRLESLRELAGKENLEYPSVTLPPQPHTKEGVDAYNEVIARVRMWVNLNLWQKLKLSRDDAKPLLRLKGFPSFPLVERQANEVDWWDMVCNVKKLINEKKEDGKVFWQNLAGYKRQEALRPYLSSEEDRKKGKKFARYQLGDLLLHLEKKHGEDWGKVYGEAWERIDKKVEGLSKHIKLEEERRSEDAQSKAALTDWLRAKASFVIEGLKEADKDEFCRCELKLQKWYGDLRGKPFAIEAENSILDISGFSKQYNCAFIWQKDGVKKLNLYLIINYFKGGKLRFKKIKPEAFEANRFYTVINKKSGEIVPMEVNFNFDDPNLIILPLAFGKRQGREFIWNDLLSLETGSLKLANGRVIEKTLYNRRTRQDEPALFVALTFERREVLDSSNIKPMNLIGVDRGENIPAVIALTDPEGCPLSRFKDSLGNPTHILRIGESYKEKQRTIQAKKEVEQRRAGGYSRKYASKAKNLADDMVRNTARDLLYYAVTQDAMLIFENLSRGFGRQGKRTFMAERQYTRMEDWLTAKLAYEGPLPSKTYLSKTLAQYTSKTCSNCGFTITSADYDRVLEKLKKTATGWMTTINGKELKVEGQITYYNRYKRQNVVKDLSVELDRLSEESVNNDISSWTKGRSGEALSLLKKRFSHRPVQEKFVCLNCGFETHADEQAALNIARSWLFLRSQEYKKYQTNKTTGNTDKRAFVETWQSFYRKKLKEVWKPAV

SEQ ID NO: 46994 - protein, 979 aa, synthetic construct
  REGION 1..979: note = engineered CasX variant
QEIKRINKIRRRLVKDSNTKKAGKTGPMKTLLVRVMTPDLRERLENLRKKPENIPQPISNTSRANLNKLLTDYTEMKKAILHVYWEEFQKDPVGLMSRVAQPASKKIDQNKLKPEMDEKGNLTTAGFACSQCGQPLFVYKLEQVSEKGKAYTNYFGRCNVAEHEKLILLAQLKPEKDSDEAVTYSLGKFGQRALDFYSIHVTKESTHPVKPLAQIAGNRYASSPVGKALSDACMGTIASFLSKYQDIIIEHQKVVKGNQKRLESLRELAGKENLEYPSVTLPPQPHTKEGVDAYNEVIARVRMWVNLNLWQKLKLSRDDAKPLLRLKGFPSFPLVERQANEVDWWDMVCNVKKLINEKKEDGKVFWQNLAGYKRQEALRPYLSSEEDRKKGKKFARYQLGDLLLHLEKKHGEDWGKVYGEAWERIDKKVEGLSKHIKLEEERRSEDAQSKAALTDWLRAKASFVIEGLKEADKDEFCRCELKLQKWYGDLRGKPFAIEAENSILDISGFSKQYNCAFIWQKDGVKKLNLYLIINYFKGGKLRFKKIKPEAFEANRFYTVINKKSGEIVPMEVNFNFDDPNLIILPLAFGKRQGREFIWNDLLSLETGSLKLANGRVIEKTLYNRRTRQDEPALFVALTFERREVLDSSNIKPMNLIGVDRGENIPAVIALTDPEGCPLSRFKDSLGNPTHILRIGESYKEKQRTIQAKKEVEQRRAGGYSRKYASKAKNLADDMVRNTARDLLYYAVTQDAMLIFENLSRGFGRQGKRTFMAERQYTRMEDWLTAKLAYEGPLPSKTYLSKTLAQYTSKTCSNCGFTITSADYDRVLEKLKKTATGWMTTINGKELKVEGQITYYNRYKRQNVVKDLSVELDRLSEESVNNDISSWTKGRSGEALSLLKKRFSHRPVQEKFVCLNCGFETHADEQAALNIARSWLFLRSQEYKKYQTNKTTGNTDKRAFVETWQSFYRKKLKEVWKPAV

SEQ ID NO: 46995 - protein, 979 aa, synthetic construct
  REGION 1..979: note = engineered CasX variant
QEIKRINKIRRRLVKDSNTKKAGKTGPMKTLLVRVMTPDLRERLENLRKKPENIPQPISNTSRANLNKLLTDYTEMKKAILHVYWEEFQKDPVGLMSRVAQPASKKIDQNKLKPEMDEKGNLTTAGFACSQCGQPLFVYKLEQVSEKGKAYTNYFGRCNVAEHEKLILLAQLKPEKDSDEAVTYSLGKFGQRALDFYSIHVTKESTHPVKPLAQIAGNRYASTPVGKALSDACMGTIASFLSKYQDIIIEHQKVVKGNQKRLESLRELAGKENLEYPSVTLPPQPHTKEGVDAYNEVIARVRMWVNLNLWQKLKLSRDDAKPLLRLKGFPSFPLVERQANEVDWWDMVCNVKKLINEKKEDGKVFWQNLAGYKRQEALRPYLSSEEDRKKGKKFARYQLGDLLLHLEKKHGEDWGKVYGEAWERIDKKVEGLSKHIKLEEERRSEDAQSKAALTDWLRAKASFVIEGLKEADKDEFCRCELKLQKWYGDLRGKPFAIEAENSILDISGFSKQYNCAFIWQKDGVKKLNLYLIINYFKGGKLRFKKIKPEAFEANRFYTVINKKSGEIVPMEVNFNFDDPNLIILPLAFGKRQGREFIWNDLLSLETGSLKLANGRVIEKTLYNRRTRQDEPALFVALTFERREVLDSSNIKPMNLIGVDRGENIPAVIALTDPEGCPLSRFKDSLGNPTHILRIGESYKEKQRTIQAKKEVEQRRAGGYSRKYASKAKNLADDMVRNTARDLLYYAVTQDAMLIFENLSRGFGRQGKRTFMAERQYTRMEDWLTAKLAYEGPLPSKTYLSKTLAQYTSKTCSNCGFTITSADYDRVLEKLKKTATGWMTTINGKELKVEGQITYYNRYKRQNVVKDLSVELDRLSEESVNNDISSWTKGRSGEALSLLKKRFSHRPVQEKFVCLNCGFETHADEQAALNIARSWLFLRSQEYKKYQTNKTTGNTDKRAFVETWQSFYRKKLKEVWKPAV

SEQ ID NO: 46996 - protein, 979 aa, synthetic construct
  REGION 1..979: note = engineered CasX variant
QEIKRINKIRRRLVKDSNTKKAGKTGPMKTLLVRVMTPDLRERLENLRKKPENIPQPISNTSRANLNKLLTDYTEMKKAILHVYWEEFQKDPVGLMSRVAQPASKKIDQNKLKPEMDEKGNLTTAGFACSQCGQPLFVYKLEQVSEKGKAYTNYFGRCNVAEHEKLILLAQLKPEKDSDEAVTYSLGKFGQRALDFYSIHVTKESTHPVKPLAQIAGNRYASAPVGKALSDACMGTIASFLSKYQDIIIEHQKVVKGNQKRLESLRELAGKENLEYPSVTLPPQPHTKEGVDAYNEVIARVRMWVNLNLWQKLKLSRDDAKPLLRLKGFPSFPLVERQANEVDWWDMVCNVKKLINEKKEDGKVFWQNLAGYKRQEALRPYLSSEEDRKKGKKFARYQLGDLLLHLEKKHGEDWGKVYGEAWERIDKKVEGLSKHIKLEEERRSEDAQSKAALTDWLRAKASFVIEGLKEADKDEFCRCELKLQKWYGDLRGKPFAIEAENSILDISGFSKQYNCAFIWQKDGVKKLNLYLIINYFKGGKLRFKKIKPEAFEANRFYTVINKKSGEIVPMEVNFNFDDPNLIILPLAFGKRQGREFIWNDLLSLETGSLKLANGRVIEKTLYNRRTRQDEPALFVALTFERREVLDSSNIKPMNLIGVDRGENIPAVIALTDPEGCPLSRFKDSLGNPTHILRIGESYKEKQRTIQAKKEVEQRRAGGYSRKYASKAKNLADDMVRNTARDLLYYAVTQDAMLIFENLSRGFGRQGKRTFMAERQYTRMEDWLTAKLAYEGPLPSKTYLSKTLAQYTSKTCSNCGFTITSADYDRVLEKLKKTATGWMTTINGKELKVEGQITYYNRYKRQNVVKDLSVELDRLSEESVNNDISSWTKGRSGEALSLLKKRFSHRPVQEKFVCLNCGFETHADEQAALNIARSWLFLRSQEYKKYQTNKTTGNTDKRAFVETWQSFYRKKLKEVWKPAV

SEQ ID NO: 46997 - protein, 979 aa, synthetic construct
  REGION 1..979: note = engineered CasX variant
QEIKRINKIRRRLVKDSNTKKAGKTGPMKTLLVRVMTPDLRERLENLRKKPENIPQPISNTSRANLNKLLTDYTEMKKAILHVYWEEFQKDPVGLMSRVAQPASKKIDQNKLKPEMDEKGNLTTAGFACSQCGQPLFVYKLEQVSEKGKAYTNYFGRCNVAEHEKLILLAQLKPEKDSDEAVTYSLGKFGQRALDFYSIHVTKESTHPVKPLAQIAGNRYASVPVGKALSDACMGTIASFLSKYQDIIIEHQKVVKGNQKRLESLRELAGKENLEYPSVTLPPQPHTKEGVDAYNEVIARVRMWVNLNLWQKLKLSRDDAKPLLRLKGFPSFPLVERQANEVDWWDMVCNVKKLINEKKEDGKVFWQNLAGYKRQEALRPYLSSEEDRKKGKKFARYQLGDLLLHLEKKHGEDWGKVYGEAWERIDKKVEGLSKHIKLEEERRSEDAQSKAALTDWLRAKASFVIEGLKEADKDEFCRCELKLQKWYGDLRGKPFAIEAENSILDISGFSKQYNCAFIWQKDGVKKLNLYLIINYFKGGKLRFKKIKPEAFEANRFYTVINKKSGEIVPMEVNFNFDDPNLIILPLAFGKRQGREFIWNDLLSLETGSLKLANGRVIEKTLYNRRTRQDEPALFVALTFERREVLDSSNIKPMNLIGVDRGENIPAVIALTDPEGCPLSRFKDSLGNPTHILRIGESYKEKQRTIQAKKEVEQRRAGGYSRKYASKAKNLADDMVRNTARDLLYYAVTQDAMLIFENLSRGFGRQGKRTFMAERQYTRMEDWLTAKLAYEGPLPSKTYLSKTLAQYTSKTCSNCGFTITSADYDRVLEKLKKTATGWMTTINGKELKVEGQITYYNRYKRQNVVKDLSVELDRLSEESVNNDISSWTKGRSGEALSLLKKRFSHRPVQEKFVCLNCGFETHADEQAALNIARSWLFLRSQEYKKYQTNKTTGNTDKRAFVETWQSFYRKKLKEVWKPAV

SEQ ID NO: 46998 - protein, 979 aa, synthetic construct
  REGION 1..979: note = engineered CasX variant
QEIKRINKIRRRLVKDSNTKKAGKTGPMKTLLVRVMTPDLRERLENLRKKPENIPQPISNTSRANLNKLLTDYTEMKKAILHVYWEEFQKDPVGLMSRVAQPASKKIDQNKLKPEMDEKGNLTTAGFACSQCGQPLFVYKLEQVSEKGKAYTNYFGRCNVAEHEKLIKLAQLKPEKDSDEAVTYSLGKFGQRALDFYSIHVTKESTHPVKPLAQIAGNRYASGPVGKALSDACMGTIASFLSKYQDIIIEHQKVVKGNQKRLESLRELAGKENLEYPSVTLPPQPHTKEGVDAYNEVIARVRMWVNLNLWQKLKLSRDDAKPLLRLKGFPSFPLVERQANEVDWWDMVCNVKKLINEKKEDGKVFWQNLAGYKRQEALRPYLSSEEDRKKGKKFARYQLGDLLLHLEKKHGEDWGKVYGEAWERIDKKVEGLSKHIKLEEERRSEDAQSKAALTDWLRAKASFVIEGLKEADKDEFCRCELKLQKWYGDLRGKPFAIEAENSILDISGFSKQYNCAFIWQKDGVKKLNLYLIINYFKGGKLRFKKIKPEAFEANRFYTVINKKSGEIVPMEVNFNFDDPNLIILPLAFGKRQGREFIWNDLLSLETGSLKLANGRVIEKTLYNRRTRQDEPALFVALTFERREVLDSSNIKPMNLIGVDRGENIPAVIALTDPEGCPLSRFKDSLGNPTHILRIGESYKEKQRTIQAKKEVEQRRAGGYSRKYASKAKNLADDMVRNTARDLLYYAVTQDAMLIFENLSRGFGRQGKRTFMAERQYTRMEDWLTAKLAYEGPLPSKTYLSKTLAQYTSKTCSNCGFTITSADYDRVLEKLKKTATGWMTTINGKELKVEGQITYYNRYKRQNVVKDLSVELDRLSEESVNNDISSWTKGRSGEALSLLKKRFSHRPVQEKFVCLNCGFETHADEQAALNIARSWLFLRSQEYKKYQTNKTTGNTDKRAFVETWQSFYRKKLKEVWKPAV

SEQ ID NO: 46999 - protein, 978 aa, synthetic construct
  REGION 1..978: note = engineered CasX variant
QEIKRINKIRRRLVKDSNTKKAGKTGPMKTLLVRVMTPDLRERLENLRKKPENIPQPISNTSRANLNKLLTDYTEMKKAILHVYWEEFQKDPVGLMSRVAQPASKKIDQNKLKPEMDEKGNLTTAGFACSQCGQPLFVYKLEQVSEKGKAYTNYFGRCNVAEHEKLILLAQLKPEKDSDEAVTYSLGKFGQRALDFYSIHVTKESTHPVKPLAQIAGNRYASPVGKALSDACMGTIASFLSKYQDIIIEHQKVVKGNQKRLESLRELAGKENLEYPSVTLPPQPHTKEGVDAYNEVIARVRMWVNLNLWQKLKLSRDDAKPLLRLKGFPSFPLVERQANEVDWWDMVCNVKKLINEKKEDGKVFWQNLAGYKRQEALRPYLSSEEDRKKGKKFARYQLGDLLLHLEKKHGEDWGKVYGEAWERIDKKVEGLSKHIKLEEERRSEDAQSKAALTDWLRAKASFVIEGLKEADKDEFCRCELKLQKWYGDLRGKPFAIEAENSILDISGFSKQYNCAFIWQKDGVKKLNLYLIINYFKGGKLRFKKIKPEAFEANRFYTVINKKSGEIVPMEVNFNFDDPNLIILPLAFGKRQGREFIWNDLLSLETGSLKLANGRVIEKTLYNRRTRQDEPALFVALTFERREVLDSSNIKPMNLIGVDRGENIPAVIALTDPEGCPLSRFKDSLGNPTHILRIGESYKEKQRTIQAKKEVEQRRAGGYSRKYASKAKNLADDMVRNTARDLLYYAVTQDAMLIFENLSRGFGRQGKRTFMAERQYTRMEDWLTAKLAYEGPLPSKTYLSKTLAQYTSKTCSNCGFTITSADYDRVLEKLKKTATGWMTTINGKELKVEGQITYYNRYKRQNVVKDLSVELDRLSEESVNNDISSWTKGRSGEALSLLKKRFSHRPVQEKFVCLNCGFETHADEQAALNIARSWLFLRSQEYKKYQTNKTTGNTDKRAFVETWQSFYRKKLKEVWKPAV

SEQ ID NO: 47000 - protein, 979 aa, synthetic construct
  REGION 1..979: note = engineered CasX variant
QEIKRINKIRRRLVKDSNTKKAGKTGPMKTLLVRVMTPDLRERLENLRKKPENIPQPISNTSRANLNKLLTDYTEMKKAILHVYWEEFQKDPVGLMSRVAQPASKKIDQNKLKPEMDEKGNLTTAGFACSQCGQPLFVYKLEQVSEKGKAYTNYFGRCNVAEHEKLILLAQLKPEKDSDEAVTYSLGKFGQRALDFYSIHVTKESTHPVKPLAQIAGNRYASYPVGKALSDACMGTIASFLSKYQDIIIEHQKVVKGNQKRLESLRELAGKENLEYPSVTLPPQPHTKEGVDAYNEVIARVRMWVNLNLWQKLKLSRDDAKPLLRLKGFPSFPLVERQANEVDWWDMVCNVKKLINEKKEDGKVFWQNLAGYKRQEALRPYLSSEEDRKKGKKFARYQLGDLLLHLEKKHGEDWGKVYDEAWERIDKKVEGLSKHIKLEEERRSEDAQSKAALTDWLRAKASFVIEGKKEADKDEFCRCELKLQKWYGDLRGKPFAIEAENSILDISGFSKQYNCAFIWQKDGVKKLNLYLIINYFKGGKLRFKKIKPEAFEANRFYTVINKKSGEIVPMEVNFNFDDPNLIILPLAFGKRQGREFIWNDLLSLETGSLKLANGRVIEKTLYNRRTRQDEPALFVALTFERREVLDSSNIKPMNLIGVDRGENIPAVIALTDPEGCPLSRFKDSLGNPTHILRIGESYKEKQRTIQAKKEVEQRRAGGYSRKYASKAKNLADDMVRNTARDLLYYAVTQDAMLIFENLSRGFGRQGKRTFMAERQYTRMEDWLTAKLAYEGPLPSKTYLSKTLAQYTSKTCSNCGFTITSADYDRVLEKLKKTATGWMTTINGKELKVEGQITYYNRYKRQNVVKDLSVELDRLSEESVNNDISSWTKGRSGEALSLLKKRFSHRPVQEKFVCLNCGFETHADEQAALNIARSWLFLRSQEYKKYQTNKTTGNTDKRAFVETWQSFYRKKLKEVWKPAV

SEQ ID NO: 47001 - protein, 979 aa, synthetic construct
  REGION 1..979: note = engineered CasX variant
QEIKRINKIRRRLVKDSNTKKAGKTGPMKTLLVRVMTPDLRERLENLRKKPENIPQPISNTSRANLNKLLTDYTEMKKAILHVYWEEFQKDPVGLMSRVAQPASKKIDQNKLKPEMDEKGNLTTAGFACSQCGQPLFVYKLEQVSEKGKAYTNYFGRCNVAEHEKLILLAQLKPEKDSDEAVTYSLGKFGQRALDFYSIHVTKESTHPVKPLAQIAGNRYASHPVGKALSDACMGTIASFLSKYQDIIIEHQKVVKGNQKRLESLRELAGKENLEYPSVTLPPQPHTKEGVDAYNEVIARVRMWVNLNLWQKLKLSRDDAKPLLRLKGFPSFPLVERQANEVDWWDMVCNVKKLINEKKEDGKVFWQNLAGYKRQEALRPYLSSEEDRKKGKKFARYQLGDLLLHLEKKHGEDWGKVYDEAWERIDKKVEGLSKHIKLEEERRSEDAQSKAALTDWLRAKASFVIEGKKEADKDEFCRCELKLQKWYGDLRGKPFAIEAENSILDISGFSKQYNCAFIWQKDGVKKLNLYLIINYFKGGKLRFKKIKPEAFEANRFYTVINKKSGEIVPMEVNFNFDDPNLIILPLAFGKRQGREFIWNDLLSLETGSLKLANGRVIEKTLYNRRTRQDEPALFVALTFERREVLDSSNIKPMNLIGVDRGENIPAVIALTDPEGCPLSRFKDSLGNPTHILRIGESYKEKQRTIQAKKEVEQRRAGGYSRKYASKAKNLADDMVRNTARDLLYYAVTQDAMLIFENLSRGFGRQGKRTFMAERQYTRMEDWLTAKLAYEGPLPSKTYLSKTLAQYTSKTCSNCGFTITSADYDRVLEKLKKTATGWMTTINGKELKVEGQITYYNRYKRQNVVKDLSVELDRLSEESVNNDISSWTKGRSGEALSLLKKRFSHRPVQEKFVCLNCGFETHADEQAALNIARSWLFLRSQEYKKYQTNKTTGNTDKRAFVETWQSFYRKKLKEVWKPAV

SEQ ID NO: 47002 - protein, 979 aa, synthetic construct
  REGION 1..979: note = engineered CasX variant
QEIKRINKIRRRLVKDSNTKKAGKTGPMKTLLVRVMTPDLRERLENLRKKPENIPQPISNTSRANLNKLLTDYTEMKKAILHVYWEEFQKDPVGLMSRVAQPASKKIDQNKLKPEMDEKGNLTTAGFACSQCGQPLFVYKLEQVSEKGKAYTNYFGRCNVAEHEKLILLAQLKPEKDSDEAVTYSLGKFGQRALDFYSIHVTKESTHPVKPLAQIAGNRYASSPVGKALSDACMGTIASFLSKYQDIIIEHQKVVKGNQKRLESLRELAGKENLEYPSVTLPPQPHTKEGVDAYNEVIARVRMWVNLNLWQKLKLSRDDAKPLLRLKGFPSFPLVERQANEVDWWDMVCNVKKLINEKKEDGKVFWQNLAGYKRQEALRPYLSSEEDRKKGKKFARYQLGDLLLHLEKKHGEDWGKVYDEAWERIDKKVEGLSKHIKLEEERRSEDAQSKAALTDWLRAKASFVIEGKKEADKDEFCRCELKLQKWYGDLRGKPFAIEAENSILDISGFSKQYNCAFIWQKDGVKKLNLYLIINYFKGGKLRFKKIKPEAFEANRFYTVINKKSGEIVPMEVNFNFDDPNLIILPLAFGKRQGREFIWNDLLSLETGSLKLANGRVIEKTLYNRRTRQDEPALFVALTFERREVLDSSNIKPMNLIGVDRGENIPAVIALTDPEGCPLSRFKDSLGNPTHILRIGESYKEKQRTIQAKKEVEQRRAGGYSRKYASKAKNLADDMVRNTARDLLYYAVTQDAMLIFENLSRGFGRQGKRTFMAERQYTRMEDWLTAKLAYEGPLPSKTYLSKTLAQYTSKTCSNCGFTITSADYDRVLEKLKKTATGWMTTINGKELKVEGQITYYNRYKRQNVVKDLSVELDRLSEESVNNDISSWTKGRSGEALSLLKKRFSHRPVQEKFVCLNCGFETHADEQAALNIARSWLFLRSQEYKKYQTNKTTGNTDKRAFVETWQSFYRKKLKEVWKPAV

SEQ ID NO: 47003 - protein, 979 aa, synthetic construct
  REGION 1..979: note = engineered CasX variant
QEIKRINKIRRRLVKDSNTKKAGKTGPMKTLLVRVMTPDLRERLENLRKKPENIPQPISNTSRANLNKLLTDYTEMKKAILHVYWEEFQKDPVGLMSRVAQPASKKIDQNKLKPEMDEKGNLTTAGFACSQCGQPLFVYKLEQVSEKGKAYTNYFGRCNVAEHEKLILLAQLKPEKDSDEAVTYSLGKFGQRALDFYSIHVTKESTHPVKPLAQIAGNRYASTPVGKALSDACMGTIASFLSKYQDIIIEHQKVVKGNQKRLESLRELAGKENLEYPSVTLPPQPHTKEGVDAYNEVIARVRMWVNLNLWQKLKLSRDDAKPLLRLKGFPSFPLVERQANEVDWWDMVCNVKKLINEKKEDGKVFWQNLAGYKRQEALRPYLSSEEDRKKGKKFARYQLGDLLLHLEKKHGEDWGKVYDEAWERIDKKVEGLSKHIKLEEERRSEDAQSKAALTDWLRAKASFVIEGKKEADKDEFCRCELKLQKWYGDLRGKPFAIEAENSILDISGFSKQYNCAFIWQKDGVKKLNLYLIINYFKGGKLRFKKIKPEAFEANRFYTVINKKSGEIVPMEVNFNFDDPNLIILPLAFGKRQGREFIWNDLLSLETGSLKLANGRVIEKTLYNRRTRQDEPALFVALTFERREVLDSSNIKPMNLIGVDRGENIPAVIALTDPEGCPLSRFKDSLGNPTHILRIGESYKEKQRTIQAKKEVEQRRAGGYSRKYASKAKNLADDMVRNTARDLLYYAVTQDAMLIFENLSRGFGRQGKRTFMAERQYTRMEDWLTAKLAYEGPLPSKTYLSKTLAQYTSKTCSNCGFTITSADYDRVLEKLKKTATGWMTTINGKELKVEGQITYYNRYKRQNVVKDLSVELDRLSEESVNNDISSWTKGRSGEALSLLKKRFSHRPVQEKFVCLNCGFETHADEQAALNIARSWLFLRSQEYKKYQTNKTTGNTDKRAFVETWQSFYRKKLKEVWKPAV

SEQ ID NO: 47004 - protein, 979 aa, synthetic construct
  REGION 1..979: note = engineered CasX variant
QEIKRINKIRRRLVKDSNTKKAGKTGPMKTLLVRVMTPDLRERLENLRKKPENIPQPISNTSRANLNKLLTDYTEMKKAILHVYWEEFQKDPVGLMSRVAQPASKKIDQNKLKPEMDEKGNLTTAGFACSQCGQPLFVYKLEQVSEKGKAYTNYFGRCNVAEHEKLILLAQLKPEKDSDEAVTYSLGKFGQRALDFYSIHVTKESTHPVKPLAQIAGNRYASAPVGKALSDACMGTIASFLSKYQDIIIEHQKVVKGNQKRLESLRELAGKENLEYPSVTLPPQPHTKEGVDAYNEVIARVRMWVNLNLWQKLKLSRDDAKPLLRLKGFPSFPLVERQANEVDWWDMVCNVKKLINEKKEDGKVFWQNLAGYKRQEALRPYLSSEEDRKKGKKFARYQLGDLLLHLEKKHGEDWGKVYDEAWERIDKKVEGLSKHIKLEEERRSEDAQSKAALTDWLRAKASFVIEGKKEADKDEFCRCELKLQKWYGDLRGKPFAIEAENSILDISGFSKQYNCAFIWQKDGVKKLNLYLIINYFKGGKLRFKKIKPEAFEANRFYTVINKKSGEIVPMEVNFNFDDPNLIILPLAFGKRQGREFIWNDLLSLETGSLKLANGRVIEKTLYNRRTRQDEPALFVALTFERREVLDSSNIKPMNLIGVDRGENIPAVIALTDPEGCPLSRFKDSLGNPTHILRIGESYKEKQRTIQAKKEVEQRRAGGYSRKYASKAKNLADDMVRNTARDLLYYAVTQDAMLIFENLSRGFGRQGKRTFMAERQYTRMEDWLTAKLAYEGPLPSKTYLSKTLAQYTSKTCSNCGFTITSADYDRVLEKLKKTATGWMTTINGKELKVEGQITYYNRYKRQNVVKDLSVELDRLSEESVNNDISSWTKGRSGEALSLLKKRFSHRPVQEKFVCLNCGFETHADEQAALNIARSWLFLRSQEYKKYQTNKTTGNTDKRAFVETWQSFYRKKLKEVWKPAV

SEQ ID NO: 47005 - protein, 979 aa, synthetic construct
  REGION 1..979: note = engineered CasX variant
QEIKRINKIRRRLVKDSNTKKAGKTGPMKTLLVRVMTPDLRERLENLRKKPENIPQPISNTSRANLNKLLTDYTEMKKAILHVYWEEFQKDPVGLMSRVAQPASKKIDQNKLKPEMDEKGNLTTAGFACSQCGQPLFVYKLEQVSEKGKAYTNYFGRCNVAEHEKLILLAQLKPEKDSDEAVTYSLGKFGQRALDFYSIHVTKESTHPVKPLAQIAGNRYASVPVGKALSDACMGTIASFLSKYQDIIIEHQKVVKGNQKRLESLRELAGKENLEYPSVTLPPQPHTKEGVDAYNEVIARVRMWVNLNLWQKLKLSRDDAKPLLRLKGFPSFPLVERQANEVDWWDMVCNVKKLINEKKEDGKVFWQNLAGYKRQEALRPYLSSEEDRKKGKKFARYQLGDLLLHLEKKHGEDWGKVYDEAWERIDKKVEGLSKHIKLEEERRSEDAQSKAALTDWLRAKASFVIEGKKEADKDEFCRCELKLQKWYGDLRGKPFAIEAENSILDISGFSKQYNCAFIWQKDGVKKLNLYLIINYFKGGKLRFKKIKPEAFEANRFYTVINKKSGEIVPMEVNFNFDDPNLIILPLAFGKRQGREFIWNDLLSLETGSLKLANGRVIEKTLYNRRTRQDEPALFVALTFERREVLDSSNIKPMNLIGVDRGENIPAVIALTDPEGCPLSRFKDSLGNPTHILRIGESYKEKQRTIQAKKEVEQRRAGGYSRKYASKAKNLADDMVRNTARDLLYYAVTQDAMLIFENLSRGFGRQGKRTFMAERQYTRMEDWLTAKLAYEGPLPSKTYLSKTLAQYTSKTCSNCGFTITSADYDRVLEKLKKTATGWMTTINGKELKVEGQITYYNRYKRQNVVKDLSVELDRLSEESVNNDISSWTKGRSGEALSLLKKRFSHRPVQEKFVCLNCGFETHADEQAALNIARSWLFLRSQEYKKYQTNKTTGNTDKRAFVETWQSFYRKKLKEVWKPAV

SEQ ID NO: 47006 - protein, 979 aa, synthetic construct
  REGION 1..979: note = engineered CasX variant
QEIKRINKIRRRLVKDSNTKKAGKTGPMKTLLVRVMTPDLRERLENLRKKPENIPQPISNTSRANLNKLLTDYTEMKKAILHVYWEEFQKDPVGLMSRVAQPASKKIDQNKLKPEMDEKGNLTTAGFACSQCGQPLFVYKLEQVSEKGKAYTNYFGRCNVAEHEKLIKLAQLKPEKDSDEAVTYSLGKFGQRALDFYSIHVTKESTHPVKPLAQIAGNRYASGPVGKALSDACMGTIASFLSKYQDIIIEHQKVVKGNQKRLESLRELAGKENLEYPSVTLPPQPHTKEGVDAYNEVIARVRMWVNLNLWQKLKLSRDDAKPLLRLKGFPSFPLVERQANEVDWWDMVCNVKKLINEKKEDGKVFWQNLAGYKRQEALRPYLSSEEDRKKGKKFARYQLGDLLLHLEKKHGEDWGKVYDEAWERIDKKVEGLSKHIKLEEERRSEDAQSKAALTDWLRAKASFVIEGKKEADKDEFCRCELKLQKWYGDLRGKPFAIEAENSILDISGFSKQYNCAFIWQKDGVKKLNLYLIINYFKGGKLRFKKIKPEAFEANRFYTVINKKSGEIVPMEVNFNFDDPNLIILPLAFGKRQGREFIWNDLLSLETGSLKLANGRVIEKTLYNRRTRQDEPALFVALTFERREVLDSSNIKPMNLIGVDRGENIPAVIALTDPEGCPLSRFKDSLGNPTHILRIGESYKEKQRTIQAKKEVEQRRAGGYSRKYASKAKNLADDMVRNTARDLLYYAVTQDAMLIFENLSRGFGRQGKRTFMAERQYTRMEDWLTAKLAYEGPLPSKTYLSKTLAQYTSKTCSNCGFTITSADYDRVLEKLKKTATGWMTTINGKELKVEGQITYYNRYKRQNVVKDLSVELDRLSEESVNNDISSWTKGRSGEALSLLKKRFSHRPVQEKFVCLNCGFETHADEQAALNIARSWLFLRSQEYKKYQTNKTTGNTDKRAFVETWQSFYRKKLKEVWKPAV

SEQ ID NO: 47007 - protein, 978 aa, synthetic construct
  REGION 1..978: note = engineered CasX variant
QEIKRINKIRRRLVKDSNTKKAGKTGPMKTLLVRVMTPDLRERLENLRKKPENIPQPISNTSRANLNKLLTDYTEMKKAILHVYWEEFQKDPVGLMSRVAQPASKKIDQNKLKPEMDEKGNLTTAGFACSQCGQPLFVYKLEQVSEKGKAYTNYFGRCNVAEHEKLILLAQLKPEKDSDEAVTYSLGKFGQRALDFYSIHVTKESTHPVKPLAQIAGNRYASPVGKALSDACMGTIASFLSKYQDIIIEHQKVVKGNQKRLESLRELAGKENLEYPSVTLPPQPHTKEGVDAYNEVIARVRMWVNLNLWQKLKLSRDDAKPLLRLKGFPSFPLVERQANEVDWWDMVCNVKKLINEKKEDGKVFWQNLAGYKRQEALRPYLSSEEDRKKGKKFARYQLGDLLLHLEKKHGEDWGKVYDEAWERIDKKVEGLSKHIKLEEERRSEDAQSKAALTDWLRAKASFVIEGKKEADKDEFCRCELKLQKWYGDLRGKPFAIEAENSILDISGFSKQYNCAFIWQKDGVKKLNLYLIINYFKGGKLRFKKIKPEAFEANRFYTVINKKSGEIVPMEVNFNFDDPNLIILPLAFGKRQGREFIWNDLLSLETGSLKLANGRVIEKTLYNRRTRQDEPALFVALTFERREVLDSSNIKPMNLIGVDRGENIPAVIALTDPEGCPLSRFKDSLGNPTHILRIGESYKEKQRTIQAKKEVEQRRAGGYSRKYASKAKNLADDMVRNTARDLLYYAVTQDAMLIFENLSRGFGRQGKRTFMAERQYTRMEDWLTAKLAYEGPLPSKTYLSKTLAQYTSKTCSNCGFTITSADYDRVLEKLKKTATGWMTTINGKELKVEGQITYYNRYKRQNVVKDLSVELDRLSEESVNNDISSWTKGRSGEALSLLKKRFSHRPVQEKFVCLNCGFETHADEQAALNIARSWLFLRSQEYKKYQTNKTTGNTDKRAFVETWQSFYRKKLKEVWKPAV

SEQ ID NO: 47008 - protein, 979 aa, synthetic construct
  REGION 1..979: note = engineered CasX variant
QEIKRINKIRRRLVKDSNTKKAGKTGPMKTLLVRVMTPDLRERLENLRKKPENIPQPISNTSRANLNKLLTDYTEMKKAILHVYWEEFQKDPVGLMSRVAQPASKKIDQNKLKPEMDEKGNLTTAGFACSQCGQPLFVYKLEQVSEKGKAYTNYFGRCNVAEHEKLILLAQLKPEKDSDEAVTYSLGKFGQRALDFYSIHVTKESTHPVKPLAQIAGNRYASYPVGKALSDACMGTIASFLSKYQDIIIEHQKVVKGNQKRLESLRELAGKENLEYPSVTLPPQPHTKEGVDAYNEVIARVRMWVNLNLWQKLKLSRDDAKPLLRLKGFPSFPLVERQANEVDWWDMVCNVKKLINEKKEDGKVFWQNLAGYKRQEALRPYLSSEEDRKKGKKFARYQLGDLLLHLEKKHGEDWGKVYDEAWERIDKKVEGLSKHIKLEEERRSEDAQSKAALTDWLRAKASFVIEGSKEADKDEFCRCELKLQKWYGDLRGKPFAIEAENSILDISGFSKQYNCAFIWQKDGVKKLNLYLIINYFKGGKLRFKKIKPEAFEANRFYTVINKKSGEIVPMEVNFNFDDPNLIILPLAFGKRQGREFIWNDLLSLETGSLKLANGRVIEKTLYNRRTRQDEPALFVALTFERREVLDSSNIKPMNLIGVDRGENIPAVIALTDPEGCPLSRFKDSLGNPTHILRIGESYKEKQRTIQAKKEVEQRRAGGYSRKYASKAKNLADDMVRNTARDLLYYAVTQDAMLIFENLSRGFGRQGKRTFMAERQYTRMEDWLTAKLAYEGPLPSKTYLSKTLAQYTSKTCSNCGFTITSADYDRVLEKLKKTATGWMTTINGKELKVEGQITYYNRYKRQNVVKDLSVELDRLSEESVNNDISSWTKGRSGEALSLLKKRFSHRPVQEKFVCLNCGFETHADEQAALNIARSWLFLRSQEYKKYQTNKTTGNTDKRAFVETWQSFYRKKLKEVWKPAV

SEQ ID NO: 47009 - protein, 979 aa, synthetic construct
  REGION 1..979: note = engineered CasX variant
QEIKRINKIRRRLVKDSNTKKAGKTGPMKTLLVRVMTPDLRERLENLRKKPENIPQPISNTSRANLNKLLTDYTEMKKAILHVYWEEFQKDPVGLMSRVAQPASKKIDQNKLKPEMDEKGNLTTAGFACSQCGQPLFVYKLEQVSEKGKAYTNYFGRCNVAEHEKLILLAQLKPEKDSDEAVTYSLGKFGQRALDFYSIHVTKESTHPVKPLAQIAGNRYASHPVGKALSDACMGTIASFLSKYQDIIIEHQKVVKGNQKRLESLRELAGKENLEYPSVTLPPQPHTKEGVDAYNEVIARVRMWVNLNLWQKLKLSRDDAKPLLRLKGFPSFPLVERQANEVDWWDMVCNVKKLINEKKEDGKVFWQNLAGYKRQEALRPYLSSEEDRKKGKKFARYQLGDLLLHLEKKHGEDWGKVYDEAWERIDKKVEGLSKHIKLEEERRSEDAQSKAALTDWLRAKASFVIEGSKEADKDEFCRCELKLQKWYGDLRGKPFAIEAENSILDISGFSKQYNCAFIWQKDGVKKLNLYLIINYFKGGKLRFKKIKPEAFEANRFYTVINKKSGEIVPMEVNFNFDDPNLIILPLAFGKRQGREFIWNDLLSLETGSLKLANGRVIEKTLYNRRTRQDEPALFVALTFERREVLDSSNIKPMNLIGVDRGENIPAVIALTDPEGCPLSRFKDSLGNPTHILRIGESYKEKQRTIQAKKEVEQRRAGGYSRKYASKAKNLADDMVRNTARDLLYYAVTQDAMLIFENLSRGFGRQGKRTFMAERQYTRMEDWLTAKLAYEGPLPSKTYLSKTLAQYTSKTCSNCGFTITSADYDRVLEKLKKTATGWMTTINGKELKVEGQITYYNRYKRQNVVKDLSVELDRLSEESVNNDISSWTKGRSGEALSLLKKRFSHRPVQEKFVCLNCGFETHADEQAALNIARSWLFLRSQEYKKYQTNKTTGNTDKRAFVETWQSFYRKKLKEVWKPAV

SEQ ID NO: 47010 - protein, 979 aa, synthetic construct
  REGION 1..979: note = engineered CasX variant
QEIKRINKIRRRLVKDSNTKKAGKTGPMKTLLVRVMTPDLRERLENLRKKPENIPQPISNTSRANLNKLLTDYTEMKKAILHVYWEEFQKDPVGLMSRVAQPASKKIDQNKLKPEMDEKGNLTTAGFACSQCGQPLFVYKLEQVSEKGKAYTNYFGRCNVAEHEKLILLAQLKPEKDSDEAVTYSLGKFGQRALDFYSIHVTKESTHPVKPLAQIAGNRYASSPVGKALSDACMGTIASFLSKYQDIIIEHQKVVKGNQKRLESLRELAGKENLEYPSVTLPPQPHTKEGVDAYNEVIARVRMWVNLNLWQKLKLSRDDAKPLLRLKGFPSFPLVERQANEVDWWDMVCNVKKLINEKKEDGKVFWQNLAGYKRQEALRPYLSSEEDRKKGKKFARYQLGDLLLHLEKKHGEDWGKVYDEAWERIDKKVEGLSKHIKLEEERRSEDAQSKAALTDWLRAKASFVIEGSKEADKDEFCRCELKLQKWYGDLRGKPFAIEAENSILDISGFSKQYNCAFIWQKDGVKKLNLYLIINYFKGGKLRFKKIKPEAFEANRFYTVINKKSGEIVPMEVNFNFDDPNLIILPLAFGKRQGREFIWNDLLSLETGSLKLANGRVIEKTLYNRRTRQDEPALFVALTFERREVLDSSNIKPMNLIGVDRGENIPAVIALTDPEGCPLSRFKDSLGNPTHILRIGESYKEKQRTIQAKKEVEQRRAGGYSRKYASKAKNLADDMVRNTARDLLYYAVTQDAMLIFENLSRGFGRQGKRTFMAERQYTRMEDWLTAKLAYEGPLPSKTYLSKTLAQYTSKTCSNCGFTITSADYDRVLEKLKKTATGWMTTINGKELKVEGQITYYNRYKRQNVVKDLSVELDRLSEESVNNDISSWTKGRSGEALSLLKKRFSHRPVQEKFVCLNCGFETHADEQAALNIARSWLFLRSQEYKKYQTNKTTGNTDKRAFVETWQSFYRKKLKEVWKPAV

SEQ ID NO: 47011 - protein, 979 aa, synthetic construct
  REGION 1..979: note = engineered CasX variant
QEIKRINKIRRRLVKDSNTKKAGKTGPMKTLLVRVMTPDLRERLENLRKKPENIPQPISNTSRANLNKLLTDYTEMKKAILHVYWEEFQKDPVGLMSRVAQPASKKIDQNKLKPEMDEKGNLTTAGFACSQCGQPLFVYKLEQVSEKGKAYTNYFGRCNVAEHEKLILLAQLKPEKDSDEAVTYSLGKFGQRALDFYSIHVTKESTHPVKPLAQIAGNRYASTPVGKALSDACMGTIASFLSKYQDIIIEHQKVVKGNQKRLESLRELAGKENLEYPSVTLPPQPHTKEGVDAYNEVIARVRMWVNLNLWQKLKLSRDDAKPLLRLKGFPSFPLVERQANEVDWWDMVCNVKKLINEKKEDGKVFWQNLAGYKRQEALRPYLSSEEDRKKGKKFARYQLGDLLLHLEKKHGEDWGKVYDEAWERIDKKVEGLSKHIKLEEERRSEDAQSKAALTDWLRAKASFVIEGSKEADKDEFCRCELKLQKWYGDLRGKPFAIEAENSILDISGFSKQYNCAFIWQKDGVKKLNLYLIINYFKGGKLRFKKIKPEAFEANRFYTVINKKSGEIVPMEVNFNFDDPNLIILPLAFGKRQGREFIWNDLLSLETGSLKLANGRVIEKTLYNRRTRQDEPALFVALTFERREVLDSSNIKPMNLIGVDRGENIPAVIALTDPEGCPLSRFKDSLGNPTHILRIGESYKEKQRTIQAKKEVEQRRAGGYSRKYASKAKNLADDMVRNTARDLLYYAVTQDAMLIFENLSRGFGRQGKRTFMAERQYTRMEDWLTAKLAYEGPLPSKTYLSKTLAQYTSKTCSNCGFTITSADYDRVLEKLKKTATGWMTTINGKELKVEGQITYYNRYKRQNVVKDLSVELDRLSEESVNNDISSWTKGRSGEALSLLKKRFSHRPVQEKFVCLNCGFETHADEQAALNIARSWLFLRSQEYKKYQTNKTTGNTDKRAFVETWQSFYRKKLKEVWKPAV

SEQ ID NO: 47012 - protein, 979 aa, synthetic construct
  REGION 1..979: note = engineered CasX variant
QEIKRINKIRRRLVKDSNTKKAGKTGPMKTLLVRVMTPDLRERLENLRKKPENIPQPISNTSRANLNKLLTDYTEMKKAILHVYWEEFQKDPVGLMSRVAQPASKKIDQNKLKPEMDEKGNLTTAGFACSQCGQPLFVYKLEQVSEKGKAYTNYFGRCNVAEHEKLILLAQLKPEKDSDEAVTYSLGKFGQRALDFYSIHVTKESTHPVKPLAQIAGNRYASAPVGKALSDACMGTIASFLSKYQDIIIEHQKVVKGNQKRLESLRELAGKENLEYPSVTLPPQPHTKEGVDAYNEVIARVRMWVNLNLWQKLKLSRDDAKPLLRLKGFPSFPLVERQANEVDWWDMVCNVKKLINEKKEDGKVFWQNLAGYKRQEALRPYLSSEEDRKKGKKFARYQLGDLLLHLEKKHGEDWGKVYDEAWERIDKKVEGLSKHIKLEEERRSEDAQSKAALTDWLRAKASFVIEGSKEADKDEFCRCELKLQKWYGDLRGKPFAIEAENSILDISGFSKQYNCAFIWQKDGVKKLNLYLIINYFKGGKLRFKKIKPEAFEANRFYTVINKKSGEIVPMEVNFNFDDPNLIILPLAFGKRQGREFIWNDLLSLETGSLKLANGRVIEKTLYNRRTRQDEPALFVALTFERREVLDSSNIKPMNLIGVDRGENIPAVIALTDPEGCPLSRFKDSLGNPTHILRIGESYKEKQRTIQAKKEVEQRRAGGYSRKYASKAKNLADDMVRNTARDLLYYAVTQDAMLIFENLSRGFGRQGKRTFMAERQYTRMEDWLTAKLAYEGPLPSKTYLSKTLAQYTSKTCSNCGFTITSADYDRVLEKLKKTATGWMTTINGKELKVEGQITYYNRYKRQNVVKDLSVELDRLSEESVNNDISSWTKGRSGEALSLLKKRFSHRPVQEKFVCLNCGFETHADEQAALNIARSWLFLRSQEYKKYQTNKTTGNTDKRAFVETWQSFYRKKLKEVWKPAV

SEQ ID NO: 47013 - protein, 979 aa, synthetic construct
  REGION 1..979: note = engineered CasX variant
QEIKRINKIRRRLVKDSNTKKAGKTGPMKTLLVRVMTPDLRERLENLRKKPENIPQPISNTSRANLNKLLTDYTEMKKAILHVYWEEFQKDPVGLMSRVAQPASKKIDQNKLKPEMDEKGNLTTAGFACSQCGQPLFVYKLEQVSEKGKAYTNYFGRCNVAEHEKLILLAQLKPEKDSDEAVTYSLGKFGQRALDFYSIHVTKESTHPVKPLAQIAGNRYASVPVGKALSDACMGTIASFLSKYQDIIIEHQKVVKGNQKRLESLRELAGKENLEYPSVTLPPQPHTKEGVDAYNEVIARVRMWVNLNLWQKLKLSRDDAKPLLRLKGFPSFPLVERQANEVDWWDMVCNVKKLINEKKEDGKVFWQNLAGYKRQEALRPYLSSEEDRKKGKKFARYQLGDLLLHLEKKHGEDWGKVYDEAWERIDKKVEGLSKHIKLEEERRSEDAQSKAALTDWLRAKASFVIEGSKEADKDEFCRCELKLQKWYGDLRGKPFAIEAENSILDISGFSKQYNCAFIWQKDGVKKLNLYLIINYFKGGKLRFKKIKPEAFEANRFYTVINKKSGEIVPMEVNFNFDDPNLIILPLAFGKRQGREFIWNDLLSLETGSLKLANGRVIEKTLYNRRTRQDEPALFVALTFERREVLDSSNIKPMNLIGVDRGENIPAVIALTDPEGCPLSRFKDSLGNPTHILRIGESYKEKQRTIQAKKEVEQRRAGGYSRKYASKAKNLADDMVRNTARDLLYYAVTQDAMLIFENLSRGFGRQGKRTFMAERQYTRMEDWLTAKLAYEGPLPSKTYLSKTLAQYTSKTCSNCGFTITSADYDRVLEKLKKTATGWMTTINGKELKVEGQITYYNRYKRQNVVKDLSVELDRLSEESVNNDISSWTKGRSGEALSLLKKRFSHRPVQEKFVCLNCGFETHADEQAALNIARSWLFLRSQEYKKYQTNKTTGNTDKRAFVETWQSFYRKKLKEVWKPAV

SEQ ID NO: 47014 - protein, 979 aa, synthetic construct
  REGION 1..979: note = engineered CasX variant
QEIKRINKIRRRLVKDSNTKKAGKTGPMKTLLVRVMTPDLRERLENLRKKPENIPQPISNTSRANLNKLLTDYTEMKKAILHVYWEEFQKDPVGLMSRVAQPASKKIDQNKLKPEMDEKGNLTTAGFACSQCGQPLFVYKLEQVSEKGKAYTNYFGRCNVAEHEKLIKLAQLKPEKDSDEAVTYSLGKFGQRALDFYSIHVTKESTHPVKPLAQIAGNRYASGPVGKALSDACMGTIASFLSKYQDIIIEHQKVVKGNQKRLESLRELAGKENLEYPSVTLPPQPHTKEGVDAYNEVIARVRMWVNLNLWQKLKLSRDDAKPLLRLKGFPSFPLVERQANEVDWWDMVCNVKKLINEKKEDGKVFWQNLAGYKRQEALRPYLSSEEDRKKGKKFARYQLGDLLLHLEKKHGEDWGKVYDEAWERIDKKVEGLSKHIKLEEERRSEDAQSKAALTDWLRAKASFVIEGSKEADKDEFCRCELKLQKWYGDLRGKPFAIEAENSILDISGFSKQYNCAFIWQKDGVKKLNLYLIINYFKGGKLRFKKIKPEAFEANRFYTVINKKSGEIVPMEVNFNFDDPNLIILPLAFGKRQGREFIWNDLLSLETGSLKLANGRVIEKTLYNRRTRQDEPALFVALTFERREVLDSSNIKPMNLIGVDRGENIPAVIALTDPEGCPLSRFKDSLGNPTHILRIGESYKEKQRTIQAKKEVEQRRAGGYSRKYASKAKNLADDMVRNTARDLLYYAVTQDAMLIFENLSRGFGRQGKRTFMAERQYTRMEDWLTAKLAYEGPLPSKTYLSKTLAQYTSKTCSNCGFTITSADYDRVLEKLKKTATGWMTTINGKELKVEGQITYYNRYKRQNVVKDLSVELDRLSEESVNNDISSWTKGRSGEALSLLKKRFSHRPVQEKFVCLNCGFETHADEQAALNIARSWLFLRSQEYKKYQTNKTTGNTDKRAFVETWQSFYRKKLKEVWKPAV

SEQ ID NO: 47015 - protein, 978 aa, synthetic construct
  REGION 1..978: note = engineered CasX variant
QEIKRINKIRRRLVKDSNTKKAGKTGPMKTLLVRVMTPDLRERLENLRKKPENIPQPISNTSRANLNKLLTDYTEMKKAILHVYWEEFQKDPVGLMSRVAQPASKKIDQNKLKPEMDEKGNLTTAGFACSQCGQPLFVYKLEQVSEKGKAYTNYFGRCNVAEHEKLILLAQLKPEKDSDEAVTYSLGKFGQRALDFYSIHVTKESTHPVKPLAQIAGNRYASPVGKALSDACMGTIASFLSKYQDIIIEHQKVVKGNQKRLESLRELAGKENLEYPSVTLPPQPHTKEGVDAYNEVIARVRMWVNLNLWQKLKLSRDDAKPLLRLKGFPSFPLVERQANEVDWWDMVCNVKKLINEKKEDGKVFWQNLAGYKRQEALRPYLSSEEDRKKGKKFARYQLGDLLLHLEKKHGEDWGKVYDEAWERIDKKVEGLSKHIKLEEERRSEDAQSKAALTDWLRAKASFVIEGSKEADKDEFCRCELKLQKWYGDLRGKPFAIEAENSILDISGFSKQYNCAFIWQKDGVKKLNLYLIINYFKGGKLRFKKIKPEAFEANRFYTVINKKSGEIVPMEVNFNFDDPNLIILPLAFGKRQGREFIWNDLLSLETGSLKLANGRVIEKTLYNRRTRQDEPALFVALTFERREVLDSSNIKPMNLIGVDRGENIPAVIALTDPEGCPLSRFKDSLGNPTHILRIGESYKEKQRTIQAKKEVEQRRAGGYSRKYASKAKNLADDMVRNTARDLLYYAVTQDAMLIFENLSRGFGRQGKRTFMAERQYTRMEDWLTAKLAYEGPLPSKTYLSKTLAQYTSKTCSNCGFTITSADYDRVLEKLKKTATGWMTTINGKELKVEGQITYYNRYKRQNVVKDLSVELDRLSEESVNNDISSWTKGRSGEALSLLKKRFSHRPVQEKFVCLNCGFETHADEQAALNIARSWLFLRSQEYKKYQTNKTTGNTDKRAFVETWQSFYRKKLKEVWKPAV

SEQ ID NO: 47016 - protein, 980 aa, synthetic construct
  REGION 1..980: note = engineered CasX variant
QEIKRINKIRRRLVKDSNTKKAGKTGPMKTLLVRVMTPDLRERLENLRKKPENIPQPISNTSRANLNKLLTDYTEMKKAILHVYWEEFQKDPVGLMSRVAQPASKKIDQNKLKPEMDEKGNLTTAGFACSQCGQPLFVYKLEQVSEKGKAYTNYFGRCNVAEHEKLILLAQLKPEKDSDEAVTYSLGKFGQRALDFYSIHVTKESTHPVKPLAQIAGNRYASYPVGKALSDACMGTIASFLSKYQDIIIEHQKVVKGNQKRLESLRELAGKENLEYPSVTLPPQPHTKEGVDAYNEVIARVRMWVNLNLWQKLKLSRDDAKPLLRLKGFPSFPLVERQANEVDWWDMVCNVKKLINEKKEDGKVFWQNLAGYKRQEALRPYLSSEEDRKKGKKFARYQLGDLLLHLEKKHGEDWGKVYDEAWERIDKKVEGLSKHIKLEEERRSEDAQSKAALTDWLRAKASFVIEGLKEADDKDEFCRCELKLQKWYGDLRGKPFAIEAENSILDISGFSKQYNCAFIWQKDGVKKLNLYLIINYFKGGKLRFKKIKPEAFEANRFYTVINKKSGEIVPMEVNFNFDDPNLIILPLAFGKRQGREFIWNDLLSLETGSLKLANGRVIEKTLYNRRTRQDEPALFVALTFERREVLDSSNIKPMNLIGVDRGENIPAVIALTDPEGCPLSRFKDSLGNPTHILRIGESYKEKQRTIQAKKEVEQRRAGGYSRKYASKAKNLADDMVRNTARDLLYYAVTQDAMLIFENLSRGFGRQGKRTFMAERQYTRMEDWLTAKLAYEGPLPSKTYLSKTLAQYTSKTCSNCGFTITSADYDRVLEKLKKTATGWMTTINGKELKVEGQITYYNRYKRQNVVKDLSVELDRLSEESVNNDISSWTKGRSGEALSLLKKRFSHRPVQEKFVCLNCGFETHADEQAALNIARSWLFLRSQEYKKYQTNKTTGNTDKRAFVETWQSFYRKKLKEVWKPAV

SEQ ID NO: 47017 - protein, 980 aa, synthetic construct
  REGION 1..980: note = engineered CasX variant
QEIKRINKIRRRLVKDSNTKKAGKTGPMKTLLVRVMTPDLRERLENLRKKPENIPQPISNTSRANLNKLLTDYTEMKKAILHVYWEEFQKDPVGLMSRVAQPASKKIDQNKLKPEMDEKGNLTTAGFACSQCGQPLFVYKLEQVSEKGKAYTNYFGRCNVAEHEKLILLAQLKPEKDSDEAVTYSLGKFGQRALDFYSIHVTKESTHPVKPLAQIAGNRYASHPVGKALSDACMGTIASFLSKYQDIIIEHQKVVKGNQKRLESLRELAGKENLEYPSVTLPPQPHTKEGVDAYNEVIARVRMWVNLNLWQKLKLSRDDAKPLLRLKGFPSFPLVERQANEVDWWDMVCNVKKLINEKKEDGKVFWQNLAGYKRQEALRPYLSSEEDRKKGKKFARYQLGDLLLHLEKKHGEDWGKVYDEAWERIDKKVEGLSKHIKLEEERRSEDAQSKAALTDWLRAKASFVIEGLKEADDKDEFCRCELKLQKWYGDLRGKPFAIEAENSILDISGFSKQYNCAFIWQKDGVKKLNLYLIINYFKGGKLRFKKIKPEAFEANRFYTVINKKSGEIVPMEVNFNFDDPNLIILPLAFGKRQGREFIWNDLLSLETGSLKLANGRVIEKTLYNRRTRQDEPALFVALTFERREVLDSSNIKPMNLIGVDRGENIPAVIALTDPEGCPLSRFKDSLGNPTHILRIGESYKEKQRTIQAKKEVEQRRAGGYSRKYASKAKNLADDMVRNTARDLLYYAVTQDAMLIFENLSRGFGRQGKRTFMAERQYTRMEDWLTAKLAYEGPLPSKTYLSKTLAQYTSKTCSNCGFTITSADYDRVLEKLKKTATGWMTTINGKELKVEGQITYYNRYKRQNVVKDLSVELDRLSEESVNNDISSWTKGRSGEALSLLKKRFSHRPVQEKFVCLNCGFETHADEQAALNIARSWLFLRSQEYKKYQTNKTTGNTDKRAFVETWQSFYRKKLKEVWKPAV

SEQ ID NO: 47018 - protein, 980 aa, synthetic construct
  REGION 1..980: note = engineered CasX variant
QEIKRINKIRRRLVKDSNTKKAGKTGPMKTLLVRVMTPDLRERLENLRKKPENIPQPISNTSRANLNKLLTDYTEMKKAILHVYWEEFQKDPVGLMSRVAQPASKKIDQNKLKPEMDEKGNLTTAGFACSQCGQPLFVYKLEQVSEKGKAYTNYFGRCNVAEHEKLILLAQLKPEKDSDEAVTYSLGKFGQRALDFYSIHVTKESTHPVKPLAQIAGNRYASSPVGKALSDACMGTIASFLSKYQDIIIEHQKVVKGNQKRLESLRELAGKENLEYPSVTLPPQPHTKEGVDAYNEVIARVRMWVNLNLWQKLKLSRDDAKPLLRLKGFPSFPLVERQANEVDWWDMVCNVKKLINEKKEDGKVFWQNLAGYKRQEALRPYLSSEEDRKKGKKFARYQLGDLLLHLEKKHGEDWGKVYDEAWERIDKKVEGLSKHIKLEEERRSEDAQSKAALTDWLRAKASFVIEGLKEADDKDEFCRCELKLQKWYGDLRGKPFAIEAENSILDISGFSKQYNCAFIWQKDGVKKLNLYLIINYFKGGKLRFKKIKPEAFEANRFYTVINKKSGEIVPMEVNFNFDDPNLIILPLAFGKRQGREFIWNDLLSLETGSLKLANGRVIEKTLYNRRTRQDEPALFVALTFERREVLDSSNIKPMNLIGVDRGENIPAVIALTDPEGCPLSRFKDSLGNPTHILRIGESYKEKQRTIQAKKEVEQRRAGGYSRKYASKAKNLADDMVRNTARDLLYYAVTQDAMLIFENLSRGFGRQGKRTFMAERQYTRMEDWLTAKLAYEGPLPSKTYLSKTLAQYTSKTCSNCGFTITSADYDRVLEKLKKTATGWMTTINGKELKVEGQITYYNRYKRQNVVKDLSVELDRLSEESVNNDISSWTKGRSGEALSLLKKRFSHRPVQEKFVCLNCGFETHADEQAALNIARSWLFLRSQEYKKYQTNKTTGNTDKRAFVETWQSFYRKKLKEVWKPAV

SEQ ID NO: 47019 - protein, 980 aa, synthetic construct
  REGION 1..980: note = engineered CasX variant
QEIKRINKIRRRLVKDSNTKKAGKTGPMKTLLVRVMTPDLRERLENLRKKPENIPQPISNTSRANLNKLLTDYTEMKKAILHVYWEEFQKDPVGLMSRVAQPASKKIDQNKLKPEMDEKGNLTTAGFACSQCGQPLFVYKLEQVSEKGKAYTNYFGRCNVAEHEKLILLAQLKPEKDSDEAVTYSLGKFGQRALDFYSIHVTKESTHPVKPLAQIAGNRYASTPVGKALSDACMGTIASFLSKYQDIIIEHQKVVKGNQKRLESLRELAGKENLEYPSVTLPPQPHTKEGVDAYNEVIARVRMWVNLNLWQKLKLSRDDAKPLLRLKGFPSFPLVERQANEVDWWDMVCNVKKLINEKKEDGKVFWQNLAGYKRQEALRPYLSSEEDRKKGKKFARYQLGDLLLHLEKKHGEDWGKVYDEAWERIDKKVEGLSKHIKLEEERRSEDAQSKAALTDWLRAKASFVIEGLKEADDKDEFCRCELKLQKWYGDLRGKPFAIEAENSILDISGFSKQYNCAFIWQKDGVKKLNLYLIINYFKGGKLRFKKIKPEAFEANRFYTVINKKSGEIVPMEVNFNFDDPNLIILPLAFGKRQGREFIWNDLLSLETGSLKLANGRVIEKTLYNRRTRQDEPALFVALTFERREVLDSSNIKPMNLIGVDRGENIPAVIALTDPEGCPLSRFKDSLGNPTHILRIGESYKEKQRTIQAKKEVEQRRAGGYSRKYASKAKNLADDMVRNTARDLLYYAVTQDAMLIFENLSRGFGRQGKRTFMAERQYTRMEDWLTAKLAYEGPLPSKTYLSKTLAQYTSKTCSNCGFTITSADYDRVLEKLKKTATGWMTTINGKELKVEGQITYYNRYKRQNVVKDLSVELDRLSEESVNNDISSWTKGRSGEALSLLKKRFSHRPVQEKFVCLNCGFETHADEQAALNIARSWLFLRSQEYKKYQTNKTTGNTDKRAFVETWQSFYRKKLKEVWKPAV

SEQ ID NO: 47020 - protein, 980 aa, synthetic construct
  REGION 1..980: note = engineered CasX variant
QEIKRINKIRRRLVKDSNTKKAGKTGPMKTLLVRVMTPDLRERLENLRKKPENIPQPISNTSRANLNKLLTDYTEMKKAILHVYWEEFQKDPVGLMSRVAQPASKKIDQNKLKPEMDEKGNLTTAGFACSQCGQPLFVYKLEQVSEKGKAYTNYFGRCNVAEHEKLILLAQLKPEKDSDEAVTYSLGKFGQRALDFYSIHVTKESTHPVKPLAQIAGNRYASAPVGKALSDACMGTIASFLSKYQDIIIEHQKVVKGNQKRLESLRELAGKENLEYPSVTLPPQPHTKEGVDAYNEVIARVRMWVNLNLWQKLKLSRDDAKPLLRLKGFPSFPLVERQANEVDWWDMVCNVKKLINEKKEDGKVFWQNLAGYKRQEALRPYLSSEEDRKKGKKFARYQLGDLLLHLEKKHGEDWGKVYDEAWERIDKKVEGLSKHIKLEEERRSEDAQSKAALTDWLRAKASFVIEGLKEADDKDEFCRCELKLQKWYGDLRGKPFAIEAENSILDISGFSKQYNCAFIWQKDGVKKLNLYLIINYFKGGKLRFKKIKPEAFEANRFYTVINKKSGEIVPMEVNFNFDDPNLIILPLAFGKRQGREFIWNDLLSLETGSLKLANGRVIEKTLYNRRTRQDEPALFVALTFERREVLDSSNIKPMNLIGVDRGENIPAVIALTDPEGCPLSRFKDSLGNPTHILRIGESYKEKQRTIQAKKEVEQRRAGGYSRKYASKAKNLADDMVRNTARDLLYYAVTQDAMLIFENLSRGFGRQGKRTFMAERQYTRMEDWLTAKLAYEGPLPSKTYLSKTLAQYTSKTCSNCGFTITSADYDRVLEKLKKTATGWMTTINGKELKVEGQITYYNRYKRQNVVKDLSVELDRLSEESVNNDISSWTKGRSGEALSLLKKRFSHRPVQEKFVCLNCGFETHADEQAALNIARSWLFLRSQEYKKYQTNKTTGNTDKRAFVETWQSFYRKKLKEVWKPAV

SEQ ID NO: 47021 - protein, 980 aa, synthetic construct
  REGION 1..980: note = engineered CasX variant
QEIKRINKIRRRLVKDSNTKKAGKTGPMKTLLVRVMTPDLRERLENLRKKPENIPQPISNTSRANLNKLLTDYTEMKKAILHVYWEEFQKDPVGLMSRVAQPASKKIDQNKLKPEMDEKGNLTTAGFACSQCGQPLFVYKLEQVSEKGKAYTNYFGRCNVAEHEKLILLAQLKPEKDSDEAVTYSLGKFGQRALDFYSIHVTKESTHPVKPLAQIAGNRYASVPVGKALSDACMGTIASFLSKYQDIIIEHQKVVKGNQKRLESLRELAGKENLEYPSVTLPPQPHTKEGVDAYNEVIARVRMWVNLNLWQKLKLSRDDAKPLLRLKGFPSFPLVERQANEVDWWDMVCNVKKLINEKKEDGKVFWQNLAGYKRQEALRPYLSSEEDRKKGKKFARYQLGDLLLHLEKKHGEDWGKVYDEAWERIDKKVEGLSKHIKLEEERRSEDAQSKAALTDWLRAKASFVIEGLKEADDKDEFCRCELKLQKWYGDLRGKPFAIEAENSILDISGFSKQYNCAFIWQKDGVKKLNLYLIINYFKGGKLRFKKIKPEAFEANRFYTVINKKSGEIVPMEVNFNFDDPNLIILPLAFGKRQGREFIWNDLLSLETGSLKLANGRVIEKTLYNRRTRQDEPALFVALTFERREVLDSSNIKPMNLIGVDRGENIPAVIALTDPEGCPLSRFKDSLGNPTHILRIGESYKEKQRTIQAKKEVEQRRAGGYSRKYASKAKNLADDMVRNTARDLLYYAVTQDAMLIFENLSRGFGRQGKRTFMAERQYTRMEDWLTAKLAYEGPLPSKTYLSKTLAQYTSKTCSNCGFTITSADYDRVLEKLKKTATGWMTTINGKELKVEGQITYYNRYKRQNVVKDLSVELDRLSEESVNNDISSWTKGRSGEALSLLKKRFSHRPVQEKFVCLNCGFETHADEQAALNIARSWLFLRSQEYKKYQTNKTTGNTDKRAFVETWQSFYRKKLKEVWKPAV

SEQ ID NO: 47022 - protein, 980 aa, synthetic construct
  REGION 1..980: note = engineered CasX variant
QEIKRINKIRRRLVKDSNTKKAGKTGPMKTLLVRVMTPDLRERLENLRKKPENIPQPISNTSRANLNKLLTDYTEMKKAILHVYWEEFQKDPVGLMSRVAQPASKKIDQNKLKPEMDEKGNLTTAGFACSQCGQPLFVYKLEQVSEKGKAYTNYFGRCNVAEHEKLIKLAQLKPEKDSDEAVTYSLGKFGQRALDFYSIHVTKESTHPVKPLAQIAGNRYASGPVGKALSDACMGTIASFLSKYQDIIIEHQKVVKGNQKRLESLRELAGKENLEYPSVTLPPQPHTKEGVDAYNEVIARVRMWVNLNLWQKLKLSRDDAKPLLRLKGFPSFPLVERQANEVDWWDMVCNVKKLINEKKEDGKVFWQNLAGYKRQEALRPYLSSEEDRKKGKKFARYQLGDLLLHLEKKHGEDWGKVYDEAWERIDKKVEGLSKHIKLEEERRSEDAQSKAALTDWLRAKASFVIEGLKEADDKDEFCRCELKLQKWYGDLRGKPFAIEAENSILDISGFSKQYNCAFIWQKDGVKKLNLYLIINYFKGGKLRFKKIKPEAFEANRFYTVINKKSGEIVPMEVNFNFDDPNLIILPLAFGKRQGREFIWNDLLSLETGSLKLANGRVIEKTLYNRRTRQDEPALFVALTFERREVLDSSNIKPMNLIGVDRGENIPAVIALTDPEGCPLSRFKDSLGNPTHILRIGESYKEKQRTIQAKKEVEQRRAGGYSRKYASKAKNLADDMVRNTARDLLYYAVTQDAMLIFENLSRGFGRQGKRTFMAERQYTRMEDWLTAKLAYEGPLPSKTYLSKTLAQYTSKTCSNCGFTITSADYDRVLEKLKKTATGWMTTINGKELKVEGQITYYNRYKRQNVVKDLSVELDRLSEESVNNDISSWTKGRSGEALSLLKKRFSHRPVQEKFVCLNCGFETHADEQAALNIARSWLFLRSQEYKKYQTNKTTGNTDKRAFVETWQSFYRKKLKEVWKPAV

SEQ ID NO: 47023 - protein, 979 aa, synthetic construct
  REGION 1..979: note = engineered CasX variant
QEIKRINKIRRRLVKDSNTKKAGKTGPMKTLLVRVMTPDLRERLENLRKKPENIPQPISNTSRANLNKLLTDYTEMKKAILHVYWEEFQKDPVGLMSRVAQPASKKIDQNKLKPEMDEKGNLTTAGFACSQCGQPLFVYKLEQVSEKGKAYTNYFGRCNVAEHEKLILLAQLKPEKDSDEAVTYSLGKFGQRALDFYSIHVTKESTHPVKPLAQIAGNRYASPVGKALSDACMGTIASFLSKYQDIIIEHQKVVKGNQKRLESLRELAGKENLEYPSVTLPPQPHTKEGVDAYNEVIARVRMWVNLNLWQKLKLSRDDAKPLLRLKGFPSFPLVERQANEVDWWDMVCNVKKLINEKKEDGKVFWQNLAGYKRQEALRPYLSSEEDRKKGKKFARYQLGDLLLHLEKKHGEDWGKVYDEAWERIDKKVEGLSKHIKLEEERRSEDAQSKAALTDWLRAKASFVIEGLKEADDKDEFCRCELKLQKWYGDLRGKPFAIEAENSILDISGFSKQYNCAFIWQKDGVKKLNLYLIINYFKGGKLRFKKIKPEAFEANRFYTVINKKSGEIVPMEVNFNFDDPNLIILPLAFGKRQGREFIWNDLLSLETGSLKLANGRVIEKTLYNRRTRQDEPALFVALTFERREVLDSSNIKPMNLIGVDRGENIPAVIALTDPEGCPLSRFKDSLGNPTHILRIGESYKEKQRTIQAKKEVEQRRAGGYSRKYASKAKNLADDMVRNTARDLLYYAVTQDAMLIFENLSRGFGRQGKRTFMAERQYTRMEDWLTAKLAYEGPLPSKTYLSKTLAQYTSKTCSNCGFTITSADYDRVLEKLKKTATGWMTTINGKELKVEGQITYYNRYKRQNVVKDLSVELDRLSEESVNNDISSWTKGRSGEALSLLKKRFSHRPVQEKFVCLNCGFETHADEQAALNIARSWLFLRSQEYKKYQTNKTTGNTDKRAFVETWQSFYRKKLKEVWKPAV

SEQ ID NO: 47024 - protein, 980 aa, synthetic construct
  REGION 1..980: note = engineered CasX variant
QEIKRINKIRRRLVKDSNTKKAGKTGPMKTLLVRVMTPDLRERLENLRKKPENIPQPISNTSRANLNKLLTDYTEMKKAILHVYWEEFQKDPVGLMSRVAQPASKKIDQNKLKPEMDEKGNLTTAGFACSQCGQPLFVYKLEQVSEKGKAYTNYFGRCNVAEHEKLILLAQLKPEKDSDEAVTYSLGKFGQRALDFYSIHVTKESTHPVKPLAQIAGNRYASYPVGKALSDACMGTIASFLSKYQDIIIEHQKVVKGNQKRLESLRELAGKENLEYPSVTLPPQPHTKEGVDAYNEVIARVRMWVNLNLWQKLKLSRDDAKPLLRLKGFPSFPLVERQANEVDWWDMVCNVKKLINEKKEDGKVFWQNLAGYKRQEALRPYLSSEEDRKKGKKFARYQLGDLLLHLEKKHGEDWGKVYDEAWERIDKKVEGLSKHIKLEEERRSEDAQSKAALTDWLRAKASFVIEGLKEADKDEFCRCELKLQKWYGDLRGKPFAIEAENSILDISGFSKQYNCAFIWQKDGVKKLNLYLIINYFKGGKLRFKKIKPEAFEANRFYTVINKKSGEIVPMEVNFNFDDPNLIILPLAFGKRQGREFIWNDLLSLETGSLKLANGRVIEKTLYNRRTRQDEPALFVALTFERREVLDSSNIKPMNLIGVDRGENIPAVIALTDPEGCPLSRFKDSLGNPTHILRIGESYKEKQRTIQAKKEVEQRRAGGYSRKYASKAKNLADDMVRNTARDLLYYAVTQDAMLIFENLSRGFGRQGKRTFMAERQYTRMEDWLTAKLAYEGPLPSKTYLSKTLAQYTSKTCSNCGFTITSADYDRVLEKLKKTATGWMTTINGKELKVEGQITYYNRYKRQNVVKDLSVELDRLSEESVNNDISSWTKGRSGNEALSLLKKRFSHRPVQEKFVCLNCGFETHADEQAALNIARSWLFLRSQEYKKYQTNKTTGNTDKRAFVETWQSFYRKKLKEVWKPAV

SEQ ID NO: 47025 - protein, 980 aa, synthetic construct
  REGION 1..980: note = engineered CasX variant
QEIKRINKIRRRLVKDSNTKKAGKTGPMKTLLVRVMTPDLRERLENLRKKPENIPQPISNTSRANLNKLLTDYTEMKKAILHVYWEEFQKDPVGLMSRVAQPASKKIDQNKLKPEMDEKGNLTTAGFACSQCGQPLFVYKLEQVSEKGKAYTNYFGRCNVAEHEKLILLAQLKPEKDSDEAVTYSLGKFGQRALDFYSIHVTKESTHPVKPLAQIAGNRYASHPVGKALSDACMGTIASFLSKYQDIIIEHQKVVKGNQKRLESLRELAGKENLEYPSVTLPPQPHTKEGVDAYNEVIARVRMWVNLNLWQKLKLSRDDAKPLLRLKGFPSFPLVERQANEVDWWDMVCNVKKLINEKKEDGKVFWQNLAGYKRQEALRPYLSSEEDRKKGKKFARYQLGDLLLHLEKKHGEDWGKVYDEAWERIDKKVEGLSKHIKLEEERRSEDAQSKAALTDWLRAKASFVIEGLKEADKDEFCRCELKLQKWYGDLRGKPFAIEAENSILDISGFSKQYNCAFIWQKDGVKKLNLYLIINYFKGGKLRFKKIKPEAFEANRFYTVINKKSGEIVPMEVNFNFDDPNLIILPLAFGKRQGREFIWNDLLSLETGSLKLANGRVIEKTLYNRRTRQDEPALFVALTFERREVLDSSNIKPMNLIGVDRGENIPAVIALTDPEGCPLSRFKDSLGNPTHILRIGESYKEKQRTIQAKKEVEQRRAGGYSRKYASKAKNLADDMVRNTARDLLYYAVTQDAMLIFENLSRGFGRQGKRTFMAERQYTRMEDWLTAKLAYEGPLPSKTYLSKTLAQYTSKTCSNCGFTITSADYDRVLEKLKKTATGWMTTINGKELKVEGQITYYNRYKRQNVVKDLSVELDRLSEESVNNDISSWTKGRSGNEALSLLKKRFSHRPVQEKFVCLNCGFETHADEQAALNIARSWLFLRSQEYKKYQTNKTTGNTDKRAFVETWQSFYRKKLKEVWKPAV

SEQ ID NO: 47026 - protein, 980 aa, synthetic construct
  REGION 1..980: note = engineered CasX variant
QEIKRINKIRRRLVKDSNTKKAGKTGPMKTLLVRVMTPDLRERLENLRKKPENIPQPISNTSRANLNKLLTDYTEMKKAILHVYWEEFQKDPVGLMSRVAQPASKKIDQNKLKPEMDEKGNLTTAGFACSQCGQPLFVYKLEQVSEKGKAYTNYFGRCNVAEHEKLILLAQLKPEKDSDEAVTYSLGKFGQRALDFYSIHVTKESTHPVKPLAQIAGNRYASSPVGKALSDACMGTIASFLSKYQDIIIEHQKVVKGNQKRLESLRELAGKENLEYPSVTLPPQPHTKEGVDAYNEVIARVRMWVNLNLWQKLKLSRDDAKPLLRLKGFPSFPLVERQANEVDWWDMVCNVKKLINEKKEDGKVFWQNLAGYKRQEALRPYLSSEEDRKKGKKFARYQLGDLLLHLEKKHGEDWGKVYDEAWERIDKKVEGLSKHIKLEEERRSEDAQSKAALTDWLRAKASFVIEGLKEADKDEFCRCELKLQKWYGDLRGKPFAIEAENSILDISGFSKQYNCAFIWQKDGVKKLNLYLIINYFKGGKLRFKKIKPEAFEANRFYTVINKKSGEIVPMEVNFNFDDPNLIILPLAFGKRQGREFIWNDLLSLETGSLKLANGRVIEKTLYNRRTRQDEPALFVALTFERREVLDSSNIKPMNLIGVDRGENIPAVIALTDPEGCPLSRFKDSLGNPTHILRIGESYKEKQRTIQAKKEVEQRRAGGYSRKYASKAKNLADDMVRNTARDLLYYAVTQDAMLIFENLSRGFGRQGKRTFMAERQYTRMEDWLTAKLAYEGPLPSKTYLSKTLAQYTSKTCSNCGFTITSADYDRVLEKLKKTATGWMTTINGKELKVEGQITYYNRYKRQNVVKDLSVELDRLSEESVNNDISSWTKGRSGNEALSLLKKRFSHRPVQEKFVCLNCGFETHADEQAALNIARSWLFLRSQEYKKYQTNKTTGNTDKRAFVETWQSFYRKKLKEVWKPAV

SEQ ID NO: 47027 - protein, 980 aa, synthetic construct
  REGION 1..980: note = engineered CasX variant
QEIKRINKIRRRLVKDSNTKKAGKTGPMKTLLVRVMTPDLRERLENLRKKPENIPQPISNTSRANLNKLLTDYTEMKKAILHVYWEEFQKDPVGLMSRVAQPASKKIDQNKLKPEMDEKGNLTTAGFACSQCGQPLFVYKLEQVSEKGKAYTNYFGRCNVAEHEKLILLAQLKPEKDSDEAVTYSLGKFGQRALDFYSIHVTKESTHPVKPLAQIAGNRYASTPVGKALSDACMGTIASFLSKYQDIIIEHQKVVKGNQKRLESLRELAGKENLEYPSVTLPPQPHTKEGVDAYNEVIARVRMWVNLNLWQKLKLSRDDAKPLLRLKGFPSFPLVERQANEVDWWDMVCNVKKLINEKKEDGKVFWQNLAGYKRQEALRPYLSSEEDRKKGKKFARYQLGDLLLHLEKKHGEDWGKVYDEAWERIDKKVEGLSKHIKLEEERRSEDAQSKAALTDWLRAKASFVIEGLKEADKDEFCRCELKLQKWYGDLRGKPFAIEAENSILDISGFSKQYNCAFIWQKDGVKKLNLYLIINYFKGGKLRFKKIKPEAFEANRFYTVINKKSGEIVPMEVNFNFDDPNLIILPLAFGKRQGREFIWNDLLSLETGSLKLANGRVIEKTLYNRRTRQDEPALFVALTFERREVLDSSNIKPMNLIGVDRGENIPAVIALTDPEGCPLSRFKDSLGNPTHILRIGESYKEKQRTIQAKKEVEQRRAGGYSRKYASKAKNLADDMVRNTARDLLYYAVTQDAMLIFENLSRGFGRQGKRTFMAERQYTRMEDWLTAKLAYEGPLPSKTYLSKTLAQYTSKTCSNCGFTITSADYDRVLEKLKKTATGWMTTINGKELKVEGQITYYNRYKRQNVVKDLSVELDRLSEESVNNDISSWTKGRSGNEALSLLKKRFSHRPVQEKFVCLNCGFETHADEQAALNIARSWLFLRSQEYKKYQTNKTTGNTDKRAFVETWQSFYRKKLKEVWKPAV

SEQ ID NO: 47028 - protein, 980 aa, synthetic construct
  REGION 1..980: note = engineered CasX variant
QEIKRINKIRRRLVKDSNTKKAGKTGPMKTLLVRVMTPDLRERLENLRKKPENIPQPISNTSRANLNKLLTDYTEMKKAILHVYWEEFQKDPVGLMSRVAQPASKKIDQNKLKPEMDEKGNLTTAGFACSQCGQPLFVYKLEQVSEKGKAYTNYFGRCNVAEHEKLILLAQLKPEKDSDEAVTYSLGKFGQRALDFYSIHVTKESTHPVKPLAQIAGNRYASAPVGKALSDACMGTIASFLSKYQDIIIEHQKVVKGNQKRLESLRELAGKENLEYPSVTLPPQPHTKEGVDAYNEVIARVRMWVNLNLWQKLKLSRDDAKPLLRLKGFPSFPLVERQANEVDWWDMVCNVKKLINEKKEDGKVFWQNLAGYKRQEALRPYLSSEEDRKKGKKFARYQLGDLLLHLEKKHGEDWGKVYDEAWERIDKKVEGLSKHIKLEEERRSEDAQSKAALTDWLRAKASFVIEGLKEADKDEFCRCELKLQKWYGDLRGKPFAIEAENSILDISGFSKQYNCAFIWQKDGVKKLNLYLIINYFKGGKLRFKKIKPEAFEANRFYTVINKKSGEIVPMEVNFNFDDPNLIILPLAFGKRQGREFIWNDLLSLETGSLKLANGRVIEKTLYNRRTRQDEPALFVALTFERREVLDSSNIKPMNLIGVDRGENIPAVIALTDPEGCPLSRFKDSLGNPTHILRIGESYKEKQRTIQAKKEVEQRRAGGYSRKYASKAKNLADDMVRNTARDLLYYAVTQDAMLIFENLSRGFGRQGKRTFMAERQYTRMEDWLTAKLAYEGPLPSKTYLSKTLAQYTSKTCSNCGFTITSADYDRVLEKLKKTATGWMTTINGKELKVEGQITYYNRYKRQNVVKDLSVELDRLSEESVNNDISSWTKGRSGNEALSLLKKRFSHRPVQEKFVCLNCGFETHADEQAALNIARSWLFLRSQEYKKYQTNKTTGNTDKRAFVETWQSFYRKKLKEVWKPAV

SEQ ID NO: 47029 - protein, 980 aa, synthetic construct
  REGION 1..980: note = engineered CasX variant
QEIKRINKIRRRLVKDSNTKKAGKTGPMKTLLVRVMTPDLRERLENLRKKPENIPQPISNTSRANLNKLLTDYTEMKKAILHVYWEEFQKDPVGLMSRVAQPASKKIDQNKLKPEMDEKGNLTTAGFACSQCGQPLFVYKLEQVSEKGKAYTNYFGRCNVAEHEKLILLAQLKPEKDSDEAVTYSLGKFGQRALDFYSIHVTKESTHPVKPLAQIAGNRYASVPVGKALSDACMGTIASFLSKYQDIIIEHQKVVKGNQKRLESLRELAGKENLEYPSVTLPPQPHTKEGVDAYNEVIARVRMWVNLNLWQKLKLSRDDAKPLLRLKGFPSFPLVERQANEVDWWDMVCNVKKLINEKKEDGKVFWQNLAGYKRQEALRPYLSSEEDRKKGKKFARYQLGDLLLHLEKKHGEDWGKVYDEAWERIDKKVEGLSKHIKLEEERRSEDAQSKAALTDWLRAKASFVIEGLKEADKDEFCRCELKLQKWYGDLRGKPFAIEAENSILDISGFSKQYNCAFIWQKDGVKKLNLYLIINYFKGGKLRFKKIKPEAFEANRFYTVINKKSGEIVPMEVNFNFDDPNLIILPLAFGKRQGREFIWNDLLSLETGSLKLANGRVIEKTLYNRRTRQDEPALFVALTFERREVLDSSNIKPMNLIGVDRGENIPAVIALTDPEGCPLSRFKDSLGNPTHILRIGESYKEKQRTIQAKKEVEQRRAGGYSRKYASKAKNLADDMVRNTARDLLYYAVTQDAMLIFENLSRGFGRQGKRTFMAERQYTRMEDWLTAKLAYEGPLPSKTYLSKTLAQYTSKTCSNCGFTITSADYDRVLEKLKKTATGWMTTINGKELKVEGQITYYNRYKRQNVVKDLSVELDRLSEESVNNDISSWTKGRSGNEALSLLKKRFSHRPVQEKFVCLNCGFETHADEQAALNIARSWLFLRSQEYKKYQTNKTTGNTDKRAFVETWQSFYRKKLKEVWKPAV

SEQ ID NO: 47030 - protein, 980 aa, synthetic construct
  REGION 1..980: note = engineered CasX variant
QEIKRINKIRRRLVKDSNTKKAGKTGPMKTLLVRVMTPDLRERLENLRKKPENIPQPISNTSRANLNKLLTDYTEMKKAILHVYWEEFQKDPVGLMSRVAQPASKKIDQNKLKPEMDEKGNLTTAGFACSQCGQPLFVYKLEQVSEKGKAYTNYFGRCNVAEHEKLIKLAQLKPEKDSDEAVTYSLGKFGQRALDFYSIHVTKESTHPVKPLAQIAGNRYASGPVGKALSDACMGTIASFLSKYQDIIIEHQKVVKGNQKRLESLRELAGKENLEYPSVTLPPQPHTKEGVDAYNEVIARVRMWVNLNLWQKLKLSRDDAKPLLRLKGFPSFPLVERQANEVDWWDMVCNVKKLINEKKEDGKVFWQNLAGYKRQEALRPYLSSEEDRKKGKKFARYQLGDLLLHLEKKHGEDWGKVYDEAWERIDKKVEGLSKHIKLEEERRSEDAQSKAALTDWLRAKASFVIEGLKEADKDEFCRCELKLQKWYGDLRGKPFAIEAENSILDISGFSKQYNCAFIWQKDGVKKLNLYLIINYFKGGKLRFKKIKPEAFEANRFYTVINKKSGEIVPMEVNFNFDDPNLIILPLAFGKRQGREFIWNDLLSLETGSLKLANGRVIEKTLYNRRTRQDEPALFVALTFERREVLDSSNIKPMNLIGVDRGENIPAVIALTDPEGCPLSRFKDSLGNPTHILRIGESYKEKQRTIQAKKEVEQRRAGGYSRKYASKAKNLADDMVRNTARDLLYYAVTQDAMLIFENLSRGFGRQGKRTFMAERQYTRMEDWLTAKLAYEGPLPSKTYLSKTLAQYTSKTCSNCGFTITSADYDRVLEKLKKTATGWMTTINGKELKVEGQITYYNRYKRQNVVKDLSVELDRLSEESVNNDISSWTKGRSGNEALSLLKKRFSHRPVQEKFVCLNCGFETHADEQAALNIARSWLFLRSQEYKKYQTNKTTGNTDKRAFVETWQSFYRKKLKEVWKPAV

SEQ ID NO: 47031 - protein, 979 aa, synthetic construct
  REGION 1..979: note = engineered CasX variant
QEIKRINKIRRRLVKDSNTKKAGKTGPMKTLLVRVMTPDLRERLENLRKKPENIPQPISNTSRANLNKLLTDYTEMKKAILHVYWEEFQKDPVGLMSRVAQPASKKIDQNKLKPEMDEKGNLTTAGFACSQCGQPLFVYKLEQVSEKGKAYTNYFGRCNVAEHEKLILLAQLKPEKDSDEAVTYSLGKFGQRALDFYSIHVTKESTHPVKPLAQIAGNRYASPVGKALSDACMGTIASFLSKYQDIIIEHQKVVKGNQKRLESLRELAGKENLEYPSVTLPPQPHTKEGVDAYNEVIARVRMWVNLNLWQKLKLSRDDAKPLLRLKGFPSFPLVERQANEVDWWDMVCNVKKLINEKKEDGKVFWQNLAGYKRQEALRPYLSSEEDRKKGKKFARYQLGDLLLHLEKKHGEDWGKVYDEAWERIDKKVEGLSKHIKLEEERRSEDAQSKAALTDWLRAKASFVIEGLKEADKDEFCRCELKLQKWYGDLRGKPFAIEAENSILDISGFSKQYNCAFIWQKDGVKKLNLYLIINYFKGGKLRFKKIKPEAFEANRFYTVINKKSGEIVPMEVNFNFDDPNLIILPLAFGKRQGREFIWNDLLSLETGSLKLANGRVIEKTLYNRRTRQDEPALFVALTFERREVLDSSNIKPMNLIGVDRGENIPAVIALTDPEGCPLSRFKDSLGNPTHILRIGESYKEKQRTIQAKKEVEQRRAGGYSRKYASKAKNLADDMVRNTARDLLYYAVTQDAMLIFENLSRGFGRQGKRTFMAERQYTRMEDWLTAKLAYEGPLPSKTYLSKTLAQYTSKTCSNCGFTITSADYDRVLEKLKKTATGWMTTINGKELKVEGQITYYNRYKRQNVVKDLSVELDRLSEESVNNDISSWTKGRSGNEALSLLKKRFSHRPVQEKFVCLNCGFETHADEQAALNIARSWLFLRSQEYKKYQTNKTTGNTDKRAFVETWQSFYRKKLKEVWKPAV

SEQ ID NO: 47032 - protein, 979 aa, synthetic construct
  REGION 1..979: note = engineered CasX variant
QEIKRINKIRRRLVKDSNTKKAGKTGPMKTLLVRVMTPDLRERLENLRKKPENIPQPISNTSRANLNKLLTDYTEMKKAILHVYWEEFQKDPVGLMSRVAQPASKKIDQNKLKPEMDEKGNLTTAGFACSQCGQPLFVYKLEQVSEKGKAYTNYFGRCNVAEHEKLILLAQLKPEKDSDEAVTYSLGKFGQRALDFYSIHVTKESTHPVKPLAQIAGNRYASYPVGKALSDACMGTIASFLSKYQDIIIEHQKVVKGNQKRLESLRELAGKENLEYPSVTLPPQPHTKEGVDAYNEVIARVRMWVNLNLWQKLKLSRDDAKPLLRLKGFPSFPLVERQANEVDWWDMVCNVKKLINEKKEDGKVFWQNLAGYKRQEALRPYLSSEEDRQKGKKFARYQLGDLLLHLEKKHGEDWGKVYDEAWERIDKKVEGLSKHIKLEEERRSEDAQSKAALTDWLRAKASFVIEGLKEADKDEFCRCELKLQKWYGDLRGKPFAIEAENSILDISGFSKQYNCAFIWQKDGVKKLNLYLIINYFKGGKLRFKKIKPEAFEANRFYTVINKKSGEIVPMEVNFNFDDPNLIILPLAFGKRQGREFIWNDLLSLETGSLKLANGRVIEKTLYNRRTRQDEPALFVALTFERREVLDSSNIKPMNLIGVDRGENIPAVIALTDPEGCPLSRFKDSLGNPTHILRIGESYKEKQRTIQAKKEVEQRRAGGYSRKYASKAKNLADDMVRNTARDLLYYAVTQDAMLIFENLSRGFGRQGKRTFMAERQYTRMEDWLTAKLAYEGPLPSKTYLSKTLAQYTSKTCSNCGFTITSADYDRVLEKLKKTATGWMTTINGKELKVEGQITYYNRYKRQNVVKDLSVELDRLSEESVNNDISSWTKGRSGEALSLLKKRFSHRPVQEKFVCLNCGFETHADEQAALNIARSWLFLRSQEYKKYQTNKTTGNTDKRAFVETWQSFYRKKLKEVWKPAV

SEQ ID NO: 47033 - protein, 979 aa, synthetic construct
  REGION 1..979: note = engineered CasX variant
QEIKRINKIRRRLVKDSNTKKAGKTGPMKTLLVRVMTPDLRERLENLRKKPENIPQPISNTSRANLNKLLTDYTEMKKAILHVYWEEFQKDPVGLMSRVAQPASKKIDQNKLKPEMDEKGNLTTAGFACSQCGQPLFVYKLEQVSEKGKAYTNYFGRCNVAEHEKLILLAQLKPEKDSDEAVTYSLGKFGQRALDFYSIHVTKESTHPVKPLAQIAGNRYASHPVGKALSDACMGTIASFLSKYQDIIIEHQKVVKGNQKRLESLRELAGKENLEYPSVTLPPQPHTKEGVDAYNEVIARVRMWVNLNLWQKLKLSRDDAKPLLRLKGFPSFPLVERQANEVDWWDMVCNVKKLINEKKEDGKVFWQNLAGYKRQEALRPYLSSEEDRQKGKKFARYQLGDLLLHLEKKHGEDWGKVYDEAWERIDKKVEGLSKHIKLEEERRSEDAQSKAALTDWLRAKASFVIEGLKEADKDEFCRCELKLQKWYGDLRGKPFAIEAENSILDISGFSKQYNCAFIWQKDGVKKLNLYLIINYFKGGKLRFKKIKPEAFEANRFYTVINKKSGEIVPMEVNFNFDDPNLIILPLAFGKRQGREFIWNDLLSLETGSLKLANGRVIEKTLYNRRTRQDEPALFVALTFERREVLDSSNIKPMNLIGVDRGENIPAVIALTDPEGCPLSRFKDSLGNPTHILRIGESYKEKQRTIQAKKEVEQRRAGGYSRKYASKAKNLADDMVRNTARDLLYYAVTQDAMLIFENLSRGFGRQGKRTFMAERQYTRMEDWLTAKLAYEGPLPSKTYLSKTLAQYTSKTCSNCGFTITSADYDRVLEKLKKTATGWMTTINGKELKVEGQITYYNRYKRQNVVKDLSVELDRLSEESVNNDISSWTKGRSGEALSLLKKRFSHRPVQEKFVCLNCGFETHADEQAALNIARSWLFLRSQEYKKYQTNKTTGNTDKRAFVETWQSFYRKKLKEVWKPAV

SEQ ID NO: 47034 - protein, 979 aa, synthetic construct
  REGION 1..979: note = engineered CasX variant
QEIKRINKIRRRLVKDSNTKKAGKTGPMKTLLVRVMTPDLRERLENLRKKPENIPQPISNTSRANLNKLLTDYTEMKKAILHVYWEEFQKDPVGLMSRVAQPASKKIDQNKLKPEMDEKGNLTTAGFACSQCGQPLFVYKLEQVSEKGKAYTNYFGRCNVAEHEKLILLAQLKPEKDSDEAVTYSLGKFGQRALDFYSIHVTKESTHPVKPLAQIAGNRYASSPVGKALSDACMGTIASFLSKYQDIIIEHQKVVKGNQKRLESLRELAGKENLEYPSVTLPPQPHTKEGVDAYNEVIARVRMWVNLNLWQKLKLSRDDAKPLLRLKGFPSFPLVERQANEVDWWDMVCNVKKLINEKKEDGKVFWQNLAGYKRQEALRPYLSSEEDRQKGKKFARYQLGDLLLHLEKKHGEDWGKVYDEAWERIDKKVEGLSKHIKLEEERRSEDAQSKAALTDWLRAKASFVIEGLKEADKDEFCRCELKLQKWYGDLRGKPFAIEAENSILDISGFSKQYNCAFIWQKDGVKKLNLYLIINYFKGGKLRFKKIKPEAFEANRFYTVINKKSGEIVPMEVNFNFDDPNLIILPLAFGKRQGREFIWNDLLSLETGSLKLANGRVIEKTLYNRRTRQDEPALFVALTFERREVLDSSNIKPMNLIGVDRGENIPAVIALTDPEGCPLSRFKDSLGNPTHILRIGESYKEKQRTIQAKKEVEQRRAGGYSRKYASKAKNLADDMVRNTARDLLYYAVTQDAMLIFENLSRGFGRQGKRTFMAERQYTRMEDWLTAKLAYEGPLPSKTYLSKTLAQYTSKTCSNCGFTITSADYDRVLEKLKKTATGWMTTINGKELKVEGQITYYNRYKRQNVVKDLSVELDRLSEESVNNDISSWTKGRSGEALSLLKKRFSHRPVQEKFVCLNCGFETHADEQAALNIARSWLFLRSQEYKKYQTNKTTGNTDKRAFVETWQSFYRKKLKEVWKPAV

SEQ ID NO: 47035 - protein, 979 aa, synthetic construct
  REGION 1..979: note = engineered CasX variant
QEIKRINKIRRRLVKDSNTKKAGKTGPMKTLLVRVMTPDLRERLENLRKKPENIPQPISNTSRANLNKLLTDYTEMKKAILHVYWEEFQKDPVGLMSRVAQPASKKIDQNKLKPEMDEKGNLTTAGFACSQCGQPLFVYKLEQVSEKGKAYTNYFGRCNVAEHEKLILLAQLKPEKDSDEAVTYSLGKFGQRALDFYSIHVTKESTHPVKPLAQIAGNRYASTPVGKALSDACMGTIASFLSKYQDIIIEHQKVVKGNQKRLESLRELAGKENLEYPSVTLPPQPHTKEGVDAYNEVIARVRMWVNLNLWQKLKLSRDDAKPLLRLKGFPSFPLVERQANEVDWWDMVCNVKKLINEKKEDGKVFWQNLAGYKRQEALRPYLSSEEDRQKGKKFARYQLGDLLLHLEKKHGEDWGKVYDEAWERIDKKVEGLSKHIKLEEERRSEDAQSKAALTDWLRAKASFVIEGLKEADKDEFCRCELKLQKWYGDLRGKPFAIEAENSILDISGFSKQYNCAFIWQKDGVKKLNLYLIINYFKGGKLRFKKIKPEAFEANRFYTVINKKSGEIVPMEVNFNFDDPNLIILPLAFGKRQGREFIWNDLLSLETGSLKLANGRVIEKTLYNRRTRQDEPALFVALTFERREVLDSSNIKPMNLIGVDRGENIPAVIALTDPEGCPLSRFKDSLGNPTHILRIGESYKEKQRTIQAKKEVEQRRAGGYSRKYASKAKNLADDMVRNTARDLLYYAVTQDAMLIFENLSRGFGRQGKRTFMAERQYTRMEDWLTAKLAYEGPLPSKTYLSKTLAQYTSKTCSNCGFTITSADYDRVLEKLKKTATGWMTTINGKELKVEGQITYYNRYKRQNVVKDLSVELDRLSEESVNNDISSWTKGRSGEALSLLKKRFSHRPVQEKFVCLNCGFETHADEQAALNIARSWLFLRSQEYKKYQTNKTTGNTDKRAFVETWQSFYRKKLKEVWKPAV

SEQ ID NO: 47036 - protein, 979 aa, synthetic construct
  REGION 1..979: note = engineered CasX variant
QEIKRINKIRRRLVKDSNTKKAGKTGPMKTLLVRVMTPDLRERLENLRKKPENIPQPISNTSRANLNKLLTDYTEMKKAILHVYWEEFQKDPVGLMSRVAQPASKKIDQNKLKPEMDEKGNLTTAGFACSQCGQPLFVYKLEQVSEKGKAYTNYFGRCNVAEHEKLILLAQLKPEKDSDEAVTYSLGKFGQRALDFYSIHVTKESTHPVKPLAQIAGNRYASAPVGKALSDACMGTIASFLSKYQDIIIEHQKVVKGNQKRLESLRELAGKENLEYPSVTLPPQPHTKEGVDAYNEVIARVRMWVNLNLWQKLKLSRDDAKPLLRLKGFPSFPLVERQANEVDWWDMVCNVKKLINEKKEDGKVFWQNLAGYKRQEALRPYLSSEEDRQKGKKFARYQLGDLLLHLEKKHGEDWGKVYDEAWERIDKKVEGLSKHIKLEEERRSEDAQSKAALTDWLRAKASFVIEGLKEADKDEFCRCELKLQKWYGDLRGKPFAIEAENSILDISGFSKQYNCAFIWQKDGVKKLNLYLIINYFKGGKLRFKKIKPEAFEANRFYTVINKKSGEIVPMEVNFNFDDPNLIILPLAFGKRQGREFIWNDLLSLETGSLKLANGRVIEKTLYNRRTRQDEPALFVALTFERREVLDSSNIKPMNLIGVDRGENIPAVIALTDPEGCPLSRFKDSLGNPTHILRIGESYKEKQRTIQAKKEVEQRRAGGYSRKYASKAKNLADDMVRNTARDLLYYAVTQDAMLIFENLSRGFGRQGKRTFMAERQYTRMEDWLTAKLAYEGPLPSKTYLSKTLAQYTSKTCSNCGFTITSADYDRVLEKLKKTATGWMTTINGKELKVEGQITYYNRYKRQNVVKDLSVELDRLSEESVNNDISSWTKGRSGEALSLLKKRFSHRPVQEKFVCLNCGFETHADEQAALNIARSWLFLRSQEYKKYQTNKTTGNTDKRAFVETWQSFYRKKLKEVWKPAV

SEQ ID NO: 47037 - protein, 979 aa, synthetic construct
  REGION 1..979: note = engineered CasX variant
QEIKRINKIRRRLVKDSNTKKAGKTGPMKTLLVRVMTPDLRERLENLRKKPENIPQPISNTSRANLNKLLTDYTEMKKAILHVYWEEFQKDPVGLMSRVAQPASKKIDQNKLKPEMDEKGNLTTAGFACSQCGQPLFVYKLEQVSEKGKAYTNYFGRCNVAEHEKLILLAQLKPEKDSDEAVTYSLGKFGQRALDFYSIHVTKESTHPVKPLAQIAGNRYASVPVGKALSDACMGTIASFLSKYQDIIIEHQKVVKGNQKRLESLRELAGKENLEYPSVTLPPQPHTKEGVDAYNEVIARVRMWVNLNLWQKLKLSRDDAKPLLRLKGFPSFPLVERQANEVDWWDMVCNVKKLINEKKEDGKVFWQNLAGYKRQEALRPYLSSEEDRQKGKKFARYQLGDLLLHLEKKHGEDWGKVYDEAWERIDKKVEGLSKHIKLEEERRSEDAQSKAALTDWLRAKASFVIEGLKEADKDEFCRCELKLQKWYGDLRGKPFAIEAENSILDISGFSKQYNCAFIWQKDGVKKLNLYLIINYFKGGKLRFKKIKPEAFEANRFYTVINKKSGEIVPMEVNFNFDDPNLIILPLAFGKRQGREFIWNDLLSLETGSLKLANGRVIEKTLYNRRTRQDEPALFVALTFERREVLDSSNIKPMNLIGVDRGENIPAVIALTDPEGCPLSRFKDSLGNPTHILRIGESYKEKQRTIQAKKEVEQRRAGGYSRKYASKAKNLADDMVRNTARDLLYYAVTQDAMLIFENLSRGFGRQGKRTFMAERQYTRMEDWLTAKLAYEGPLPSKTYLSKTLAQYTSKTCSNCGFTITSADYDRVLEKLKKTATGWMTTINGKELKVEGQITYYNRYKRQNVVKDLSVELDRLSEESVNNDISSWTKGRSGEALSLLKKRFSHRPVQEKFVCLNCGFETHADEQAALNIARSWLFLRSQEYKKYQTNKTTGNTDKRAFVETWQSFYRKKLKEVWKPAV

SEQ ID NO: 47038 - protein, 979 aa, synthetic construct
  REGION 1..979: note = engineered CasX variant
QEIKRINKIRRRLVKDSNTKKAGKTGPMKTLLVRVMTPDLRERLENLRKKPENIPQPISNTSRANLNKLLTDYTEMKKAILHVYWEEFQKDPVGLMSRVAQPASKKIDQNKLKPEMDEKGNLTTAGFACSQCGQPLFVYKLEQVSEKGKAYTNYFGRCNVAEHEKLIKLAQLKPEKDSDEAVTYSLGKFGQRALDFYSIHVTKESTHPVKPLAQIAGNRYASGPVGKALSDACMGTIASFLSKYQDIIIEHQKVVKGNQKRLESLRELAGKENLEYPSVTLPPQPHTKEGVDAYNEVIARVRMWVNLNLWQKLKLSRDDAKPLLRLKGFPSFPLVERQANEVDWWDMVCNVKKLINEKKEDGKVFWQNLAGYKRQEALRPYLSSEEDRQKGKKFARYQLGDLLLHLEKKHGEDWGKVYDEAWERIDKKVEGLSKHIKLEEERRSEDAQSKAALTDWLRAKASFVIEGLKEADKDEFCRCELKLQKWYGDLRGKPFAIEAENSILDISGFSKQYNCAFIWQKDGVKKLNLYLIINYFKGGKLRFKKIKPEAFEANRFYTVINKKSGEIVPMEVNFNFDDPNLIILPLAFGKRQGREFIWNDLLSLETGSLKLANGRVIEKTLYNRRTRQDEPALFVALTFERREVLDSSNIKPMNLIGVDRGENIPAVIALTDPEGCPLSRFKDSLGNPTHILRIGESYKEKQRTIQAKKEVEQRRAGGYSRKYASKAKNLADDMVRNTARDLLYYAVTQDAMLIFENLSRGFGRQGKRTFMAERQYTRMEDWLTAKLAYEGPLPSKTYLSKTLAQYTSKTCSNCGFTITSADYDRVLEKLKKTATGWMTTINGKELKVEGQITYYNRYKRQNVVKDLSVELDRLSEESVNNDISSWTKGRSGEALSLLKKRFSHRPVQEKFVCLNCGFETHADEQAALNIARSWLFLRSQEYKKYQTNKTTGNTDKRAFVETWQSFYRKKLKEVWKPAV

SEQ ID NO: 47039 - protein, 978 aa, synthetic construct
  REGION 1..978: note = engineered CasX variant
QEIKRINKIRRRLVKDSNTKKAGKTGPMKTLLVRVMTPDLRERLENLRKKPENIPQPISNTSRANLNKLLTDYTEMKKAILHVYWEEFQKDPVGLMSRVAQPASKKIDQNKLKPEMDEKGNLTTAGFACSQCGQPLFVYKLEQVSEKGKAYTNYFGRCNVAEHEKLILLAQLKPEKDSDEAVTYSLGKFGQRALDFYSIHVTKESTHPVKPLAQIAGNRYASPVGKALSDACMGTIASFLSKYQDIIIEHQKVVKGNQKRLESLRELAGKENLEYPSVTLPPQPHTKEGVDAYNEVIARVRMWVNLNLWQKLKLSRDDAKPLLRLKGFPSFPLVERQANEVDWWDMVCNVKKLINEKKEDGKVFWQNLAGYKRQEALRPYLSSEEDRQKGKKFARYQLGDLLLHLEKKHGEDWGKVYDEAWERIDKKVEGLSKHIKLEEERRSEDAQSKAALTDWLRAKASFVIEGLKEADKDEFCRCELKLQKWYGDLRGKPFAIEAENSILDISGFSKQYNCAFIWQKDGVKKLNLYLIINYFKGGKLRFKKIKPEAFEANRFYTVINKKSGEIVPMEVNFNFDDPNLIILPLAFGKRQGREFIWNDLLSLETGSLKLANGRVIEKTLYNRRTRQDEPALFVALTFERREVLDSSNIKPMNLIGVDRGENIPAVIALTDPEGCPLSRFKDSLGNPTHILRIGESYKEKQRTIQAKKEVEQRRAGGYSRKYASKAKNLADDMVRNTARDLLYYAVTQDAMLIFENLSRGFGRQGKRTFMAERQYTRMEDWLTAKLAYEGPLPSKTYLSKTLAQYTSKTCSNCGFTITSADYDRVLEKLKKTATGWMTTINGKELKVEGQITYYNRYKRQNVVKDLSVELDRLSEESVNNDISSWTKGRSGEALSLLKKRFSHRPVQEKFVCLNCGFETHADEQAALNIARSWLFLRSQEYKKYQTNKTTGNTDKRAFVETWQSFYRKKLKEVWKPAV

SEQ ID NO: 47040 - protein, 979 aa, synthetic construct
  REGION 1..979: note = engineered CasX variant
QEIKRINKIRRRLVKDSNTKKAGKTGPMKTLLVRVMTPDLRERLENLRKKPENIPQPISNTSRANLNKLLTDYTEMKKAILHVYWEEFQKDPVGLMSRVAQPASKKIDQNKLKPEMDEKGNLTTAGFACSQCGQPLFVYKLEQVSEKGKAYTNYFGRCNVAEHEKLILLAQLKPEKDSDEAVTYSLGKFGQRALDFYSIHVTKESTHPVKPLAQIAGNRYASYPVGKALSDACMGTIASFLSKYQDIIIEHQKVVKGNQKRLESLRELAGKENLEYPSVTLPPQPHTKEGVDAYNEVIARVRMWVNLNLWQKLKLSRDDAKPLLRLKGFPSFPLVERQANEVDWWDMVCNVKKLINEKKEDGKVFWQNLAGYKRQEALRPYLSSEEDRKKGKKFARYQLGDLLLHLEKKHGEDWGKVYDEAWERIDKKVEGLSKHIKLEEERRSEDAQSKAALTDWLRAKASFVIEGLKEADKDEFCRCELKLQKWYGDLRGKPFAIEAENSILDISGFSKQYNCAFIWQKDGVKKLNLYLIINYFKGGKLRFKKIKPEAFEANRFYTVINKKSGEIVPMEVNFNFDDPNLIILPLAFGKRQGREFIWNDLLSLETGSLKLANGRVIEKTLYNRRTRQDEPALFVALTFERREVLDSSNIKPMNLIGVDRGENIPAVIALTDPEGCPLSRFKDSLGNPTHILRIGESYKEKQRTIQAKKEVEQRRAGGYSRKYASKAKNLADDMVRNTARDLLYYAVTQDAMLIFENLSRGFGRQGKRTFMAERQYTRMEDWLTAKLAYEGPLPSQTYLSKTLAQYTSKTCSNCGFTITSADYDRVLEKLKKTATGWMTTINGKELKVEGQITYYNRYKRQNVVKDLSVELDRLSEESVNNDISSWTKGRSGEALSLLKKRFSHRPVQEKFVCLNCGFETHADEQAALNIARSWLFLRSQEYKKYQTNKTTGNTDKRAFVETWQSFYRKKLKEVWKPAV

SEQ ID NO: 47041 - protein, 979 aa, synthetic construct
  REGION 1..979: note = engineered CasX variant
QEIKRINKIRRRLVKDSNTKKAGKTGPMKTLLVRVMTPDLRERLENLRKKPENIPQPISNTSRANLNKLLTDYTEMKKAILHVYWEEFQKDPVGLMSRVAQPASKKIDQNKLKPEMDEKGNLTTAGFACSQCGQPLFVYKLEQVSEKGKAYTNYFGRCNVAEHEKLILLAQLKPEKDSDEAVTYSLGKFGQRALDFYSIHVTKESTHPVKPLAQIAGNRYASHPVGKALSDACMGTIASFLSKYQDIIIEHQKVVKGNQKRLESLRELAGKENLEYPSVTLPPQPHTKEGVDAYNEVIARVRMWVNLNLWQKLKLSRDDAKPLLRLKGFPSFPLVERQANEVDWWDMVCNVKKLINEKKEDGKVFWQNLAGYKRQEALRPYLSSEEDRKKGKKFARYQLGDLLLHLEKKHGEDWGKVYDEAWERIDKKVEGLSKHIKLEEERRSEDAQSKAALTDWLRAKASFVIEGLKEADKDEFCRCELKLQKWYGDLRGKPFAIEAENSILDISGFSKQYNCAFIWQKDGVKKLNLYLIINYFKGGKLRFKKIKPEAFEANRFYTVINKKSGEIVPMEVNFNFDDPNLIILPLAFGKRQGREFIWNDLLSLETGSLKLANGRVIEKTLYNRRTRQDEPALFVALTFERREVLDSSNIKPMNLIGVDRGENIPAVIALTDPEGCPLSRFKDSLGNPTHILRIGESYKEKQRTIQAKKEVEQRRAGGYSRKYASKAKNLADDMVRNTARDLLYYAVTQDAMLIFENLSRGFGRQGKRTFMAERQYTRMEDWLTAKLAYEGPLPSQTYLSKTLAQYTSKTCSNCGFTITSADYDRVLEKLKKTATGWMTTINGKELKVEGQITYYNRYKRQNVVKDLSVELDRLSEESVNNDISSWTKGRSGEALSLLKKRFSHRPVQEKFVCLNCGFETHADEQAALNIARSWLFLRSQEYKKYQTNKTTGNTDKRAFVETWQSFYRKKLKEVWKPAV

SEQ ID NO: 47042 - protein, 979 aa, synthetic construct
  REGION 1..979: note = engineered CasX variant
QEIKRINKIRRRLVKDSNTKKAGKTGPMKTLLVRVMTPDLRERLENLRKKPENIPQPISNTSRANLNKLLTDYTEMKKAILHVYWEEFQKDPVGLMSRVAQPASKKIDQNKLKPEMDEKGNLTTAGFACSQCGQPLFVYKLEQVSEKGKAYTNYFGRCNVAEHEKLILLAQLKPEKDSDEAVTYSLGKFGQRALDFYSIHVTKESTHPVKPLAQIAGNRYASSPVGKALSDACMGTIASFLSKYQDIIIEHQKVVKGNQKRLESLRELAGKENLEYPSVTLPPQPHTKEGVDAYNEVIARVRMWVNLNLWQKLKLSRDDAKPLLRLKGFPSFPLVERQANEVDWWDMVCNVKKLINEKKEDGKVFWQNLAGYKRQEALRPYLSSEEDRKKGKKFARYQLGDLLLHLEKKHGEDWGKVYDEAWERIDKKVEGLSKHIKLEEERRSEDAQSKAALTDWLRAKASFVIEGLKEADKDEFCRCELKLQKWYGDLRGKPFAIEAENSILDISGFSKQYNCAFIWQKDGVKKLNLYLIINYFKGGKLRFKKIKPEAFEANRFYTVINKKSGEIVPMEVNFNFDDPNLIILPLAFGKRQGREFIWNDLLSLETGSLKLANGRVIEKTLYNRRTRQDEPALFVALTFERREVLDSSNIKPMNLIGVDRGENIPAVIALTDPEGCPLSRFKDSLGNPTHILRIGESYKEKQRTIQAKKEVEQRRAGGYSRKYASKAKNLADDMVRNTARDLLYYAVTQDAMLIFENLSRGFGRQGKRTFMAERQYTRMEDWLTAKLAYEGPLPSQTYLSKTLAQYTSKTCSNCGFTITSADYDRVLEKLKKTATGWMTTINGKELKVEGQITYYNRYKRQNVVKDLSVELDRLSEESVNNDISSWTKGRSGEALSLLKKRFSHRPVQEKFVCLNCGFETHADEQAALNIARSWLFLRSQEYKKYQTNKTTGNTDKRAFVETWQSFYRKKLKEVWKPAV

SEQ ID NO: 47043 - protein, 979 aa, synthetic construct
  REGION 1..979: note = engineered CasX variant
QEIKRINKIRRRLVKDSNTKKAGKTGPMKTLLVRVMTPDLRERLENLRKKPENIPQPISNTSRANLNKLLTDYTEMKKAILHVYWEEFQKDPVGLMSRVAQPASKKIDQNKLKPEMDEKGNLTTAGFACSQCGQPLFVYKLEQVSEKGKAYTNYFGRCNVAEHEKLILLAQLKPEKDSDEAVTYSLGKFGQRALDFYSIHVTKESTHPVKPLAQIAGNRYASTPVGKALSDACMGTIASFLSKYQDIIIEHQKVVKGNQKRLESLRELAGKENLEYPSVTLPPQPHTKEGVDAYNEVIARVRMWVNLNLWQKLKLSRDDAKPLLRLKGFPSFPLVERQANEVDWWDMVCNVKKLINEKKEDGKVFWQNLAGYKRQEALRPYLSSEEDRKKGKKFARYQLGDLLLHLEKKHGEDWGKVYDEAWERIDKKVEGLSKHIKLEEERRSEDAQSKAALTDWLRAKASFVIEGLKEADKDEFCRCELKLQKWYGDLRGKPFAIEAENSILDISGFSKQYNCAFIWQKDGVKKLNLYLIINYFKGGKLRFKKIKPEAFEANRFYTVINKKSGEIVPMEVNFNFDDPNLIILPLAFGKRQGREFIWNDLLSLETGSLKLANGRVIEKTLYNRRTRQDEPALFVALTFERREVLDSSNIKPMNLIGVDRGENIPAVIALTDPEGCPLSRFKDSLGNPTHILRIGESYKEKQRTIQAKKEVEQRRAGGYSRKYASKAKNLADDMVRNTARDLLYYAVTQDAMLIFENLSRGFGRQGKRTFMAERQYTRMEDWLTAKLAYEGPLPSQTYLSKTLAQYTSKTCSNCGFTITSADYDRVLEKLKKTATGWMTTINGKELKVEGQITYYNRYKRQNVVKDLSVELDRLSEESVNNDISSWTKGRSGEALSLLKKRFSHRPVQEKFVCLNCGFETHADEQAALNIARSWLFLRSQEYKKYQTNKTTGNTDKRAFVETWQSFYRKKLKEVWKPAV

SEQ ID NO: 47044 - protein, 979 aa, synthetic construct
  REGION 1..979: note = engineered CasX variant
QEIKRINKIRRRLVKDSNTKKAGKTGPMKTLLVRVMTPDLRERLENLRKKPENIPQPISNTSRANLNKLLTDYTEMKKAILHVYWEEFQKDPVGLMSRVAQPASKKIDQNKLKPEMDEKGNLTTAGFACSQCGQPLFVYKLEQVSEKGKAYTNYFGRCNVAEHEKLILLAQLKPEKDSDEAVTYSLGKFGQRALDFYSIHVTKESTHPVKPLAQIAGNRYASAPVGKALSDACMGTIASFLSKYQDIIIEHQKVVKGNQKRLESLRELAGKENLEYPSVTLPPQPHTKEGVDAYNEVIARVRMWVNLNLWQKLKLSRDDAKPLLRLKGFPSFPLVERQANEVDWWDMVCNVKKLINEKKEDGKVFWQNLAGYKRQEALRPYLSSEEDRKKGKKFARYQLGDLLLHLEKKHGEDWGKVYDEAWERIDKKVEGLSKHIKLEEERRSEDAQSKAALTDWLRAKASFVIEGLKEADKDEFCRCELKLQKWYGDLRGKPFAIEAENSILDISGFSKQYNCAFIWQKDGVKKLNLYLIINYFKGGKLRFKKIKPEAFEANRFYTVINKKSGEIVPMEVNFNFDDPNLIILPLAFGKRQGREFIWNDLLSLETGSLKLANGRVIEKTLYNRRTRQDEPALFVALTFERREVLDSSNIKPMNLIGVDRGENIPAVIALTDPEGCPLSRFKDSLGNPTHILRIGESYKEKQRTIQAKKEVEQRRAGGYSRKYASKAKNLADDMVRNTARDLLYYAVTQDAMLIFENLSRGFGRQGKRTFMAERQYTRMEDWLTAKLAYEGPLPSQTYLSKTLAQYTSKTCSNCGFTITSADYDRVLEKLKKTATGWMTTINGKELKVEGQITYYNRYKRQNVVKDLSVELDRLSEESVNNDISSWTKGRSGEALSLLKKRFSHRPVQEKFVCLNCGFETHADEQAALNIARSWLFLRSQEYKKYQTNKTTGNTDKRAFVETWQSFYRKKLKEVWKPAV

SEQ ID NO: 47045 - protein, 979 aa, synthetic construct
  REGION 1..979: note = engineered CasX variant
QEIKRINKIRRRLVKDSNTKKAGKTGPMKTLLVRVMTPDLRERLENLRKKPENIPQPISNTSRANLNKLLTDYTEMKKAILHVYWEEFQKDPVGLMSRVAQPASKKIDQNKLKPEMDEKGNLTTAGFACSQCGQPLFVYKLEQVSEKGKAYTNYFGRCNVAEHEKLILLAQLKPEKDSDEAVTYSLGKFGQRALDFYSIHVTKESTHPVKPLAQIAGNRYASVPVGKALSDACMGTIASFLSKYQDIIIEHQKVVKGNQKRLESLRELAGKENLEYPSVTLPPQPHTKEGVDAYNEVIARVRMWVNLNLWQKLKLSRDDAKPLLRLKGFPSFPLVERQANEVDWWDMVCNVKKLINEKKEDGKVFWQNLAGYKRQEALRPYLSSEEDRKKGKKFARYQLGDLLLHLEKKHGEDWGKVYDEAWERIDKKVEGLSKHIKLEEERRSEDAQSKAALTDWLRAKASFVIEGLKEADKDEFCRCELKLQKWYGDLRGKPFAIEAENSILDISGFSKQYNCAFIWQKDGVKKLNLYLIINYFKGGKLRFKKIKPEAFEANRFYTVINKKSGEIVPMEVNFNFDDPNLIILPLAFGKRQGREFIWNDLLSLETGSLKLANGRVIEKTLYNRRTRQDEPALFVALTFERREVLDSSNIKPMNLIGVDRGENIPAVIALTDPEGCPLSRFKDSLGNPTHILRIGESYKEKQRTIQAKKEVEQRRAGGYSRKYASKAKNLADDMVRNTARDLLYYAVTQDAMLIFENLSRGFGRQGKRTFMAERQYTRMEDWLTAKLAYEGPLPSQTYLSKTLAQYTSKTCSNCGFTITSADYDRVLEKLKKTATGWMTTINGKELKVEGQITYYNRYKRQNVVKDLSVELDRLSEESVNNDISSWTKGRSGEALSLLKKRFSHRPVQEKFVCLNCGFETHADEQAALNIARSWLFLRSQEYKKYQTNKTTGNTDKRAFVETWQSFYRKKLKEVWKPAV

SEQ ID NO: 47046 - protein, 979 aa, synthetic construct
  REGION 1..979: note = engineered CasX variant
QEIKRINKIRRRLVKDSNTKKAGKTGPMKTLLVRVMTPDLRERLENLRKKPENIPQPISNTSRANLNKLLTDYTEMKKAILHVYWEEFQKDPVGLMSRVAQPASKKIDQNKLKPEMDEKGNLTTAGFACSQCGQPLFVYKLEQVSEKGKAYTNYFGRCNVAEHEKLIKLAQLKPEKDSDEAVTYSLGKFGQRALDFYSIHVTKESTHPVKPLAQIAGNRYASGPVGKALSDACMGTIASFLSKYQDIIIEHQKVVKGNQKRLESLRELAGKENLEYPSVTLPPQPHTKEGVDAYNEVIARVRMWVNLNLWQKLKLSRDDAKPLLRLKGFPSFPLVERQANEVDWWDMVCNVKKLINEKKEDGKVFWQNLAGYKRQEALRPYLSSEEDRKKGKKFARYQLGDLLLHLEKKHGEDWGKVYDEAWERIDKKVEGLSKHIKLEEERRSEDAQSKAALTDWLRAKASFVIEGLKEADKDEFCRCELKLQKWYGDLRGKPFAIEAENSILDISGFSKQYNCAFIWQKDGVKKLNLYLIINYFKGGKLRFKKIKPEAFEANRFYTVINKKSGEIVPMEVNFNFDDPNLIILPLAFGKRQGREFIWNDLLSLETGSLKLANGRVIEKTLYNRRTRQDEPALFVALTFERREVLDSSNIKPMNLIGVDRGENIPAVIALTDPEGCPLSRFKDSLGNPTHILRIGESYKEKQRTIQAKKEVEQRRAGGYSRKYASKAKNLADDMVRNTARDLLYYAVTQDAMLIFENLSRGFGRQGKRTFMAERQYTRMEDWLTAKLAYEGPLPSQTYLSKTLAQYTSKTCSNCGFTITSADYDRVLEKLKKTATGWMTTINGKELKVEGQITYYNRYKRQNVVKDLSVELDRLSEESVNNDISSWTKGRSGEALSLLKKRFSHRPVQEKFVCLNCGFETHADEQAALNIARSWLFLRSQEYKKYQTNKTTGNTDKRAFVETWQSFYRKKLKEVWKPAV

SEQ ID NO: 47047 - protein, 978 aa, synthetic construct
  REGION 1..978: note = engineered CasX variant
QEIKRINKIRRRLVKDSNTKKAGKTGPMKTLLVRVMTPDLRERLENLRKKPENIPQPISNTSRANLNKLLTDYTEMKKAILHVYWEEFQKDPVGLMSRVAQPASKKIDQNKLKPEMDEKGNLTTAGFACSQCGQPLFVYKLEQVSEKGKAYTNYFGRCNVAEHEKLILLAQLKPEKDSDEAVTYSLGKFGQRALDFYSIHVTKESTHPVKPLAQIAGNRYASPVGKALSDACMGTIASFLSKYQDIIIEHQKVVKGNQKRLESLRELAGKENLEYPSVTLPPQPHTKEGVDAYNEVIARVRMWVNLNLWQKLKLSRDDAKPLLRLKGFPSFPLVERQANEVDWWDMVCNVKKLINEKKEDGKVFWQNLAGYKRQEALRPYLSSEEDRKKGKKFARYQLGDLLLHLEKKHGEDWGKVYDEAWERIDKKVEGLSKHIKLEEERRSEDAQSKAALTDWLRAKASFVIEGLKEADKDEFCRCELKLQKWYGDLRGKPFAIEAENSILDISGFSKQYNCAFIWQKDGVKKLNLYLIINYFKGGKLRFKKIKPEAFEANRFYTVINKKSGEIVPMEVNFNFDDPNLIILPLAFGKRQGREFIWNDLLSLETGSLKLANGRVIEKTLYNRRTRQDEPALFVALTFERREVLDSSNIKPMNLIGVDRGENIPAVIALTDPEGCPLSRFKDSLGNPTHILRIGESYKEKQRTIQAKKEVEQRRAGGYSRKYASKAKNLADDMVRNTARDLLYYAVTQDAMLIFENLSRGFGRQGKRTFMAERQYTRMEDWLTAKLAYEGPLPSQTYLSKTLAQYTSKTCSNCGFTITSADYDRVLEKLKKTATGWMTTINGKELKVEGQITYYNRYKRQNVVKDLSVELDRLSEESVNNDISSWTKGRSGEALSLLKKRFSHRPVQEKFVCLNCGFETHADEQAALNIARSWLFLRSQEYKKYQTNKTTGNTDKRAFVETWQSFYRKKLKEVWKPAV

SEQ ID NO: 47048 - protein, 979 aa, synthetic construct
  REGION 1..979: note = engineered CasX variant
QEIKRINKIRRRLVKDSNTKKAGKTGPMKTLLVRVMTPDLRERLENLRKKPENIPQPISNTSRANLNKLLTDYTEMKKAILHVYWEEFQKDPVGLMSRVAQPASKKIDQNKLKPEMDEKGNLTTAGFACSQCGQPLFVYKLEQVSEKGKAYTNYFGRCNVAEHEKLILLAQLKPEKDSDEAVTYSLGKFGQRALDFYSIHVTKESTHPVKPLAQIAGNRYASYPVGKALSDACMGTIASFLSKYQDIIIEHQKVVKGNQKRLESLRELAGKENLEYPSVTLPPQPHTKEGVDAYNEVIARVRMWVNLNLWQKLKLSRDDAKPLLRLKGFPSFPLVERQANEVDWWDMVCNVKKLINEKKEDGKVFWQNLAGYKRQEALRPYLSSEEDRKKGKKFARYQLGDLLLHLEKKHGEDWGKVYDEAWERIDKKVEGLSKHIKLEEERRSEDAQSKAALTDWLRAKASFVIEGLKEADKDEFCRCELKLQKWYGDLRGKPFAIEAENSILDISGFSKQYNCAFIWQKDGVKKLNLYLIINYFKGGKLRFKKIKPEAFEANRFYTVINKKSGEIVPMEVNFNFDDPNLIILPLAFGKRQGREFIWNDLLSLETGSLKLANGRVIEKTLYNRRTRQDEPALFVALTFERREVLDSSNIKPMNLIGVDRGENIPAVIALTDPEGCPLSRFKDSLGNPTHILRIGESYKEKQRTIQAKKEVEQRRAGGYSRKYASKAKNLADDMVRNTARDLLYYAVTQDAMLIFENLSRGFGRQGKRTFMAERQYTRMEDWLTAKLAYNGPLPSKTYLSKTLAQYTSKTCSNCGFTITSADYDRVLEKLKKTATGWMTTINGKELKVEGQITYYNRYKRQNVVKDLSVELDRLSEESVNNDISSWTKGRSGEALSLLKKRFSHRPVQEKFVCLNCGFETHADEQAALNIARSWLFLRSQEYKKYQTNKTTGNTDKRAFVETWQSFYRKKLKEVWKPAV

SEQ ID NO: 47049 - protein, 979 aa, synthetic construct
  REGION 1..979: note = engineered CasX variant
QEIKRINKIRRRLVKDSNTKKAGKTGPMKTLLVRVMTPDLRERLENLRKKPENIPQPISNTSRANLNKLLTDYTEMKKAILHVYWEEFQKDPVGLMSRVAQPASKKIDQNKLKPEMDEKGNLTTAGFACSQCGQPLFVYKLEQVSEKGKAYTNYFGRCNVAEHEKLILLAQLKPEKDSDEAVTYSLGKFGQRALDFYSIHVTKESTHPVKPLAQIAGNRYASHPVGKALSDACMGTIASFLSKYQDIIIEHQKVVKGNQKRLESLRELAGKENLEYPSVTLPPQPHTKEGVDAYNEVIARVRMWVNLNLWQKLKLSRDDAKPLLRLKGFPSFPLVERQANEVDWWDMVCNVKKLINEKKEDGKVFWQNLAGYKRQEALRPYLSSEEDRKKGKKFARYQLGDLLLHLEKKHGEDWGKVYDEAWERIDKKVEGLSKHIKLEEERRSEDAQSKAALTDWLRAKASFVIEGLKEADKDEFCRCELKLQKWYGDLRGKPFAIEAENSILDISGFSKQYNCAFIWQKDGVKKLNLYLIINYFKGGKLRFKKIKPEAFEANRFYTVINKKSGEIVPMEVNFNFDDPNLIILPLAFGKRQGREFIWNDLLSLETGSLKLANGRVIEKTLYNRRTRQDEPALFVALTFERREVLDSSNIKPMNLIGVDRGENIPAVIALTDPEGCPLSRFKDSLGNPTHILRIGESYKEKQRTIQAKKEVEQRRAGGYSRKYASKAKNLADDMVRNTARDLLYYAVTQDAMLIFENLSRGFGRQGKRTFMAERQYTRMEDWLTAKLAYNGPLPSKTYLSKTLAQYTSKTCSNCGFTITSADYDRVLEKLKKTATGWMTTINGKELKVEGQITYYNRYKRQNVVKDLSVELDRLSEESVNNDISSWTKGRSGEALSLLKKRFSHRPVQEKFVCLNCGFETHADEQAALNIARSWLFLRSQEYKKYQTNKTTGNTDKRAFVETWQSFYRKKLKEVWKPAV

SEQ ID NO: 47050 - protein, 979 aa, synthetic construct
  REGION 1..979: note = engineered CasX variant
QEIKRINKIRRRLVKDSNTKKAGKTGPMKTLLVRVMTPDLRERLENLRKKPENIPQPISNTSRANLNKLLTDYTEMKKAILHVYWEEFQKDPVGLMSRVAQPASKKIDQNKLKPEMDEKGNLTTAGFACSQCGQPLFVYKLEQVSEKGKAYTNYFGRCNVAEHEKLILLAQLKPEKDSDEAVTYSLGKFGQRALDFYSIHVTKESTHPVKPLAQIAGNRYASSPVGKALSDACMGTIASFLSKYQDIIIEHQKVVKGNQKRLESLRELAGKENLEYPSVTLPPQPHTKEGVDAYNEVIARVRMWVNLNLWQKLKLSRDDAKPLLRLKGFPSFPLVERQANEVDWWDMVCNVKKLINEKKEDGKVFWQNLAGYKRQEALRPYLSSEEDRKKGKKFARYQLGDLLLHLEKKHGEDWGKVYDEAWERIDKKVEGLSKHIKLEEERRSEDAQSKAALTDWLRAKASFVIEGLKEADKDEFCRCELKLQKWYGDLRGKPFAIEAENSILDISGFSKQYNCAFIWQKDGVKKLNLYLIINYFKGGKLRFKKIKPEAFEANRFYTVINKKSGEIVPMEVNFNFDDPNLIILPLAFGKRQGREFIWNDLLSLETGSLKLANGRVIEKTLYNRRTRQDEPALFVALTFERREVLDSSNIKPMNLIGVDRGENIPAVIALTDPEGCPLSRFKDSLGNPTHILRIGESYKEKQRTIQAKKEVEQRRAGGYSRKYASKAKNLADDMVRNTARDLLYYAVTQDAMLIFENLSRGFGRQGKRTFMAERQYTRMEDWLTAKLAYNGPLPSKTYLSKTLAQYTSKTCSNCGFTITSADYDRVLEKLKKTATGWMTTINGKELKVEGQITYYNRYKRQNVVKDLSVELDRLSEESVNNDISSWTKGRSGEALSLLKKRFSHRPVQEKFVCLNCGFETHADEQAALNIARSWLFLRSQEYKKYQTNKTTGNTDKRAFVETWQSFYRKKLKEVWKPAV

SEQ ID NO: 47051 - protein, 979 aa, synthetic construct
  REGION 1..979: note = engineered CasX variant
QEIKRINKIRRRLVKDSNTKKAGKTGPMKTLLVRVMTPDLRERLENLRKKPENIPQPISNTSRANLNKLLTDYTEMKKAILHVYWEEFQKDPVGLMSRVAQPASKKIDQNKLKPEMDEKGNLTTAGFACSQCGQPLFVYKLEQVSEKGKAYTNYFGRCNVAEHEKLILLAQLKPEKDSDEAVTYSLGKFGQRALDFYSIHVTKESTHPVKPLAQIAGNRYASTPVGKALSDACMGTIASFLSKYQDIIIEHQKVVKGNQKRLESLRELAGKENLEYPSVTLPPQPHTKEGVDAYNEVIARVRMWVNLNLWQKLKLSRDDAKPLLRLKGFPSFPLVERQANEVDWWDMVCNVKKLINEKKEDGKVFWQNLAGYKRQEALRPYLSSEEDRKKGKKFARYQLGDLLLHLEKKHGEDWGKVYDEAWERIDKKVEGLSKHIKLEEERRSEDAQSKAALTDWLRAKASFVIEGLKEADKDEFCRCELKLQKWYGDLRGKPFAIEAENSILDISGFSKQYNCAFIWQKDGVKKLNLYLIINYFKGGKLRFKKIKPEAFEANRFYTVINKKSGEIVPMEVNFNFDDPNLIILPLAFGKRQGREFIWNDLLSLETGSLKLANGRVIEKTLYNRRTRQDEPALFVALTFERREVLDSSNIKPMNLIGVDRGENIPAVIALTDPEGCPLSRFKDSLGNPTHILRIGESYKEKQRTIQAKKEVEQRRAGGYSRKYASKAKNLADDMVRNTARDLLYYAVTQDAMLIFENLSRGFGRQGKRTFMAERQYTRMEDWLTAKLAYNGPLPSKTYLSKTLAQYTSKTCSNCGFTITSADYDRVLEKLKKTATGWMTTINGKELKVEGQITYYNRYKRQNVVKDLSVELDRLSEESVNNDISSWTKGRSGEALSLLKKRFSHRPVQEKFVCLNCGFETHADEQAALNIARSWLFLRSQEYKKYQTNKTTGNTDKRAFVETWQSFYRKKLKEVWKPAV

SEQ ID NO: 47052 - protein, 979 aa, synthetic construct
  REGION 1..979: note = engineered CasX variant
QEIKRINKIRRRLVKDSNTKKAGKTGPMKTLLVRVMTPDLRERLENLRKKPENIPQPISNTSRANLNKLLTDYTEMKKAILHVYWEEFQKDPVGLMSRVAQPASKKIDQNKLKPEMDEKGNLTTAGFACSQCGQPLFVYKLEQVSEKGKAYTNYFGRCNVAEHEKLILLAQLKPEKDSDEAVTYSLGKFGQRALDFYSIHVTKESTHPVKPLAQIAGNRYASAPVGKALSDACMGTIASFLSKYQDIIIEHQKVVKGNQKRLESLRELAGKENLEYPSVTLPPQPHTKEGVDAYNEVIARVRMWVNLNLWQKLKLSRDDAKPLLRLKGFPSFPLVERQANEVDWWDMVCNVKKLINEKKEDGKVFWQNLAGYKRQEALRPYLSSEEDRKKGKKFARYQLGDLLLHLEKKHGEDWGKVYDEAWERIDKKVEGLSKHIKLEEERRSEDAQSKAALTDWLRAKASFVIEGLKEADKDEFCRCELKLQKWYGDLRGKPFAIEAENSILDISGFSKQYNCAFIWQKDGVKKLNLYLIINYFKGGKLRFKKIKPEAFEANRFYTVINKKSGEIVPMEVNFNFDDPNLIILPLAFGKRQGREFIWNDLLSLETGSLKLANGRVIEKTLYNRRTRQDEPALFVALTFERREVLDSSNIKPMNLIGVDRGENIPAVIALTDPEGCPLSRFKDSLGNPTHILRIGESYKEKQRTIQAKKEVEQRRAGGYSRKYASKAKNLADDMVRNTARDLLYYAVTQDAMLIFENLSRGFGRQGKRTFMAERQYTRMEDWLTAKLAYNGPLPSKTYLSKTLAQYTSKTCSNCGFTITSADYDRVLEKLKKTATGWMTTINGKELKVEGQITYYNRYKRQNVVKDLSVELDRLSEESVNNDISSWTKGRSGEALSLLKKRFSHRPVQEKFVCLNCGFETHADEQAALNIARSWLFLRSQEYKKYQTNKTTGNTDKRAFVETWQSFYRKKLKEVWKPAV

SEQ ID NO: 47053 - protein, 979 aa, synthetic construct
  REGION 1..979: note = engineered CasX variant
QEIKRINKIRRRLVKDSNTKKAGKTGPMKTLLVRVMTPDLRERLENLRKKPENIPQPISNTSRANLNKLLTDYTEMKKAILHVYWEEFQKDPVGLMSRVAQPASKKIDQNKLKPEMDEKGNLTTAGFACSQCGQPLFVYKLEQVSEKGKAYTNYFGRCNVAEHEKLILLAQLKPEKDSDEAVTYSLGKFGQRALDFYSIHVTKESTHPVKPLAQIAGNRYASVPVGKALSDACMGTIASFLSKYQDIIIEHQKVVKGNQKRLESLRELAGKENLEYPSVTLPPQPHTKEGVDAYNEVIARVRMWVNLNLWQKLKLSRDDAKPLLRLKGFPSFPLVERQANEVDWWDMVCNVKKLINEKKEDGKVFWQNLAGYKRQEALRPYLSSEEDRKKGKKFARYQLGDLLLHLEKKHGEDWGKVYDEAWERIDKKVEGLSKHIKLEEERRSEDAQSKAALTDWLRAKASFVIEGLKEADKDEFCRCELKLQKWYGDLRGKPFAIEAENSILDISGFSKQYNCAFIWQKDGVKKLNLYLIINYFKGGKLRFKKIKPEAFEANRFYTVINKKSGEIVPMEVNFNFDDPNLIILPLAFGKRQGREFIWNDLLSLETGSLKLANGRVIEKTLYNRRTRQDEPALFVALTFERREVLDSSNIKPMNLIGVDRGENIPAVIALTDPEGCPLSRFKDSLGNPTHILRIGESYKEKQRTIQAKKEVEQRRAGGYSRKYASKAKNLADDMVRNTARDLLYYAVTQDAMLIFENLSRGFGRQGKRTFMAERQYTRMEDWLTAKLAYNGPLPSKTYLSKTLAQYTSKTCSNCGFTITSADYDRVLEKLKKTATGWMTTINGKELKVEGQITYYNRYKRQNVVKDLSVELDRLSEESVNNDISSWTKGRSGEALSLLKKRFSHRPVQEKFVCLNCGFETHADEQAALNIARSWLFLRSQEYKKYQTNKTTGNTDKRAFVETWQSFYRKKLKEVWKPAV

SEQ ID NO: 47054 - protein, 979 aa, synthetic construct
  REGION 1..979: note = engineered CasX variant
QEIKRINKIRRRLVKDSNTKKAGKTGPMKTLLVRVMTPDLRERLENLRKKPENIPQPISNTSRANLNKLLTDYTEMKKAILHVYWEEFQKDPVGLMSRVAQPASKKIDQNKLKPEMDEKGNLTTAGFACSQCGQPLFVYKLEQVSEKGKAYTNYFGRCNVAEHEKLIKLAQLKPEKDSDEAVTYSLGKFGQRALDFYSIHVTKESTHPVKPLAQIAGNRYASGPVGKALSDACMGTIASFLSKYQDIIIEHQKVVKGNQKRLESLRELAGKENLEYPSVTLPPQPHTKEGVDAYNEVIARVRMWVNLNLWQKLKLSRDDAKPLLRLKGFPSFPLVERQANEVDWWDMVCNVKKLINEKKEDGKVFWQNLAGYKRQEALRPYLSSEEDRKKGKKFARYQLGDLLLHLEKKHGEDWGKVYDEAWERIDKKVEGLSKHIKLEEERRSEDAQSKAALTDWLRAKASFVIEGLKEADKDEFCRCELKLQKWYGDLRGKPFAIEAENSILDISGFSKQYNCAFIWQKDGVKKLNLYLIINYFKGGKLRFKKIKPEAFEANRFYTVINKKSGEIVPMEVNFNFDDPNLIILPLAFGKRQGREFIWNDLLSLETGSLKLANGRVIEKTLYNRRTRQDEPALFVALTFERREVLDSSNIKPMNLIGVDRGENIPAVIALTDPEGCPLSRFKDSLGNPTHILRIGESYKEKQRTIQAKKEVEQRRAGGYSRKYASKAKNLADDMVRNTARDLLYYAVTQDAMLIFENLSRGFGRQGKRTFMAERQYTRMEDWLTAKLAYNGPLPSKTYLSKTLAQYTSKTCSNCGFTITSADYDRVLEKLKKTATGWMTTINGKELKVEGQITYYNRYKRQNVVKDLSVELDRLSEESVNNDISSWTKGRSGEALSLLKKRFSHRPVQEKFVCLNCGFETHADEQAALNIARSWLFLRSQEYKKYQTNKTTGNTDKRAFVETWQSFYRKKLKEVWKPAV

SEQ ID NO: 47055 - protein, 978 aa, synthetic construct
  REGION 1..978: note = engineered CasX variant
QEIKRINKIRRRLVKDSNTKKAGKTGPMKTLLVRVMTPDLRERLENLRKKPENIPQPISNTSRANLNKLLTDYTEMKKAILHVYWEEFQKDPVGLMSRVAQPASKKIDQNKLKPEMDEKGNLTTAGFACSQCGQPLFVYKLEQVSEKGKAYTNYFGRCNVAEHEKLILLAQLKPEKDSDEAVTYSLGKFGQRALDFYSIHVTKESTHPVKPLAQIAGNRYASPVGKALSDACMGTIASFLSKYQDIIIEHQKVVKGNQKRLESLRELAGKENLEYPSVTLPPQPHTKEGVDAYNEVIARVRMWVNLNLWQKLKLSRDDAKPLLRLKGFPSFPLVERQANEVDWWDMVCNVKKLINEKKEDGKVFWQNLAGYKRQEALRPYLSSEEDRKKGKKFARYQLGDLLLHLEKKHGEDWGKVYDEAWERIDKKVEGLSKHIKLEEERRSEDAQSKAALTDWLRAKASFVIEGLKEADKDEFCRCELKLQKWYGDLRGKPFAIEAENSILDISGFSKQYNCAFIWQKDGVKKLNLYLIINYFKGGKLRFKKIKPEAFEANRFYTVINKKSGEIVPMEVNFNFDDPNLIILPLAFGKRQGREFIWNDLLSLETGSLKLANGRVIEKTLYNRRTRQDEPALFVALTFERREVLDSSNIKPMNLIGVDRGENIPAVIALTDPEGCPLSRFKDSLGNPTHILRIGESYKEKQRTIQAKKEVEQRRAGGYSRKYASKAKNLADDMVRNTARDLLYYAVTQDAMLIFENLSRGFGRQGKRTFMAERQYTRMEDWLTAKLAYNGPLPSKTYLSKTLAQYTSKTCSNCGFTITSADYDRVLEKLKKTATGWMTTINGKELKVEGQITYYNRYKRQNVVKDLSVELDRLSEESVNNDISSWTKGRSGEALSLLKKRFSHRPVQEKFVCLNCGFETHADEQAALNIARSWLFLRSQEYKKYQTNKTTGNTDKRAFVETWQSFYRKKLKEVWKPAV

SEQ ID NO: 47056 - protein, 979 aa, synthetic construct
  REGION 1..979: note = engineered CasX variant
QEIKRINKIRRRLVKDSNTKKAGKTGPMKTLLVRVMTPDLRERLENLRKKPENIPQPISNTSRANLNKLLTDYTEMKKAILHVYWEEFQKDPVGLMSRVAQPASKKIDQNKLKPEMDEKGNLTTAGFACSQCGQPLFVYKLEQVSEKGKAYTNYFGRCNVAEHEKLIQLAQLKPEKDSDEAVTYSLGKFGQRALDFYSIHVTKESTHPVKPLAQIAGNRYASYPVGKALSDACMGTIASFLSKYQDIIIEHQKVVKGNQKRLESLRELAGKENLEYPSVTLPPQPHTKEGVDAYNEVIARVRMWVNLNLWQKLKLSRDDAKPLLRLKGFPSFPLVERQANEVDWWDMVCNVKKLINEKKEDGKVFWQNLAGYKRQEALRPYLSSEEDRKKGKKFARYQLGDLLLHLEKKHGEDWGKVYDEAWERIDKKVEGLSKHIKLEEERRSEDAQSKAALTDWLRAKASFVIEGLKEADKDEFCRCELKLQKWYGDLRGKPFAIEAENSILDISGFSKQYNCAFIWQKDGVKKLNLYLIINYFKGGKLRFKKIKPEAFEANRFYTVINKKSGEIVPMEVNFNFDDPNLIILPLAFGKRQGREFIWNDLLSLETGSLKLANGRVIEKTLYNRRTRQDEPALFVALTFERREVLDSSNIKPMNLIGVDRGENIPAVIALTDPEGCPLSRFKDSLGNPTHILRIGESYKEKQRTIQAKKEVEQRRAGGYSRKYASKAKNLADDMVRNTARDLLYYAVTQDAMLIFENLSRGFGRQGKRTFMAERQYTRMEDWLTAKLAYEGPLPSKTYLSKTLAQYTSKTCSNCGFTITSADYDRVLEKLKKTATGWMTTINGKELKVEGQITYYNRYKRQNVVKDLSVELDRLSEESVNNDISSWTKGRSGEALSLLKKRFSHRPVQEKFVCLNCGFETHADEQAALNIARSWLFLRSQEYKKYQTNKTTGNTDKRAFVETWQSFYRKKLKEVWKPAV

SEQ ID NO: 47057 - protein, 979 aa, synthetic construct
  REGION 1..979: note = engineered CasX variant
QEIKRINKIRRRLVKDSNTKKAGKTGPMKTLLVRVMTPDLRERLENLRKKPENIPQPISNTSRANLNKLLTDYTEMKKAILHVYWEEFQKDPVGLMSRVAQPASKKIDQNKLKPEMDEKGNLTTAGFACSQCGQPLFVYKLEQVSEKGKAYTNYFGRCNVAEHEKLIQLAQLKPEKDSDEAVTYSLGKFGQRALDFYSIHVTKESTHPVKPLAQIAGNRYASHPVGKALSDACMGTIASFLSKYQDIIIEHQKVVKGNQKRLESLRELAGKENLEYPSVTLPPQPHTKEGVDAYNEVIARVRMWVNLNLWQKLKLSRDDAKPLLRLKGFPSFPLVERQANEVDWWDMVCNVKKLINEKKEDGKVFWQNLAGYKRQEALRPYLSSEEDRKKGKKFARYQLGDLLLHLEKKHGEDWGKVYDEAWERIDKKVEGLSKHIKLEEERRSEDAQSKAALTDWLRAKASFVIEGLKEADKDEFCRCELKLQKWYGDLRGKPFAIEAENSILDISGFSKQYNCAFIWQKDGVKKLNLYLIINYFKGGKLRFKKIKPEAFEANRFYTVINKKSGEIVPMEVNFNFDDPNLIILPLAFGKRQGREFIWNDLLSLETGSLKLANGRVIEKTLYNRRTRQDEPALFVALTFERREVLDSSNIKPMNLIGVDRGENIPAVIALTDPEGCPLSRFKDSLGNPTHILRIGESYKEKQRTIQAKKEVEQRRAGGYSRKYASKAKNLADDMVRNTARDLLYYAVTQDAMLIFENLSRGFGRQGKRTFMAERQYTRMEDWLTAKLAYEGPLPSKTYLSKTLAQYTSKTCSNCGFTITSADYDRVLEKLKKTATGWMTTINGKELKVEGQITYYNRYKRQNVVKDLSVELDRLSEESVNNDISSWTKGRSGEALSLLKKRFSHRPVQEKFVCLNCGFETHADEQAALNIARSWLFLRSQEYKKYQTNKTTGNTDKRAFVETWQSFYRKKLKEVWKPAV

SEQ ID NO: 47058 - protein, 979 aa, synthetic construct
  REGION 1..979: note = engineered CasX variant
QEIKRINKIRRRLVKDSNTKKAGKTGPMKTLLVRVMTPDLRERLENLRKKPENIPQPISNTSRANLNKLLTDYTEMKKAILHVYWEEFQKDPVGLMSRVAQPASKKIDQNKLKPEMDEKGNLTTAGFACSQCGQPLFVYKLEQVSEKGKAYTNYFGRCNVAEHEKLIQLAQLKPEKDSDEAVTYSLGKFGQRALDFYSIHVTKESTHPVKPLAQIAGNRYASSPVGKALSDACMGTIASFLSKYQDIIIEHQKVVKGNQKRLESLRELAGKENLEYPSVTLPPQPHTKEGVDAYNEVIARVRMWVNLNLWQKLKLSRDDAKPLLRLKGFPSFPLVERQANEVDWWDMVCNVKKLINEKKEDGKVFWQNLAGYKRQEALRPYLSSEEDRKKGKKFARYQLGDLLLHLEKKHGEDWGKVYDEAWERIDKKVEGLSKHIKLEEERRSEDAQSKAALTDWLRAKASFVIEGLKEADKDEFCRCELKLQKWYGDLRGKPFAIEAENSILDISGFSKQYNCAFIWQKDGVKKLNLYLIINYFKGGKLRFKKIKPEAFEANRFYTVINKKSGEIVPMEVNFNFDDPNLIILPLAFGKRQGREFIWNDLLSLETGSLKLANGRVIEKTLYNRRTRQDEPALFVALTFERREVLDSSNIKPMNLIGVDRGENIPAVIALTDPEGCPLSRFKDSLGNPTHILRIGESYKEKQRTIQAKKEVEQRRAGGYSRKYASKAKNLADDMVRNTARDLLYYAVTQDAMLIFENLSRGFGRQGKRTFMAERQYTRMEDWLTAKLAYEGPLPSKTYLSKTLAQYTSKTCSNCGFTITSADYDRVLEKLKKTATGWMTTINGKELKVEGQITYYNRYKRQNVVKDLSVELDRLSEESVNNDISSWTKGRSGEALSLLKKRFSHRPVQEKFVCLNCGFETHADEQAALNIARSWLFLRSQEYKKYQTNKTTGNTDKRAFVETWQSFYRKKLKEVWKPAV

SEQ ID NO: 47059 - protein, 979 aa, synthetic construct
  REGION 1..979: note = engineered CasX variant
QEIKRINKIRRRLVKDSNTKKAGKTGPMKTLLVRVMTPDLRERLENLRKKPENIPQPISNTSRANLNKLLTDYTEMKKAILHVYWEEFQKDPVGLMSRVAQPASKKIDQNKLKPEMDEKGNLTTAGFACSQCGQPLFVYKLEQVSEKGKAYTNYFGRCNVAEHEKLIQLAQLKPEKDSDEAVTYSLGKFGQRALDFYSIHVTKESTHPVKPLAQIAGNRYASTPVGKALSDACMGTIASFLSKYQDIIIEHQKVVKGNQKRLESLRELAGKENLEYPSVTLPPQPHTKEGVDAYNEVIARVRMWVNLNLWQKLKLSRDDAKPLLRLKGFPSFPLVERQANEVDWWDMVCNVKKLINEKKEDGKVFWQNLAGYKRQEALRPYLSSEEDRKKGKKFARYQLGDLLLHLEKKHGEDWGKVYDEAWERIDKKVEGLSKHIKLEEERRSEDAQSKAALTDWLRAKASFVIEGLKEADKDEFCRCELKLQKWYGDLRGKPFAIEAENSILDISGFSKQYNCAFIWQKDGVKKLNLYLIINYFKGGKLRFKKIKPEAFEANRFYTVINKKSGEIVPMEVNFNFDDPNLIILPLAFGKRQGREFIWNDLLSLETGSLKLANGRVIEKTLYNRRTRQDEPALFVALTFERREVLDSSNIKPMNLIGVDRGENIPAVIALTDPEGCPLSRFKDSLGNPTHILRIGESYKEKQRTIQAKKEVEQRRAGGYSRKYASKAKNLADDMVRNTARDLLYYAVTQDAMLIFENLSRGFGRQGKRTFMAERQYTRMEDWLTAKLAYEGPLPSKTYLSKTLAQYTSKTCSNCGFTITSADYDRVLEKLKKTATGWMTTINGKELKVEGQITYYNRYKRQNVVKDLSVELDRLSEESVNNDISSWTKGRSGEALSLLKKRFSHRPVQEKFVCLNCGFETHADEQAALNIARSWLFLRSQEYKKYQTNKTTGNTDKRAFVETWQSFYRKKLKEVWKPAV

SEQ ID NO: 47060 - protein, 979 aa, synthetic construct
  REGION 1..979: note = engineered CasX variant
QEIKRINKIRRRLVKDSNTKKAGKTGPMKTLLVRVMTPDLRERLENLRKKPENIPQPISNTSRANLNKLLTDYTEMKKAILHVYWEEFQKDPVGLMSRVAQPASKKIDQNKLKPEMDEKGNLTTAGFACSQCGQPLFVYKLEQVSEKGKAYTNYFGRCNVAEHEKLIQLAQLKPEKDSDEAVTYSLGKFGQRALDFYSIHVTKESTHPVKPLAQIAGNRYASAPVGKALSDACMGTIASFLSKYQDIIIEHQKVVKGNQKRLESLRELAGKENLEYPSVTLPPQPHTKEGVDAYNEVIARVRMWVNLNLWQKLKLSRDDAKPLLRLKGFPSFPLVERQANEVDWWDMVCNVKKLINEKKEDGKVFWQNLAGYKRQEALRPYLSSEEDRKKGKKFARYQLGDLLLHLEKKHGEDWGKVYDEAWERIDKKVEGLSKHIKLEEERRSEDAQSKAALTDWLRAKASFVIEGLKEADKDEFCRCELKLQKWYGDLRGKPFAIEAENSILDISGFSKQYNCAFIWQKDGVKKLNLYLIINYFKGGKLRFKKIKPEAFEANRFYTVINKKSGEIVPMEVNFNFDDPNLIILPLAFGKRQGREFIWNDLLSLETGSLKLANGRVIEKTLYNRRTRQDEPALFVALTFERREVLDSSNIKPMNLIGVDRGENIPAVIALTDPEGCPLSRFKDSLGNPTHILRIGESYKEKQRTIQAKKEVEQRRAGGYSRKYASKAKNLADDMVRNTARDLLYYAVTQDAMLIFENLSRGFGRQGKRTFMAERQYTRMEDWLTAKLAYEGPLPSKTYLSKTLAQYTSKTCSNCGFTITSADYDRVLEKLKKTATGWMTTINGKELKVEGQITYYNRYKRQNVVKDLSVELDRLSEESVNNDISSWTKGRSGEALSLLKKRFSHRPVQEKFVCLNCGFETHADEQAALNIARSWLFLRSQEYKKYQTNKTTGNTDKRAFVETWQSFYRKKLKEVWKPAV

SEQ ID NO: 47061 - protein, 979 aa, synthetic construct
  REGION 1..979: note = engineered CasX variant
QEIKRINKIRRRLVKDSNTKKAGKTGPMKTLLVRVMTPDLRERLENLRKKPENIPQPISNTSRANLNKLLTDYTEMKKAILHVYWEEFQKDPVGLMSRVAQPASKKIDQNKLKPEMDEKGNLTTAGFACSQCGQPLFVYKLEQVSEKGKAYTNYFGRCNVAEHEKLIQLAQLKPEKDSDEAVTYSLGKFGQRALDFYSIHVTKESTHPVKPLAQIAGNRYASVPVGKALSDACMGTIASFLSKYQDIIIEHQKVVKGNQKRLESLRELAGKENLEYPSVTLPPQPHTKEGVDAYNEVIARVRMWVNLNLWQKLKLSRDDAKPLLRLKGFPSFPLVERQANEVDWWDMVCNVKKLINEKKEDGKVFWQNLAGYKRQEALRPYLSSEEDRKKGKKFARYQLGDLLLHLEKKHGEDWGKVYDEAWERIDKKVEGLSKHIKLEEERRSEDAQSKAALTDWLRAKASFVIEGLKEADKDEFCRCELKLQKWYGDLRGKPFAIEAENSILDISGFSKQYNCAFIWQKDGVKKLNLYLIINYFKGGKLRFKKIKPEAFEANRFYTVINKKSGEIVPMEVNFNFDDPNLIILPLAFGKRQGREFIWNDLLSLETGSLKLANGRVIEKTLYNRRTRQDEPALFVALTFERREVLDSSNIKPMNLIGVDRGENIPAVIALTDPEGCPLSRFKDSLGNPTHILRIGESYKEKQRTIQAKKEVEQRRAGGYSRKYASKAKNLADDMVRNTARDLLYYAVTQDAMLIFENLSRGFGRQGKRTFMAERQYTRMEDWLTAKLAYEGPLPSKTYLSKTLAQYTSKTCSNCGFTITSADYDRVLEKLKKTATGWMTTINGKELKVEGQITYYNRYKRQNVVKDLSVELDRLSEESVNNDISSWTKGRSGEALSLLKKRFSHRPVQEKFVCLNCGFETHADEQAALNIARSWLFLRSQEYKKYQTNKTTGNTDKRAFVETWQSFYRKKLKEVWKPAV

SEQ ID NO: 47062 - protein, 980 aa, synthetic construct
  REGION 1..980: note = engineered CasX variant
QEIKRINKIRRRLVKDSNTKKAGKTGPMKTLLVRVMTPDLRERLENLRKKPENIPQPISNTSRANLNKLLTDYTEMKKAILHVYWEEFQKDPVGLMSRVAQPASKKIDQNKLKPEMDEKGNLTTAGFACSQCGQPLFVYKLEQVSEKGKAYTNYFGRCNVAEHEKLIQKLAQLKPEKDSDEAVTYSLGKFGQRALDFYSIHVTKESTHPVKPLAQIAGNRYASGPVGKALSDACMGTIASFLSKYQDIIIEHQKVVKGNQKRLESLRELAGKENLEYPSVTLPPQPHTKEGVDAYNEVIARVRMWVNLNLWQKLKLSRDDAKPLLRLKGFPSFPLVERQANEVDWWDMVCNVKKLINEKKEDGKVFWQNLAGYKRQEALRPYLSSEEDRKKGKKFARYQLGDLLLHLEKKHGEDWGKVYDEAWERIDKKVEGLSKHIKLEEERRSEDAQSKAALTDWLRAKASFVIEGLKEADKDEFCRCELKLQKWYGDLRGKPFAIEAENSILDISGFSKQYNCAFIWQKDGVKKLNLYLIINYFKGGKLRFKKIKPEAFEANRFYTVINKKSGEIVPMEVNFNFDDPNLIILPLAFGKRQGREFIWNDLLSLETGSLKLANGRVIEKTLYNRRTRQDEPALFVALTFERREVLDSSNIKPMNLIGVDRGENIPAVIALTDPEGCPLSRFKDSLGNPTHILRIGESYKEKQRTIQAKKEVEQRRAGGYSRKYASKAKNLADDMVRNTARDLLYYAVTQDAMLIFENLSRGFGRQGKRTFMAERQYTRMEDWLTAKLAYEGPLPSKTYLSKTLAQYTSKTCSNCGFTITSADYDRVLEKLKKTATGWMTTINGKELKVEGQITYYNRYKRQNVVKDLSVELDRLSEESVNNDISSWTKGRSGEALSLLKKRFSHRPVQEKFVCLNCGFETHADEQAALNIARSWLFLRSQEYKKYQTNKTTGNTDKRAFVETWQSFYRKKLKEVWKPAV

SEQ ID NO: 47063 - protein, 978 aa, synthetic construct
  REGION 1..978: note = engineered CasX variant
QEIKRINKIRRRLVKDSNTKKAGKTGPMKTLLVRVMTPDLRERLENLRKKPENIPQPISNTSRANLNKLLTDYTEMKKAILHVYWEEFQKDPVGLMSRVAQPASKKIDQNKLKPEMDEKGNLTTAGFACSQCGQPLFVYKLEQVSEKGKAYTNYFGRCNVAEHEKLIQLAQLKPEKDSDEAVTYSLGKFGQRALDFYSIHVTKESTHPVKPLAQIAGNRYASPVGKALSDACMGTIASFLSKYQDIIIEHQKVVKGNQKRLESLRELAGKENLEYPSVTLPPQPHTKEGVDAYNEVIARVRMWVNLNLWQKLKLSRDDAKPLLRLKGFPSFPLVERQANEVDWWDMVCNVKKLINEKKEDGKVFWQNLAGYKRQEALRPYLSSEEDRKKGKKFARYQLGDLLLHLEKKHGEDWGKVYDEAWERIDKKVEGLSKHIKLEEERRSEDAQSKAALTDWLRAKASFVIEGLKEADKDEFCRCELKLQKWYGDLRGKPFAIEAENSILDISGFSKQYNCAFIWQKDGVKKLNLYLIINYFKGGKLRFKKIKPEAFEANRFYTVINKKSGEIVPMEVNFNFDDPNLIILPLAFGKRQGREFIWNDLLSLETGSLKLANGRVIEKTLYNRRTRQDEPALFVALTFERREVLDSSNIKPMNLIGVDRGENIPAVIALTDPEGCPLSRFKDSLGNPTHILRIGESYKEKQRTIQAKKEVEQRRAGGYSRKYASKAKNLADDMVRNTARDLLYYAVTQDAMLIFENLSRGFGRQGKRTFMAERQYTRMEDWLTAKLAYEGPLPSKTYLSKTLAQYTSKTCSNCGFTITSADYDRVLEKLKKTATGWMTTINGKELKVEGQITYYNRYKRQNVVKDLSVELDRLSEESVNNDISSWTKGRSGEALSLLKKRFSHRPVQEKFVCLNCGFETHADEQAALNIARSWLFLRSQEYKKYQTNKTTGNTDKRAFVETWQSFYRKKLKEVWKPAV

SEQ ID NO: 47064 - protein, 979 aa, synthetic construct
  REGION 1..979: note = engineered CasX variant
QEIKRINKIRRRLVKDSNTKKAGKTGPMKTLLVRVMTPDLRERLENLRKKPENIPQPISNTSRANLNKLLTDYTEMKKAILHVYWEEFQKDPVGLMSRVAQPASKKIDQNKLKPEMDEKGNLTTAGFACSQCGQPLFVYKLEQVSEKGKAYTNYFGRCNVAEHEKLILLAQLKPEKDSDEAVTYSLGKFGQRALDFYSIHVTKESTHPVKPLAQIAGNRYASYPVGKALSDACMGTIASFLSKYQDIIIEHQKVVKGNQKRLESLRELAGKENLEYPSVTLPPQPHTKEGVDAYNEVIARVRMWVNLNLWQKLKLSRDDAKPLLRLKGFPSFPLVERQANEVDWWDMVCNVKKLINEKKEDGKVFWQNLAIYKRQEALRPYLSSEEDRKKGKKFARYQLGDLLLHLEKKHGEDWGKVYDEAWERIDKKVEGLSKHIKLEEERRSEDAQSKAALTDWLRAKASFVIEGLKEADKDEFCRCELKLQKWYGDLRGKPFAIEAENSILDISGFSKQYNCAFIWQKDGVKKLNLYLIINYFKGGKLRFKKIKPEAFEANRFYTVINKKSGEIVPMEVNFNFDDPNLIILPLAFGKRQGREFIWNDLLSLETGSLKLANGRVIEKTLYNRRTRQDEPALFVALTFERREVLDSSNIKPMNLIGVDRGENIPAVIALTDPEGCPLSRFKDSLGNPTHILRIGESYKEKQRTIQAKKEVEQRRAGGYSRKYASKAKNLADDMVRNTARDLLYYAVTQDAMLIFENLSRGFGRQGKRTFMAERQYTRMEDWLTAKLAYEGPLPSKTYLSKTLAQYTSKTCSNCGFTITSADYDRVLEKLKKTATGWMTTINGKELKVEGQITYYNRYKRQNVVKDLSVELDRLSEESVNNDISSWTKGRSGEALSLLKKRFSHRPVQEKFVCLNCGFETHADEQAALNIARSWLFLRSQEYKKYQTNKTTGNTDKRAFVETWQSFYRKKLKEVWKPAV

SEQ ID NO: 47065 - protein, 979 aa, synthetic construct
  REGION 1..979: note = engineered CasX variant
QEIKRINKIRRRLVKDSNTKKAGKTGPMKTLLVRVMTPDLRERLENLRKKPENIPQPISNTSRANLNKLLTDYTEMKKAILHVYWEEFQKDPVGLMSRVAQPASKKIDQNKLKPEMDEKGNLTTAGFACSQCGQPLFVYKLEQVSEKGKAYTNYFGRCNVAEHEKLILLAQLKPEKDSDEAVTYSLGKFGQRALDFYSIHVTKESTHPVKPLAQIAGNRYASHPVGKALSDACMGTIASFLSKYQDIIIEHQKVVKGNQKRLESLRELAGKENLEYPSVTLPPQPHTKEGVDAYNEVIARVRMWVNLNLWQKLKLSRDDAKPLLRLKGFPSFPLVERQANEVDWWDMVCNVKKLINEKKEDGKVFWQNLAIYKRQEALRPYLSSEEDRKKGKKFARYQLGDLLLHLEKKHGEDWGKVYDEAWERIDKKVEGLSKHIKLEEERRSEDAQSKAALTDWLRAKASFVIEGLKEADKDEFCRCELKLQKWYGDLRGKPFAIEAENSILDISGFSKQYNCAFIWQKDGVKKLNLYLIINYFKGGKLRFKKIKPEAFEANRFYTVINKKSGEIVPMEVNFNFDDPNLIILPLAFGKRQGREFIWNDLLSLETGSLKLANGRVIEKTLYNRRTRQDEPALFVALTFERREVLDSSNIKPMNLIGVDRGENIPAVIALTDPEGCPLSRFKDSLGNPTHILRIGESYKEKQRTIQAKKEVEQRRAGGYSRKYASKAKNLADDMVRNTARDLLYYAVTQDAMLIFENLSRGFGRQGKRTFMAERQYTRMEDWLTAKLAYEGPLPSKTYLSKTLAQYTSKTCSNCGFTITSADYDRVLEKLKKTATGWMTTINGKELKVEGQITYYNRYKRQNVVKDLSVELDRLSEESVNNDISSWTKGRSGEALSLLKKRFSHRPVQEKFVCLNCGFETHADEQAALNIARSWLFLRSQEYKKYQTNKTTGNTDKRAFVETWQSFYRKKLKEVWKPAV

SEQ ID NO: 47066 - protein, 979 aa, synthetic construct
  REGION 1..979: note = engineered CasX variant
QEIKRINKIRRRLVKDSNTKKAGKTGPMKTLLVRVMTPDLRERLENLRKKPENIPQPISNTSRANLNKLLTDYTEMKKAILHVYWEEFQKDPVGLMSRVAQPASKKIDQNKLKPEMDEKGNLTTAGFACSQCGQPLFVYKLEQVSEKGKAYTNYFGRCNVAEHEKLILLAQLKPEKDSDEAVTYSLGKFGQRALDFYSIHVTKESTHPVKPLAQIAGNRYASSPVGKALSDACMGTIASFLSKYQDIIIEHQKVVKGNQKRLESLRELAGKENLEYPSVTLPPQPHTKEGVDAYNEVIARVRMWVNLNLWQKLKLSRDDAKPLLRLKGFPSFPLVERQANEVDWWDMVCNVKKLINEKKEDGKVFWQNLAIYKRQEALRPYLSSEEDRKKGKKFARYQLGDLLLHLEKKHGEDWGKVYDEAWERIDKKVEGLSKHIKLEEERRSEDAQSKAALTDWLRAKASFVIEGLKEADKDEFCRCELKLQKWYGDLRGKPFAIEAENSILDISGFSKQYNCAFIWQKDGVKKLNLYLIINYFKGGKLRFKKIKPEAFEANRFYTVINKKSGEIVPMEVNFNFDDPNLIILPLAFGKRQGREFIWNDLLSLETGSLKLANGRVIEKTLYNRRTRQDEPALFVALTFERREVLDSSNIKPMNLIGVDRGENIPAVIALTDPEGCPLSRFKDSLGNPTHILRIGESYKEKQRTIQAKKEVEQRRAGGYSRKYASKAKNLADDMVRNTARDLLYYAVTQDAMLIFENLSRGFGRQGKRTFMAERQYTRMEDWLTAKLAYEGPLPSKTYLSKTLAQYTSKTCSNCGFTITSADYDRVLEKLKKTATGWMTTINGKELKVEGQITYYNRYKRQNVVKDLSVELDRLSEESVNNDISSWTKGRSGEALSLLKKRFSHRPVQEKFVCLNCGFETHADEQAALNIARSWLFLRSQEYKKYQTNKTTGNTDKRAFVETWQSFYRKKLKEVWKPAV

SEQ ID NO: 47067 - protein, 979 aa, synthetic construct
  REGION 1..979: note = engineered CasX variant
QEIKRINKIRRRLVKDSNTKKAGKTGPMKTLLVRVMTPDLRERLENLRKKPENIPQPISNTSRANLNKLLTDYTEMKKAILHVYWEEFQKDPVGLMSRVAQPASKKIDQNKLKPEMDEKGNLTTAGFACSQCGQPLFVYKLEQVSEKGKAYTNYFGRCNVAEHEKLILLAQLKPEKDSDEAVTYSLGKFGQRALDFYSIHVTKESTHPVKPLAQIAGNRYASTPVGKALSDACMGTIASFLSKYQDIIIEHQKVVKGNQKRLESLRELAGKENLEYPSVTLPPQPHTKEGVDAYNEVIARVRMWVNLNLWQKLKLSRDDAKPLLRLKGFPSFPLVERQANEVDWWDMVCNVKKLINEKKEDGKVFWQNLAIYKRQEALRPYLSSEEDRKKGKKFARYQLGDLLLHLEKKHGEDWGKVYDEAWERIDKKVEGLSKHIKLEEERRSEDAQSKAALTDWLRAKASFVIEGLKEADKDEFCRCELKLQKWYGDLRGKPFAIEAENSILDISGFSKQYNCAFIWQKDGVKKLNLYLIINYFKGGKLRFKKIKPEAFEANRFYTVINKKSGEIVPMEVNFNFDDPNLIILPLAFGKRQGREFIWNDLLSLETGSLKLANGRVIEKTLYNRRTRQDEPALFVALTFERREVLDSSNIKPMNLIGVDRGENIPAVIALTDPEGCPLSRFKDSLGNPTHILRIGESYKEKQRTIQAKKEVEQRRAGGYSRKYASKAKNLADDMVRNTARDLLYYAVTQDAMLIFENLSRGFGRQGKRTFMAERQYTRMEDWLTAKLAYEGPLPSKTYLSKTLAQYTSKTCSNCGFTITSADYDRVLEKLKKTATGWMTTINGKELKVEGQITYYNRYKRQNVVKDLSVELDRLSEESVNNDISSWTKGRSGEALSLLKKRFSHRPVQEKFVCLNCGFETHADEQAALNIARSWLFLRSQEYKKYQTNKTTGNTDKRAFVETWQSFYRKKLKEVWKPAV

SEQ ID NO: 47068 - protein, 979 aa, synthetic construct
  REGION 1..979: note = engineered CasX variant
QEIKRINKIRRRLVKDSNTKKAGKTGPMKTLLVRVMTPDLRERLENLRKKPENIPQPISNTSRANLNKLLTDYTEMKKAILHVYWEEFQKDPVGLMSRVAQPASKKIDQNKLKPEMDEKGNLTTAGFACSQCGQPLFVYKLEQVSEKGKAYTNYFGRCNVAEHEKLILLAQLKPEKDSDEAVTYSLGKFGQRALDFYSIHVTKESTHPVKPLAQIAGNRYASAPVGKALSDACMGTIASFLSKYQDIIIEHQKVVKGNQKRLESLRELAGKENLEYPSVTLPPQPHTKEGVDAYNEVIARVRMWVNLNLWQKLKLSRDDAKPLLRLKGFPSFPLVERQANEVDWWDMVCNVKKLINEKKEDGKVFWQNLAIYKRQEALRPYLSSEEDRKKGKKFARYQLGDLLLHLEKKHGEDWGKVYDEAWERIDKKVEGLSKHIKLEEERRSEDAQSKAALTDWLRAKASFVIEGLKEADKDEFCRCELKLQKWYGDLRGKPFAIEAENSILDISGFSKQYNCAFIWQKDGVKKLNLYLIINYFKGGKLRFKKIKPEAFEANRFYTVINKKSGEIVPMEVNFNFDDPNLIILPLAFGKRQGREFIWNDLLSLETGSLKLANGRVIEKTLYNRRTRQDEPALFVALTFERREVLDSSNIKPMNLIGVDRGENIPAVIALTDPEGCPLSRFKDSLGNPTHILRIGESYKEKQRTIQAKKEVEQRRAGGYSRKYASKAKNLADDMVRNTARDLLYYAVTQDAMLIFENLSRGFGRQGKRTFMAERQYTRMEDWLTAKLAYEGPLPSKTYLSKTLAQYTSKTCSNCGFTITSADYDRVLEKLKKTATGWMTTINGKELKVEGQITYYNRYKRQNVVKDLSVELDRLSEESVNNDISSWTKGRSGEALSLLKKRFSHRPVQEKFVCLNCGFETHADEQAALNIARSWLFLRSQEYKKYQTNKTTGNTDKRAFVETWQSFYRKKLKEVWKPAV

SEQ ID NO: 47069 - protein, 979 aa, synthetic construct
  REGION 1..979: note = engineered CasX variant
QEIKRINKIRRRLVKDSNTKKAGKTGPMKTLLVRVMTPDLRERLENLRKKPENIPQPISNTSRANLNKLLTDYTEMKKAILHVYWEEFQKDPVGLMSRVAQPASKKIDQNKLKPEMDEKGNLTTAGFACSQCGQPLFVYKLEQVSEKGKAYTNYFGRCNVAEHEKLILLAQLKPEKDSDEAVTYSLGKFGQRALDFYSIHVTKESTHPVKPLAQIAGNRYASVPVGKALSDACMGTIASFLSKYQDIIIEHQKVVKGNQKRLESLRELAGKENLEYPSVTLPPQPHTKEGVDAYNEVIARVRMWVNLNLWQKLKLSRDDAKPLLRLKGFPSFPLVERQANEVDWWDMVCNVKKLINEKKEDGKVFWQNLAIYKRQEALRPYLSSEEDRKKGKKFARYQLGDLLLHLEKKHGEDWGKVYDEAWERIDKKVEGLSKHIKLEEERRSEDAQSKAALTDWLRAKASFVIEGLKEADKDEFCRCELKLQKWYGDLRGKPFAIEAENSILDISGFSKQYNCAFIWQKDGVKKLNLYLIINYFKGGKLRFKKIKPEAFEANRFYTVINKKSGEIVPMEVNFNFDDPNLIILPLAFGKRQGREFIWNDLLSLETGSLKLANGRVIEKTLYNRRTRQDEPALFVALTFERREVLDSSNIKPMNLIGVDRGENIPAVIALTDPEGCPLSRFKDSLGNPTHILRIGESYKEKQRTIQAKKEVEQRRAGGYSRKYASKAKNLADDMVRNTARDLLYYAVTQDAMLIFENLSRGFGRQGKRTFMAERQYTRMEDWLTAKLAYEGPLPSKTYLSKTLAQYTSKTCSNCGFTITSADYDRVLEKLKKTATGWMTTINGKELKVEGQITYYNRYKRQNVVKDLSVELDRLSEESVNNDISSWTKGRSGEALSLLKKRFSHRPVQEKFVCLNCGFETHADEQAALNIARSWLFLRSQEYKKYQTNKTTGNTDKRAFVETWQSFYRKKLKEVWKPAV

SEQ ID NO: 47070 - protein, 979 aa, synthetic construct
  REGION 1..979: note = engineered CasX variant
QEIKRINKIRRRLVKDSNTKKAGKTGPMKTLLVRVMTPDLRERLENLRKKPENIPQPISNTSRANLNKLLTDYTEMKKAILHVYWEEFQKDPVGLMSRVAQPASKKIDQNKLKPEMDEKGNLTTAGFACSQCGQPLFVYKLEQVSEKGKAYTNYFGRCNVAEHEKLIKLAQLKPEKDSDEAVTYSLGKFGQRALDFYSIHVTKESTHPVKPLAQIAGNRYASGPVGKALSDACMGTIASFLSKYQDIIIEHQKVVKGNQKRLESLRELAGKENLEYPSVTLPPQPHTKEGVDAYNEVIARVRMWVNLNLWQKLKLSRDDAKPLLRLKGFPSFPLVERQANEVDWWDMVCNVKKLINEKKEDGKVFWQNLAIYKRQEALRPYLSSEEDRKKGKKFARYQLGDLLLHLEKKHGEDWGKVYDEAWERIDKKVEGLSKHIKLEEERRSEDAQSKAALTDWLRAKASFVIEGLKEADKDEFCRCELKLQKWYGDLRGKPFAIEAENSILDISGFSKQYNCAFIWQKDGVKKLNLYLIINYFKGGKLRFKKIKPEAFEANRFYTVINKKSGEIVPMEVNFNFDDPNLIILPLAFGKRQGREFIWNDLLSLETGSLKLANGRVIEKTLYNRRTRQDEPALFVALTFERREVLDSSNIKPMNLIGVDRGENIPAVIALTDPEGCPLSRFKDSLGNPTHILRIGESYKEKQRTIQAKKEVEQRRAGGYSRKYASKAKNLADDMVRNTARDLLYYAVTQDAMLIFENLSRGFGRQGKRTFMAERQYTRMEDWLTAKLAYEGPLPSKTYLSKTLAQYTSKTCSNCGFTITSADYDRVLEKLKKTATGWMTTINGKELKVEGQITYYNRYKRQNVVKDLSVELDRLSEESVNNDISSWTKGRSGEALSLLKKRFSHRPVQEKFVCLNCGFETHADEQAALNIARSWLFLRSQEYKKYQTNKTTGNTDKRAFVETWQSFYRKKLKEVWKPAV

SEQ ID NO: 47071 - protein, 978 aa, synthetic construct
  REGION 1..978: note = engineered CasX variant
QEIKRINKIRRRLVKDSNTKKAGKTGPMKTLLVRVMTPDLRERLENLRKKPENIPQPISNTSRANLNKLLTDYTEMKKAILHVYWEEFQKDPVGLMSRVAQPASKKIDQNKLKPEMDEKGNLTTAGFACSQCGQPLFVYKLEQVSEKGKAYTNYFGRCNVAEHEKLILLAQLKPEKDSDEAVTYSLGKFGQRALDFYSIHVTKESTHPVKPLAQIAGNRYASPVGKALSDACMGTIASFLSKYQDIIIEHQKVVKGNQKRLESLRELAGKENLEYPSVTLPPQPHTKEGVDAYNEVIARVRMWVNLNLWQKLKLSRDDAKPLLRLKGFPSFPLVERQANEVDWWDMVCNVKKLINEKKEDGKVFWQNLAIYKRQEALRPYLSSEEDRKKGKKFARYQLGDLLLHLEKKHGEDWGKVYDEAWERIDKKVEGLSKHIKLEEERRSEDAQSKAALTDWLRAKASFVIEGLKEADKDEFCRCELKLQKWYGDLRGKPFAIEAENSILDISGFSKQYNCAFIWQKDGVKKLNLYLIINYFKGGKLRFKKIKPEAFEANRFYTVINKKSGEIVPMEVNFNFDDPNLIILPLAFGKRQGREFIWNDLLSLETGSLKLANGRVIEKTLYNRRTRQDEPALFVALTFERREVLDSSNIKPMNLIGVDRGENIPAVIALTDPEGCPLSRFKDSLGNPTHILRIGESYKEKQRTIQAKKEVEQRRAGGYSRKYASKAKNLADDMVRNTARDLLYYAVTQDAMLIFENLSRGFGRQGKRTFMAERQYTRMEDWLTAKLAYEGPLPSKTYLSKTLAQYTSKTCSNCGFTITSADYDRVLEKLKKTATGWMTTINGKELKVEGQITYYNRYKRQNVVKDLSVELDRLSEESVNNDISSWTKGRSGEALSLLKKRFSHRPVQEKFVCLNCGFETHADEQAALNIARSWLFLRSQEYKKYQTNKTTGNTDKRAFVETWQSFYRKKLKEVWKPAV

SEQ ID NO: 47072 - protein, 979 aa, synthetic construct
  REGION 1..979: note = engineered CasX variant
QEIKRINKIRRRLVKDSNTKKAGKTGPMKTLLVRVMTPDLRERLENLRKKPENIPQPISNTSRANLNKLLTDYTEMKKAILHVYWEEFQKDPVGLMSRVAQPASKKIDQNKLKPEMDEKGNLTTAGFACSQCGQPLFVYKLEQVSEKGKAYTNYFGRCNVAEHEKLILLAQLKPEKDSDEAVTYSLGKFGQRALDFYSIHVTKESTHPVKPLAQIAGNRYASYPVGKALSDACMGTIASFLSKYQDIIIEHQKVVKGNQKRLESLRELAGKENLEYPSVTLPPQPHTKEGVDAYNEVIARVRMWVNLNLWQKLKLSRDDAKPLLRLKGFPSFPLVERQANEVDWWDMVCNVKKLINEKKEDGKVFWQNLAGYKRQEALRPYLSSEEDREKGKKFARYQLGDLLLHLEKKHGEDWGKVYDEAWERIDKKVEGLSKHIKLEEERRSEDAQSKAALTDWLRAKASFVIEGLKEADKDEFCRCELKLQKWYGDLRGKPFAIEAENSILDISGFSKQYNCAFIWQKDGVKKLNLYLIINYFKGGKLRFKKIKPEAFEANRFYTVINKKSGEIVPMEVNFNFDDPNLIILPLAFGKRQGREFIWNDLLSLETGSLKLANGRVIEKTLYNRRTRQDEPALFVALTFERREVLDSSNIKPMNLIGVDRGENIPAVIALTDPEGCPLSRFKDSLGNPTHILRIGESYKEKQRTIQAKKEVEQRRAGGYSRKYASKAKNLADDMVRNTARDLLYYAVTQDAMLIFENLSRGFGRQGKRTFMAERQYTRMEDWLTAKLAYEGPLPSKTYLSKTLAQYTSKTCSNCGFTITSADYDRVLEKLKKTATGWMTTINGKELKVEGQITYYNRYKRQNVVKDLSVELDRLSEESVNNDISSWTKGRSGEALSLLKKRFSHRPVQEKFVCLNCGFETHADEQAALNIARSWLFLRSQEYKKYQTNKTTGNTDKRAFVETWQSFYRKKLKEVWKPAV

SEQ ID NO: 47073 - protein, 979 aa, synthetic construct
  REGION 1..979: note = engineered CasX variant
QEIKRINKIRRRLVKDSNTKKAGKTGPMKTLLVRVMTPDLRERLENLRKKPENIPQPISNTSRANLNKLLTDYTEMKKAILHVYWEEFQKDPVGLMSRVAQPASKKIDQNKLKPEMDEKGNLTTAGFACSQCGQPLFVYKLEQVSEKGKAYTNYFGRCNVAEHEKLILLAQLKPEKDSDEAVTYSLGKFGQRALDFYSIHVTKESTHPVKPLAQIAGNRYASHPVGKALSDACMGTIASFLSKYQDIIIEHQKVVKGNQKRLESLRELAGKENLEYPSVTLPPQPHTKEGVDAYNEVIARVRMWVNLNLWQKLKLSRDDAKPLLRLKGFPSFPLVERQANEVDWWDMVCNVKKLINEKKEDGKVFWQNLAGYKRQEALRPYLSSEEDREKGKKFARYQLGDLLLHLEKKHGEDWGKVYDEAWERIDKKVEGLSKHIKLEEERRSEDAQSKAALTDWLRAKASFVIEGLKEADKDEFCRCELKLQKWYGDLRGKPFAIEAENSILDISGFSKQYNCAFIWQKDGVKKLNLYLIINYFKGGKLRFKKIKPEAFEANRFYTVINKKSGEIVPMEVNFNFDDPNLIILPLAFGKRQGREFIWNDLLSLETGSLKLANGRVIEKTLYNRRTRQDEPALFVALTFERREVLDSSNIKPMNLIGVDRGENIPAVIALTDPEGCPLSRFKDSLGNPTHILRIGESYKEKQRTIQAKKEVEQRRAGGYSRKYASKAKNLADDMVRNTARDLLYYAVTQDAMLIFENLSRGFGRQGKRTFMAERQYTRMEDWLTAKLAYEGPLPSKTYLSKTLAQYTSKTCSNCGFTITSADYDRVLEKLKKTATGWMTTINGKELKVEGQITYYNRYKRQNVVKDLSVELDRLSEESVNNDISSWTKGRSGEALSLLKKRFSHRPVQEKFVCLNCGFETHADEQAALNIARSWLFLRSQEYKKYQTNKTTGNTDKRAFVETWQSFYRKKLKEVWKPAV

SEQ ID NO: 47074 - protein, 979 aa, synthetic construct
  REGION 1..979: note = engineered CasX variant
QEIKRINKIRRRLVKDSNTKKAGKTGPMKTLLVRVMTPDLRERLENLRKKPENIPQPISNTSRANLNKLLTDYTEMKKAILHVYWEEFQKDPVGLMSRVAQPASKKIDQNKLKPEMDEKGNLTTAGFACSQCGQPLFVYKLEQVSEKGKAYTNYFGRCNVAEHEKLILLAQLKPEKDSDEAVTYSLGKFGQRALDFYSIHVTKESTHPVKPLAQIAGNRYASSPVGKALSDACMGTIASFLSKYQDIIIEHQKVVKGNQKRLESLRELAGKENLEYPSVTLPPQPHTKEGVDAYNEVIARVRMWVNLNLWQKLKLSRDDAKPLLRLKGFPSFPLVERQANEVDWWDMVCNVKKLINEKKEDGKVFWQNLAGYKRQEALRPYLSSEEDREKGKKFARYQLGDLLLHLEKKHGEDWGKVYDEAWERIDKKVEGLSKHIKLEEERRSEDAQSKAALTDWLRAKASFVIEGLKEADKDEFCRCELKLQKWYGDLRGKPFAIEAENSILDISGFSKQYNCAFIWQKDGVKKLNLYLIINYFKGGKLRFKKIKPEAFEANRFYTVINKKSGEIVPMEVNFNFDDPNLIILPLAFGKRQGREFIWNDLLSLETGSLKLANGRVIEKTLYNRRTRQDEPALFVALTFERREVLDSSNIKPMNLIGVDRGENIPAVIALTDPEGCPLSRFKDSLGNPTHILRIGESYKEKQRTIQAKKEVEQRRAGGYSRKYASKAKNLADDMVRNTARDLLYYAVTQDAMLIFENLSRGFGRQGKRTFMAERQYTRMEDWLTAKLAYEGPLPSKTYLSKTLAQYTSKTCSNCGFTITSADYDRVLEKLKKTATGWMTTINGKELKVEGQITYYNRYKRQNVVKDLSVELDRLSEESVNNDISSWTKGRSGEALSLLKKRFSHRPVQEKFVCLNCGFETHADEQAALNIARSWLFLRSQEYKKYQTNKTTGNTDKRAFVETWQSFYRKKLKEVWKPAV

SEQ ID NO: 47075 - protein, 979 aa, synthetic construct
  REGION 1..979: note = engineered CasX variant
QEIKRINKIRRRLVKDSNTKKAGKTGPMKTLLVRVMTPDLRERLENLRKKPENIPQPISNTSRANLNKLLTDYTEMKKAILHVYWEEFQKDPVGLMSRVAQPASKKIDQNKLKPEMDEKGNLTTAGFACSQCGQPLFVYKLEQVSEKGKAYTNYFGRCNVAEHEKLILLAQLKPEKDSDEAVTYSLGKFGQRALDFYSIHVTKESTHPVKPLAQIAGNRYASTPVGKALSDACMGTIASFLSKYQDIIIEHQKVVKGNQKRLESLRELAGKENLEYPSVTLPPQPHTKEGVDAYNEVIARVRMWVNLNLWQKLKLSRDDAKPLLRLKGFPSFPLVERQANEVDWWDMVCNVKKLINEKKEDGKVFWQNLAGYKRQEALRPYLSSEEDREKGKKFARYQLGDLLLHLEKKHGEDWGKVYDEAWERIDKKVEGLSKHIKLEEERRSEDAQSKAALTDWLRAKASFVIEGLKEADKDEFCRCELKLQKWYGDLRGKPFAIEAENSILDISGFSKQYNCAFIWQKDGVKKLNLYLIINYFKGGKLRFKKIKPEAFEANRFYTVINKKSGEIVPMEVNFNFDDPNLIILPLAFGKRQGREFIWNDLLSLETGSLKLANGRVIEKTLYNRRTRQDEPALFVALTFERREVLDSSNIKPMNLIGVDRGENIPAVIALTDPEGCPLSRFKDSLGNPTHILRIGESYKEKQRTIQAKKEVEQRRAGGYSRKYASKAKNLADDMVRNTARDLLYYAVTQDAMLIFENLSRGFGRQGKRTFMAERQYTRMEDWLTAKLAYEGPLPSKTYLSKTLAQYTSKTCSNCGFTITSADYDRVLEKLKKTATGWMTTINGKELKVEGQITYYNRYKRQNVVKDLSVELDRLSEESVNNDISSWTKGRSGEALSLLKKRFSHRPVQEKFVCLNCGFETHADEQAALNIARSWLFLRSQEYKKYQTNKTTGNTDKRAFVETWQSFYRKKLKEVWKPAV

SEQ ID NO: 47076 - protein, 979 aa, synthetic construct
  REGION 1..979: note = engineered CasX variant
QEIKRINKIRRRLVKDSNTKKAGKTGPMKTLLVRVMTPDLRERLENLRKKPENIPQPISNTSRANLNKLLTDYTEMKKAILHVYWEEFQKDPVGLMSRVAQPASKKIDQNKLKPEMDEKGNLTTAGFACSQCGQPLFVYKLEQVSEKGKAYTNYFGRCNVAEHEKLILLAQLKPEKDSDEAVTYSLGKFGQRALDFYSIHVTKESTHPVKPLAQIAGNRYASAPVGKALSDACMGTIASFLSKYQDIIIEHQKVVKGNQKRLESLRELAGKENLEYPSVTLPPQPHTKEGVDAYNEVIARVRMWVNLNLWQKLKLSRDDAKPLLRLKGFPSFPLVERQANEVDWWDMVCNVKKLINEKKEDGKVFWQNLAGYKRQEALRPYLSSEEDREKGKKFARYQLGDLLLHLEKKHGEDWGKVYDEAWERIDKKVEGLSKHIKLEEERRSEDAQSKAALTDWLRAKASFVIEGLKEADKDEFCRCELKLQKWYGDLRGKPFAIEAENSILDISGFSKQYNCAFIWQKDGVKKLNLYLIINYFKGGKLRFKKIKPEAFEANRFYTVINKKSGEIVPMEVNFNFDDPNLIILPLAFGKRQGREFIWNDLLSLETGSLKLANGRVIEKTLYNRRTRQDEPALFVALTFERREVLDSSNIKPMNLIGVDRGENIPAVIALTDPEGCPLSRFKDSLGNPTHILRIGESYKEKQRTIQAKKEVEQRRAGGYSRKYASKAKNLADDMVRNTARDLLYYAVTQDAMLIFENLSRGFGRQGKRTFMAERQYTRMEDWLTAKLAYEGPLPSKTYLSKTLAQYTSKTCSNCGFTITSADYDRVLEKLKKTATGWMTTINGKELKVEGQITYYNRYKRQNVVKDLSVELDRLSEESVNNDISSWTKGRSGEALSLLKKRFSHRPVQEKFVCLNCGFETHADEQAALNIARSWLFLRSQEYKKYQTNKTTGNTDKRAFVETWQSFYRKKLKEVWKPAV

SEQ ID NO: 47077 - protein, 979 aa, synthetic construct
  REGION 1..979: note = engineered CasX variant
QEIKRINKIRRRLVKDSNTKKAGKTGPMKTLLVRVMTPDLRERLENLRKKPENIPQPISNTSRANLNKLLTDYTEMKKAILHVYWEEFQKDPVGLMSRVAQPASKKIDQNKLKPEMDEKGNLTTAGFACSQCGQPLFVYKLEQVSEKGKAYTNYFGRCNVAEHEKLILLAQLKPEKDSDEAVTYSLGKFGQRALDFYSIHVTKESTHPVKPLAQIAGNRYASVPVGKALSDACMGTIASFLSKYQDIIIEHQKVVKGNQKRLESLRELAGKENLEYPSVTLPPQPHTKEGVDAYNEVIARVRMWVNLNLWQKLKLSRDDAKPLLRLKGFPSFPLVERQANEVDWWDMVCNVKKLINEKKEDGKVFWQNLAGYKRQEALRPYLSSEEDREKGKKFARYQLGDLLLHLEKKHGEDWGKVYDEAWERIDKKVEGLSKHIKLEEERRSEDAQSKAALTDWLRAKASFVIEGLKEADKDEFCRCELKLQKWYGDLRGKPFAIEAENSILDISGFSKQYNCAFIWQKDGVKKLNLYLIINYFKGGKLRFKKIKPEAFEANRFYTVINKKSGEIVPMEVNFNFDDPNLIILPLAFGKRQGREFIWNDLLSLETGSLKLANGRVIEKTLYNRRTRQDEPALFVALTFERREVLDSSNIKPMNLIGVDRGENIPAVIALTDPEGCPLSRFKDSLGNPTHILRIGESYKEKQRTIQAKKEVEQRRAGGYSRKYASKAKNLADDMVRNTARDLLYYAVTQDAMLIFENLSRGFGRQGKRTFMAERQYTRMEDWLTAKLAYEGPLPSKTYLSKTLAQYTSKTCSNCGFTITSADYDRVLEKLKKTATGWMTTINGKELKVEGQITYYNRYKRQNVVKDLSVELDRLSEESVNNDISSWTKGRSGEALSLLKKRFSHRPVQEKFVCLNCGFETHADEQAALNIARSWLFLRSQEYKKYQTNKTTGNTDKRAFVETWQSFYRKKLKEVWKPAV

SEQ ID NO: 47078 - protein, 979 aa, synthetic construct
  REGION 1..979: note = engineered CasX variant
QEIKRINKIRRRLVKDSNTKKAGKTGPMKTLLVRVMTPDLRERLENLRKKPENIPQPISNTSRANLNKLLTDYTEMKKAILHVYWEEFQKDPVGLMSRVAQPASKKIDQNKLKPEMDEKGNLTTAGFACSQCGQPLFVYKLEQVSEKGKAYTNYFGRCNVAEHEKLIKLAQLKPEKDSDEAVTYSLGKFGQRALDFYSIHVTKESTHPVKPLAQIAGNRYASGPVGKALSDACMGTIASFLSKYQDIIIEHQKVVKGNQKRLESLRELAGKENLEYPSVTLPPQPHTKEGVDAYNEVIARVRMWVNLNLWQKLKLSRDDAKPLLRLKGFPSFPLVERQANEVDWWDMVCNVKKLINEKKEDGKVFWQNLAGYKRQEALRPYLSSEEDREKGKKFARYQLGDLLLHLEKKHGEDWGKVYDEAWERIDKKVEGLSKHIKLEEERRSEDAQSKAALTDWLRAKASFVIEGLKEADKDEFCRCELKLQKWYGDLRGKPFAIEAENSILDISGFSKQYNCAFIWQKDGVKKLNLYLIINYFKGGKLRFKKIKPEAFEANRFYTVINKKSGEIVPMEVNFNFDDPNLIILPLAFGKRQGREFIWNDLLSLETGSLKLANGRVIEKTLYNRRTRQDEPALFVALTFERREVLDSSNIKPMNLIGVDRGENIPAVIALTDPEGCPLSRFKDSLGNPTHILRIGESYKEKQRTIQAKKEVEQRRAGGYSRKYASKAKNLADDMVRNTARDLLYYAVTQDAMLIFENLSRGFGRQGKRTFMAERQYTRMEDWLTAKLAYEGPLPSKTYLSKTLAQYTSKTCSNCGFTITSADYDRVLEKLKKTATGWMTTINGKELKVEGQITYYNRYKRQNVVKDLSVELDRLSEESVNNDISSWTKGRSGEALSLLKKRFSHRPVQEKFVCLNCGFETHADEQAALNIARSWLFLRSQEYKKYQTNKTTGNTDKRAFVETWQSFYRKKLKEVWKPAV

SEQ ID NO: 47079 - protein, 978 aa, synthetic construct
  REGION 1..978: note = engineered CasX variant
QEIKRINKIRRRLVKDSNTKKAGKTGPMKTLLVRVMTPDLRERLENLRKKPENIPQPISNTSRANLNKLLTDYTEMKKAILHVYWEEFQKDPVGLMSRVAQPASKKIDQNKLKPEMDEKGNLTTAGFACSQCGQPLFVYKLEQVSEKGKAYTNYFGRCNVAEHEKLILLAQLKPEKDSDEAVTYSLGKFGQRALDFYSIHVTKESTHPVKPLAQIAGNRYASPVGKALSDACMGTIASFLSKYQDIIIEHQKVVKGNQKRLESLRELAGKENLEYPSVTLPPQPHTKEGVDAYNEVIARVRMWVNLNLWQKLKLSRDDAKPLLRLKGFPSFPLVERQANEVDWWDMVCNVKKLINEKKEDGKVFWQNLAGYKRQEALRPYLSSEEDREKGKKFARYQLGDLLLHLEKKHGEDWGKVYDEAWERIDKKVEGLSKHIKLEEERRSEDAQSKAALTDWLRAKASFVIEGLKEADKDEFCRCELKLQKWYGDLRGKPFAIEAENSILDISGFSKQYNCAFIWQKDGVKKLNLYLIINYFKGGKLRFKKIKPEAFEANRFYTVINKKSGEIVPMEVNFNFDDPNLIILPLAFGKRQGREFIWNDLLSLETGSLKLANGRVIEKTLYNRRTRQDEPALFVALTFERREVLDSSNIKPMNLIGVDRGENIPAVIALTDPEGCPLSRFKDSLGNPTHILRIGESYKEKQRTIQAKKEVEQRRAGGYSRKYASKAKNLADDMVRNTARDLLYYAVTQDAMLIFENLSRGFGRQGKRTFMAERQYTRMEDWLTAKLAYEGPLPSKTYLSKTLAQYTSKTCSNCGFTITSADYDRVLEKLKKTATGWMTTINGKELKVEGQITYYNRYKRQNVVKDLSVELDRLSEESVNNDISSWTKGRSGEALSLLKKRFSHRPVQEKFVCLNCGFETHADEQAALNIARSWLFLRSQEYKKYQTNKTTGNTDKRAFVETWQSFYRKKLKEVWKPAV

SEQ ID NO: 47080 - protein, 979 aa, synthetic construct
  REGION 1..979: note = engineered CasX variant
QEIKRINKIRRRLVKDSNTKKAGKTGPMKTLLVRVMTPDLRERLENLRKKPENIPQPISNTSRANLNKLLTDYTEMKKAILHVYWEEFQKDPVGLMSRVAQPASKKIDQNKLKPEMDEKGNLTTAGFACSQCGQPLFVYKLEQVSEKGKAYTNYFGRCNVAEHEKLILLAQLKPEKDSDEAVTYSLGKFGQRALDFYSIHVTKESTHPVKPLAQIAGNRYASYPVGKALSDACMGTIASFLSKYQDIIIEHQKVVKGNQKRLESLRELAGKENLEYPSVTLPPQPHTKEGVDAYNEVIARVRMWVNLNLWQKLKLSRDDAKPLLRLKGFPSFPLVERQANEVDWWDMVCNVKKLINEKKEDGKVFWQNLAGYKRQEALRPYLSSEEDRKKGKKFARYQLGDLLLHLEKKHGEDWGKVYDEAWERIDKKVEGLSKHIKLEEERRSEDAQSKAALTDWLRAKASFVIEGLKEADKDEFCRCELKLQKWYGDLRGKPFAIEAENSILDISGFSKQYNCAFIWQKDGVKKLNLYLIINYFKGGKLRFKKIKPEAFEANRFYTVINKKSGEIVIMEVNFNFDDPNLIILPLAFGKRQGREFIWNDLLSLETGSLKLANGRVIEKTLYNRRTRQDEPALFVALTFERREVLDSSNIKPMNLIGVDRGENIPAVIALTDPEGCPLSRFKDSLGNPTHILRIGESYKEKQRTIQAKKEVEQRRAGGYSRKYASKAKNLADDMVRNTARDLLYYAVTQDAMLIFENLSRGFGRQGKRTFMAERQYTRMEDWLTAKLAYEGPLPSKTYLSKTLAQYTSKTCSNCGFTITSADYDRVLEKLKKTATGWMTTINGKELKVEGQITYYNRYKRQNVVKDLSVELDRLSEESVNNDISSWTKGRSGEALSLLKKRFSHRPVQEKFVCLNCGFETHADEQAALNIARSWLFLRSQEYKKYQTNKTTGNTDKRAFVETWQSFYRKKLKEVWKPAV

SEQ ID NO: 47081 - protein, 979 aa, synthetic construct
  REGION 1..979: note = engineered CasX variant
QEIKRINKIRRRLVKDSNTKKAGKTGPMKTLLVRVMTPDLRERLENLRKKPENIPQPISNTSRANLNKLLTDYTEMKKAILHVYWEEFQKDPVGLMSRVAQPASKKIDQNKLKPEMDEKGNLTTAGFACSQCGQPLFVYKLEQVSEKGKAYTNYFGRCNVAEHEKLILLAQLKPEKDSDEAVTYSLGKFGQRALDFYSIHVTKESTHPVKPLAQIAGNRYASHPVGKALSDACMGTIASFLSKYQDIIIEHQKVVKGNQKRLESLRELAGKENLEYPSVTLPPQPHTKEGVDAYNEVIARVRMWVNLNLWQKLKLSRDDAKPLLRLKGFPSFPLVERQANEVDWWDMVCNVKKLINEKKEDGKVFWQNLAGYKRQEALRPYLSSEEDRKKGKKFARYQLGDLLLHLEKKHGEDWGKVYDEAWERIDKKVEGLSKHIKLEEERRSEDAQSKAALTDWLRAKASFVIEGLKEADKDEFCRCELKLQKWYGDLRGKPFAIEAENSILDISGFSKQYNCAFIWQKDGVKKLNLYLIINYFKGGKLRFKKIKPEAFEANRFYTVINKKSGEIVIMEVNFNFDDPNLIILPLAFGKRQGREFIWNDLLSLETGSLKLANGRVIEKTLYNRRTRQDEPALFVALTFERREVLDSSNIKPMNLIGVDRGENIPAVIALTDPEGCPLSRFKDSLGNPTHILRIGESYKEKQRTIQAKKEVEQRRAGGYSRKYASKAKNLADDMVRNTARDLLYYAVTQDAMLIFENLSRGFGRQGKRTFMAERQYTRMEDWLTAKLAYEGPLPSKTYLSKTLAQYTSKTCSNCGFTITSADYDRVLEKLKKTATGWMTTINGKELKVEGQITYYNRYKRQNVVKDLSVELDRLSEESVNNDISSWTKGRSGEALSLLKKRFSHRPVQEKFVCLNCGFETHADEQAALNIARSWLFLRSQEYKKYQTNKTTGNTDKRAFVETWQSFYRKKLKEVWKPAV

SEQ ID NO: 47082 - protein, 979 aa, synthetic construct
  REGION 1..979: note = engineered CasX variant
QEIKRINKIRRRLVKDSNTKKAGKTGPMKTLLVRVMTPDLRERLENLRKKPENIPQPISNTSRANLNKLLTDYTEMKKAILHVYWEEFQKDPVGLMSRVAQPASKKIDQNKLKPEMDEKGNLTTAGFACSQCGQPLFVYKLEQVSEKGKAYTNYFGRCNVAEHEKLILLAQLKPEKDSDEAVTYSLGKFGQRALDFYSIHVTKESTHPVKPLAQIAGNRYASSPVGKALSDACMGTIASFLSKYQDIIIEHQKVVKGNQKRLESLRELAGKENLEYPSVTLPPQPHTKEGVDAYNEVIARVRMWVNLNLWQKLKLSRDDAKPLLRLKGFPSFPLVERQANEVDWWDMVCNVKKLINEKKEDGKVFWQNLAGYKRQEALRPYLSSEEDRKKGKKFARYQLGDLLLHLEKKHGEDWGKVYDEAWERIDKKVEGLSKHIKLEEERRSEDAQSKAALTDWLRAKASFVIEGLKEADKDEFCRCELKLQKWYGDLRGKPFAIEAENSILDISGFSKQYNCAFIWQKDGVKKLNLYLIINYFKGGKLRFKKIKPEAFEANRFYTVINKKSGEIVIMEVNFNFDDPNLIILPLAFGKRQGREFIWNDLLSLETGSLKLANGRVIEKTLYNRRTRQDEPALFVALTFERREVLDSSNIKPMNLIGVDRGENIPAVIALTDPEGCPLSRFKDSLGNPTHILRIGESYKEKQRTIQAKKEVEQRRAGGYSRKYASKAKNLADDMVRNTARDLLYYAVTQDAMLIFENLSRGFGRQGKRTFMAERQYTRMEDWLTAKLAYEGPLPSKTYLSKTLAQYTSKTCSNCGFTITSADYDRVLEKLKKTATGWMTTINGKELKVEGQITYYNRYKRQNVVKDLSVELDRLSEESVNNDISSWTKGRSGEALSLLKKRFSHRPVQEKFVCLNCGFETHADEQAALNIARSWLFLRSQEYKKYQTNKTTGNTDKRAFVETWQSFYRKKLKEVWKPAV

SEQ ID NO: 47083 - protein, 979 aa, synthetic construct
  REGION 1..979: note = engineered CasX variant
QEIKRINKIRRRLVKDSNTKKAGKTGPMKTLLVRVMTPDLRERLENLRKKPENIPQPISNTSRANLNKLLTDYTEMKKAILHVYWEEFQKDPVGLMSRVAQPASKKIDQNKLKPEMDEKGNLTTAGFACSQCGQPLFVYKLEQVSEKGKAYTNYFGRCNVAEHEKLILLAQLKPEKDSDEAVTYSLGKFGQRALDFYSIHVTKESTHPVKPLAQIAGNRYASTPVGKALSDACMGTIASFLSKYQDIIIEHQKVVKGNQKRLESLRELAGKENLEYPSVTLPPQPHTKEGVDAYNEVIARVRMWVNLNLWQKLKLSRDDAKPLLRLKGFPSFPLVERQANEVDWWDMVCNVKKLINEKKEDGKVFWQNLAGYKRQEALRPYLSSEEDRKKGKKFARYQLGDLLLHLEKKHGEDWGKVYDEAWERIDKKVEGLSKHIKLEEERRSEDAQSKAALTDWLRAKASFVIEGLKEADKDEFCRCELKLQKWYGDLRGKPFAIEAENSILDISGFSKQYNCAFIWQKDGVKKLNLYLIINYFKGGKLRFKKIKPEAFEANRFYTVINKKSGEIVIMEVNFNFDDPNLIILPLAFGKRQGREFIWNDLLSLETGSLKLANGRVIEKTLYNRRTRQDEPALFVALTFERREVLDSSNIKPMNLIGVDRGENIPAVIALTDPEGCPLSRFKDSLGNPTHILRIGESYKEKQRTIQAKKEVEQRRAGGYSRKYASKAKNLADDMVRNTARDLLYYAVTQDAMLIFENLSRGFGRQGKRTFMAERQYTRMEDWLTAKLAYEGPLPSKTYLSKTLAQYTSKTCSNCGFTITSADYDRVLEKLKKTATGWMTTINGKELKVEGQITYYNRYKRQNVVKDLSVELDRLSEESVNNDISSWTKGRSGEALSLLKKRFSHRPVQEKFVCLNCGFETHADEQAALNIARSWLFLRSQEYKKYQTNKTTGNTDKRAFVETWQSFYRKKLKEVWKPAV

SEQ ID NO: 47084 - protein, 979 aa, synthetic construct
  REGION 1..979: note = engineered CasX variant
QEIKRINKIRRRLVKDSNTKKAGKTGPMKTLLVRVMTPDLRERLENLRKKPENIPQPISNTSRANLNKLLTDYTEMKKAILHVYWEEFQKDPVGLMSRVAQPASKKIDQNKLKPEMDEKGNLTTAGFACSQCGQPLFVYKLEQVSEKGKAYTNYFGRCNVAEHEKLILLAQLKPEKDSDEAVTYSLGKFGQRALDFYSIHVTKESTHPVKPLAQIAGNRYASAPVGKALSDACMGTIASFLSKYQDIIIEHQKVVKGNQKRLESLRELAGKENLEYPSVTLPPQPHTKEGVDAYNEVIARVRMWVNLNLWQKLKLSRDDAKPLLRLKGFPSFPLVERQANEVDWWDMVCNVKKLINEKKEDGKVFWQNLAGYKRQEALRPYLSSEEDRKKGKKFARYQLGDLLLHLEKKHGEDWGKVYDEAWERIDKKVEGLSKHIKLEEERRSEDAQSKAALTDWLRAKASFVIEGLKEADKDEFCRCELKLQKWYGDLRGKPFAIEAENSILDISGFSKQYNCAFIWQKDGVKKLNLYLIINYFKGGKLRFKKIKPEAFEANRFYTVINKKSGEIVIMEVNFNFDDPNLIILPLAFGKRQGREFIWNDLLSLETGSLKLANGRVIEKTLYNRRTRQDEPALFVALTFERREVLDSSNIKPMNLIGVDRGENIPAVIALTDPEGCPLSRFKDSLGNPTHILRIGESYKEKQRTIQAKKEVEQRRAGGYSRKYASKAKNLADDMVRNTARDLLYYAVTQDAMLIFENLSRGFGRQGKRTFMAERQYTRMEDWLTAKLAYEGPLPSKTYLSKTLAQYTSKTCSNCGFTITSADYDRVLEKLKKTATGWMTTINGKELKVEGQITYYNRYKRQNVVKDLSVELDRLSEESVNNDISSWTKGRSGEALSLLKKRFSHRPVQEKFVCLNCGFETHADEQAALNIARSWLFLRSQEYKKYQTNKTTGNTDKRAFVETWQSFYRKKLKEVWKPAV

SEQ ID NO: 47085 - protein, 979 aa, synthetic construct
  REGION 1..979: note = engineered CasX variant
QEIKRINKIRRRLVKDSNTKKAGKTGPMKTLLVRVMTPDLRERLENLRKKPENIPQPISNTSRANLNKLLTDYTEMKKAILHVYWEEFQKDPVGLMSRVAQPASKKIDQNKLKPEMDEKGNLTTAGFACSQCGQPLFVYKLEQVSEKGKAYTNYFGRCNVAEHEKLILLAQLKPEKDSDEAVTYSLGKFGQRALDFYSIHVTKESTHPVKPLAQIAGNRYASVPVGKALSDACMGTIASFLSKYQDIIIEHQKVVKGNQKRLESLRELAGKENLEYPSVTLPPQPHTKEGVDAYNEVIARVRMWVNLNLWQKLKLSRDDAKPLLRLKGFPSFPLVERQANEVDWWDMVCNVKKLINEKKEDGKVFWQNLAGYKRQEALRPYLSSEEDRKKGKKFARYQLGDLLLHLEKKHGEDWGKVYDEAWERIDKKVEGLSKHIKLEEERRSEDAQSKAALTDWLRAKASFVIEGLKEADKDEFCRCELKLQKWYGDLRGKPFAIEAENSILDISGFSKQYNCAFIWQKDGVKKLNLYLIINYFKGGKLRFKKIKPEAFEANRFYTVINKKSGEIVIMEVNFNFDDPNLIILPLAFGKRQGREFIWNDLLSLETGSLKLANGRVIEKTLYNRRTRQDEPALFVALTFERREVLDSSNIKPMNLIGVDRGENIPAVIALTDPEGCPLSRFKDSLGNPTHILRIGESYKEKQRTIQAKKEVEQRRAGGYSRKYASKAKNLADDMVRNTARDLLYYAVTQDAMLIFENLSRGFGRQGKRTFMAERQYTRMEDWLTAKLAYEGPLPSKTYLSKTLAQYTSKTCSNCGFTITSADYDRVLEKLKKTATGWMTTINGKELKVEGQITYYNRYKRQNVVKDLSVELDRLSEESVNNDISSWTKGRSGEALSLLKKRFSHRPVQEKFVCLNCGFETHADEQAALNIARSWLFLRSQEYKKYQTNKTTGNTDKRAFVETWQSFYRKKLKEVWKPAV

SEQ ID NO: 47086 - protein, 979 aa, synthetic construct
  REGION 1..979: note = engineered CasX variant
QEIKRINKIRRRLVKDSNTKKAGKTGPMKTLLVRVMTPDLRERLENLRKKPENIPQPISNTSRANLNKLLTDYTEMKKAILHVYWEEFQKDPVGLMSRVAQPASKKIDQNKLKPEMDEKGNLTTAGFACSQCGQPLFVYKLEQVSEKGKAYTNYFGRCNVAEHEKLIKLAQLKPEKDSDEAVTYSLGKFGQRALDFYSIHVTKESTHPVKPLAQIAGNRYASGPVGKALSDACMGTIASFLSKYQDIIIEHQKVVKGNQKRLESLRELAGKENLEYPSVTLPPQPHTKEGVDAYNEVIARVRMWVNLNLWQKLKLSRDDAKPLLRLKGFPSFPLVERQANEVDWWDMVCNVKKLINEKKEDGKVFWQNLAGYKRQEALRPYLSSEEDRKKGKKFARYQLGDLLLHLEKKHGEDWGKVYDEAWERIDKKVEGLSKHIKLEEERRSEDAQSKAALTDWLRAKASFVIEGLKEADKDEFCRCELKLQKWYGDLRGKPFAIEAENSILDISGFSKQYNCAFIWQKDGVKKLNLYLIINYFKGGKLRFKKIKPEAFEANRFYTVINKKSGEIVIMEVNFNFDDPNLIILPLAFGKRQGREFIWNDLLSLETGSLKLANGRVIEKTLYNRRTRQDEPALFVALTFERREVLDSSNIKPMNLIGVDRGENIPAVIALTDPEGCPLSRFKDSLGNPTHILRIGESYKEKQRTIQAKKEVEQRRAGGYSRKYASKAKNLADDMVRNTARDLLYYAVTQDAMLIFENLSRGFGRQGKRTFMAERQYTRMEDWLTAKLAYEGPLPSKTYLSKTLAQYTSKTCSNCGFTITSADYDRVLEKLKKTATGWMTTINGKELKVEGQITYYNRYKRQNVVKDLSVELDRLSEESVNNDISSWTKGRSGEALSLLKKRFSHRPVQEKFVCLNCGFETHADEQAALNIARSWLFLRSQEYKKYQTNKTTGNTDKRAFVETWQSFYRKKLKEVWKPAV

SEQ ID NO: 47087 - protein, 978 aa, synthetic construct
  REGION 1..978: note = engineered CasX variant
QEIKRINKIRRRLVKDSNTKKAGKTGPMKTLLVRVMTPDLRERLENLRKKPENIPQPISNTSRANLNKLLTDYTEMKKAILHVYWEEFQKDPVGLMSRVAQPASKKIDQNKLKPEMDEKGNLTTAGFACSQCGQPLFVYKLEQVSEKGKAYTNYFGRCNVAEHEKLILLAQLKPEKDSDEAVTYSLGKFGQRALDFYSIHVTKESTHPVKPLAQIAGNRYASPVGKALSDACMGTIASFLSKYQDIIIEHQKVVKGNQKRLESLRELAGKENLEYPSVTLPPQPHTKEGVDAYNEVIARVRMWVNLNLWQKLKLSRDDAKPLLRLKGFPSFPLVERQANEVDWWDMVCNVKKLINEKKEDGKVFWQNLAGYKRQEALRPYLSSEEDRKKGKKFARYQLGDLLLHLEKKHGEDWGKVYDEAWERIDKKVEGLSKHIKLEEERRSEDAQSKAALTDWLRAKASFVIEGLKEADKDEFCRCELKLQKWYGDLRGKPFAIEAENSILDISGFSKQYNCAFIWQKDGVKKLNLYLIINYFKGGKLRFKKIKPEAFEANRFYTVINKKSGEIVIMEVNFNFDDPNLIILPLAFGKRQGREFIWNDLLSLETGSLKLANGRVIEKTLYNRRTRQDEPALFVALTFERREVLDSSNIKPMNLIGVDRGENIPAVIALTDPEGCPLSRFKDSLGNPTHILRIGESYKEKQRTIQAKKEVEQRRAGGYSRKYASKAKNLADDMVRNTARDLLYYAVTQDAMLIFENLSRGFGRQGKRTFMAERQYTRMEDWLTAKLAYEGPLPSKTYLSKTLAQYTSKTCSNCGFTITSADYDRVLEKLKKTATGWMTTINGKELKVEGQITYYNRYKRQNVVKDLSVELDRLSEESVNNDISSWTKGRSGEALSLLKKRFSHRPVQEKFVCLNCGFETHADEQAALNIARSWLFLRSQEYKKYQTNKTTGNTDKRAFVETWQSFYRKKLKEVWKPAV

SEQ ID NO: 47088 - protein, 979 aa, synthetic construct
  REGION 1..979: note = engineered CasX variant
QEIKRINKIRRRLVKDSNTKKAGKTGPMKTLLVRVMTPDLRERLENLRKKPENIPQPISNTSRANLNKLLTDYTEMKKAILHVYWEEFQKDPVGLMSRVAQPASKKIDQNKLKPEMDEKGNLTTAGFACSQCGQPLFVYKLEQVSEKGKAYTNYFGRCNVAEHEKLILLAQLKPEKDSDEAVTYSLGKFGQRALDFYSIHVTKESTHPVKPLAQIAGNRYASYPVGKALSGACMGTIASFLSKYQDIIIEHQKVVKGNQKRLESLRELAGKENLEYPSVTLPPQPHTKEGVDAYNEVIARVRMWVNLNLWQKLKLSRDDAKPLLRLKGFPSFPLVERQANEVDWWDMVCNVKKLINEKKEDGKVFWQNLAGYKRQEALRPYLSSEEDVRKKGKKFARYQLGDLLLHLEKKHGEDWGKVYDEAWERIDKKVEGLSKHIKLEEERRSEDAQSKAALTDWLRAKASFVIEGLKEADKDEFCRCELKLQKWYGDLRGKPFAIEAENSILDISGFSKQYNCAFIWQKDGVKKLNLYLIINYFKGGKLRFKKIKPEAFEANRFYTVINKKSGEIVPMEVNFNFDDPNLIILPLAFGKRQGREFIWNDLLSLETGSLKLANGRVIEKTLYNRRTRQDEPALFVALTFERREVLDSSNIKPMNLIGVDRGENIPAVIALTDPEGCPLSRFKDSLGNPTHILRIGESYKEKQRTIQAKKEVEQRRAGGYSRKYASKAKNLADDMVRNTARDLLYYAVTQDAMLIFENLSRGFGRQGKRTFMAERQYTRMEDWLTAKLAYEGLPSKTYLSKTLAQYTSKTCSNCGFTITSADYDRVLEKLKKTATGWMTTINGKELKVEGQITYYNRYKRQNVVKDLSVELDRLSEESVNNDISSWTKGRSGEALSLLKKRFSHRPVQEKFVCLNCGFETHADEQAALNIARSWLFLRSQEYKKYQTNKTTGNTDKRAFVETWQSFYRKKLKEVWKPAV

SEQ ID NO: 47089 - protein, 979 aa, synthetic construct
  REGION 1..979: note = engineered CasX variant
QEIKRINKIRRRLVKDSNTKKAGKTGPMKTLLVRVMTPDLRERLENLRKKPENIPQPISNTSRANLNKLLTDYTEMKKAILHVYWEEFQKDPVGLMSRVAQPASKKIDQNKLKPEMDEKGNLTTAGFACSQCGQPLFVYKLEQVSEKGKAYTNYFGRCNVAEHEKLILLAQLKPEKDSDEAVTYSLGKFGQRALDFYSIHVTKESTHPVKPLAQIAGNRYASHPVGKALSGACMGTIASFLSKYQDIIIEHQKVVKGNQKRLESLRELAGKENLEYPSVTLPPQPHTKEGVDAYNEVIARVRMWVNLNLWQKLKLSRDDAKPLLRLKGFPSFPLVERQANEVDWWDMVCNVKKLINEKKEDGKVFWQNLAGYKRQEALRPYLSSEEDVRKKGKKFARYQLGDLLLHLEKKHGEDWGKVYDEAWERIDKKVEGLSKHIKLEEERRSEDAQSKAALTDWLRAKASFVIEGLKEADKDEFCRCELKLQKWYGDLRGKPFAIEAENSILDISGFSKQYNCAFIWQKDGVKKLNLYLIINYFKGGKLRFKKIKPEAFEANRFYTVINKKSGEIVPMEVNFNFDDPNLIILPLAFGKRQGREFIWNDLLSLETGSLKLANGRVIEKTLYNRRTRQDEPALFVALTFERREVLDSSNIKPMNLIGVDRGENIPAVIALTDPEGCPLSRFKDSLGNPTHILRIGESYKEKQRTIQAKKEVEQRRAGGYSRKYASKAKNLADDMVRNTARDLLYYAVTQDAMLIFENLSRGFGRQGKRTFMAERQYTRMEDWLTAKLAYEGLPSKTYLSKTLAQYTSKTCSNCGFTITSADYDRVLEKLKKTATGWMTTINGKELKVEGQITYYNRYKRQNVVKDLSVELDRLSEESVNNDISSWTKGRSGEALSLLKKRFSHRPVQEKFVCLNCGFETHADEQAALNIARSWLFLRSQEYKKYQTNKTTGNTDKRAFVETWQSFYRKKLKEVWKPAV

SEQ ID NO: 47090 - protein, 979 aa, synthetic construct
  REGION 1..979: note = engineered CasX variant
QEIKRINKIRRRLVKDSNTKKAGKTGPMKTLLVRVMTPDLRERLENLRKKPENIPQPISNTSRANLNKLLTDYTEMKKAILHVYWEEFQKDPVGLMSRVAQPASKKIDQNKLKPEMDEKGNLTTAGFACSQCGQPLFVYKLEQVSEKGKAYTNYFGRCNVAEHEKLILLAQLKPEKDSDEAVTYSLGKFGQRALDFYSIHVTKESTHPVKPLAQIAGNRYASSPVGKALSGACMGTIASFLSKYQDIIIEHQKVVKGNQKRLESLRELAGKENLEYPSVTLPPQPHTKEGVDAYNEVIARVRMWVNLNLWQKLKLSRDDAKPLLRLKGFPSFPLVERQANEVDWWDMVCNVKKLINEKKEDGKVFWQNLAGYKRQEALRPYLSSEEDVRKKGKKFARYQLGDLLLHLEKKHGEDWGKVYDEAWERIDKKVEGLSKHIKLEEERRSEDAQSKAALTDWLRAKASFVIEGLKEADKDEFCRCELKLQKWYGDLRGKPFAIEAENSILDISGFSKQYNCAFIWQKDGVKKLNLYLIINYFKGGKLRFKKIKPEAFEANRFYTVINKKSGEIVPMEVNFNFDDPNLIILPLAFGKRQGREFIWNDLLSLETGSLKLANGRVIEKTLYNRRTRQDEPALFVALTFERREVLDSSNIKPMNLIGVDRGENIPAVIALTDPEGCPLSRFKDSLGNPTHILRIGESYKEKQRTIQAKKEVEQRRAGGYSRKYASKAKNLADDMVRNTARDLLYYAVTQDAMLIFENLSRGFGRQGKRTFMAERQYTRMEDWLTAKLAYEGLPSKTYLSKTLAQYTSKTCSNCGFTITSADYDRVLEKLKKTATGWMTTINGKELKVEGQITYYNRYKRQNVVKDLSVELDRLSEESVNNDISSWTKGRSGEALSLLKKRFSHRPVQEKFVCLNCGFETHADEQAALNIARSWLFLRSQEYKKYQTNKTTGNTDKRAFVETWQSFYRKKLKEVWKPAV

SEQ ID NO: 47091 - protein, 979 aa, synthetic construct
  REGION 1..979: note = engineered CasX variant
QEIKRINKIRRRLVKDSNTKKAGKTGPMKTLLVRVMTPDLRERLENLRKKPENIPQPISNTSRANLNKLLTDYTEMKKAILHVYWEEFQKDPVGLMSRVAQPASKKIDQNKLKPEMDEKGNLTTAGFACSQCGQPLFVYKLEQVSEKGKAYTNYFGRCNVAEHEKLILLAQLKPEKDSDEAVTYSLGKFGQRALDFYSIHVTKESTHPVKPLAQIAGNRYASTPVGKALSGACMGTIASFLSKYQDIIIEHQKVVKGNQKRLESLRELAGKENLEYPSVTLPPQPHTKEGVDAYNEVIARVRMWVNLNLWQKLKLSRDDAKPLLRLKGFPSFPLVERQANEVDWWDMVCNVKKLINEKKEDGKVFWQNLAGYKRQEALRPYLSSEEDVRKKGKKFARYQLGDLLLHLEKKHGEDWGKVYDEAWERIDKKVEGLSKHIKLEEERRSEDAQSKAALTDWLRAKASFVIEGLKEADKDEFCRCELKLQKWYGDLRGKPFAIEAENSILDISGFSKQYNCAFIWQKDGVKKLNLYLIINYFKGGKLRFKKIKPEAFEANRFYTVINKKSGEIVPMEVNFNFDDPNLIILPLAFGKRQGREFIWNDLLSLETGSLKLANGRVIEKTLYNRRTRQDEPALFVALTFERREVLDSSNIKPMNLIGVDRGENIPAVIALTDPEGCPLSRFKDSLGNPTHILRIGESYKEKQRTIQAKKEVEQRRAGGYSRKYASKAKNLADDMVRNTARDLLYYAVTQDAMLIFENLSRGFGRQGKRTFMAERQYTRMEDWLTAKLAYEGLPSKTYLSKTLAQYTSKTCSNCGFTITSADYDRVLEKLKKTATGWMTTINGKELKVEGQITYYNRYKRQNVVKDLSVELDRLSEESVNNDISSWTKGRSGEALSLLKKRFSHRPVQEKFVCLNCGFETHADEQAALNIARSWLFLRSQEYKKYQTNKTTGNTDKRAFVETWQSFYRKKLKEVWKPAV

SEQ ID NO: 47092 - protein, 979 aa, synthetic construct
  REGION 1..979: note = engineered CasX variant
QEIKRINKIRRRLVKDSNTKKAGKTGPMKTLLVRVMTPDLRERLENLRKKPENIPQPISNTSRANLNKLLTDYTEMKKAILHVYWEEFQKDPVGLMSRVAQPASKKIDQNKLKPEMDEKGNLTTAGFACSQCGQPLFVYKLEQVSEKGKAYTNYFGRCNVAEHEKLILLAQLKPEKDSDEAVTYSLGKFGQRALDFYSIHVTKESTHPVKPLAQIAGNRYASAPVGKALSGACMGTIASFLSKYQDIIIEHQKVVKGNQKRLESLRELAGKENLEYPSVTLPPQPHTKEGVDAYNEVIARVRMWVNLNLWQKLKLSRDDAKPLLRLKGFPSFPLVERQANEVDWWDMVCNVKKLINEKKEDGKVFWQNLAGYKRQEALRPYLSSEEDVRKKGKKFARYQLGDLLLHLEKKHGEDWGKVYDEAWERIDKKVEGLSKHIKLEEERRSEDAQSKAALTDWLRAKASFVIEGLKEADKDEFCRCELKLQKWYGDLRGKPFAIEAENSILDISGFSKQYNCAFIWQKDGVKKLNLYLIINYFKGGKLRFKKIKPEAFEANRFYTVINKKSGEIVPMEVNFNFDDPNLIILPLAFGKRQGREFIWNDLLSLETGSLKLANGRVIEKTLYNRRTRQDEPALFVALTFERREVLDSSNIKPMNLIGVDRGENIPAVIALTDPEGCPLSRFKDSLGNPTHILRIGESYKEKQRTIQAKKEVEQRRAGGYSRKYASKAKNLADDMVRNTARDLLYYAVTQDAMLIFENLSRGFGRQGKRTFMAERQYTRMEDWLTAKLAYEGLPSKTYLSKTLAQYTSKTCSNCGFTITSADYDRVLEKLKKTATGWMTTINGKELKVEGQITYYNRYKRQNVVKDLSVELDRLSEESVNNDISSWTKGRSGEALSLLKKRFSHRPVQEKFVCLNCGFETHADEQAALNIARSWLFLRSQEYKKYQTNKTTGNTDKRAFVETWQSFYRKKLKEVWKPAV

SEQ ID NO: 47093 - protein, 979 aa, synthetic construct
  REGION 1..979: note = engineered CasX variant
QEIKRINKIRRRLVKDSNTKKAGKTGPMKTLLVRVMTPDLRERLENLRKKPENIPQPISNTSRANLNKLLTDYTEMKKAILHVYWEEFQKDPVGLMSRVAQPASKKIDQNKLKPEMDEKGNLTTAGFACSQCGQPLFVYKLEQVSEKGKAYTNYFGRCNVAEHEKLILLAQLKPEKDSDEAVTYSLGKFGQRALDFYSIHVTKESTHPVKPLAQIAGNRYASVPVGKALSGACMGTIASFLSKYQDIIIEHQKVVKGNQKRLESLRELAGKENLEYPSVTLPPQPHTKEGVDAYNEVIARVRMWVNLNLWQKLKLSRDDAKPLLRLKGFPSFPLVERQANEVDWWDMVCNVKKLINEKKEDGKVFWQNLAGYKRQEALRPYLSSEEDVRKKGKKFARYQLGDLLLHLEKKHGEDWGKVYDEAWERIDKKVEGLSKHIKLEEERRSEDAQSKAALTDWLRAKASFVIEGLKEADKDEFCRCELKLQKWYGDLRGKPFAIEAENSILDISGFSKQYNCAFIWQKDGVKKLNLYLIINYFKGGKLRFKKIKPEAFEANRFYTVINKKSGEIVPMEVNFNFDDPNLIILPLAFGKRQGREFIWNDLLSLETGSLKLANGRVIEKTLYNRRTRQDEPALFVALTFERREVLDSSNIKPMNLIGVDRGENIPAVIALTDPEGCPLSRFKDSLGNPTHILRIGESYKEKQRTIQAKKEVEQRRAGGYSRKYASKAKNLADDMVRNTARDLLYYAVTQDAMLIFENLSRGFGRQGKRTFMAERQYTRMEDWLTAKLAYEGLPSKTYLSKTLAQYTSKTCSNCGFTITSADYDRVLEKLKKTATGWMTTINGKELKVEGQITYYNRYKRQNVVKDLSVELDRLSEESVNNDISSWTKGRSGEALSLLKKRFSHRPVQEKFVCLNCGFETHADEQAALNIARSWLFLRSQEYKKYQTNKTTGNTDKRAFVETWQSFYRKKLKEVWKPAV

SEQ ID NO: 47094 - protein, 979 aa, synthetic construct
  REGION 1..979: note = engineered CasX variant
QEIKRINKIRRRLVKDSNTKKAGKTGPMKTLLVRVMTPDLRERLENLRKKPENIPQPISNTSRANLNKLLTDYTEMKKAILHVYWEEFQKDPVGLMSRVAQPASKKIDQNKLKPEMDEKGNLTTAGFACSQCGQPLFVYKLEQVSEKGKAYTNYFGRCNVAEHEKLIKLAQLKPEKDSDEAVTYSLGKFGQRALDFYSIHVTKESTHPVKPLAQIAGNRYASGPVGKALSGACMGTIASFLSKYQDIIIEHQKVVKGNQKRLESLRELAGKENLEYPSVTLPPQPHTKEGVDAYNEVIARVRMWVNLNLWQKLKLSRDDAKPLLRLKGFPSFPLVERQANEVDWWDMVCNVKKLINEKKEDGKVFWQNLAGYKRQEALRPYLSSEEDVRKKGKKFARYQLGDLLLHLEKKHGEDWGKVYDEAWERIDKKVEGLSKHIKLEEERRSEDAQSKAALTDWLRAKASFVIEGLKEADKDEFCRCELKLQKWYGDLRGKPFAIEAENSILDISGFSKQYNCAFIWQKDGVKKLNLYLIINYFKGGKLRFKKIKPEAFEANRFYTVINKKSGEIVPMEVNFNFDDPNLIILPLAFGKRQGREFIWNDLLSLETGSLKLANGRVIEKTLYNRRTRQDEPALFVALTFERREVLDSSNIKPMNLIGVDRGENIPAVIALTDPEGCPLSRFKDSLGNPTHILRIGESYKEKQRTIQAKKEVEQRRAGGYSRKYASKAKNLADDMVRNTARDLLYYAVTQDAMLIFENLSRGFGRQGKRTFMAERQYTRMEDWLTAKLAYEGLPSKTYLSKTLAQYTSKTCSNCGFTITSADYDRVLEKLKKTATGWMTTINGKELKVEGQITYYNRYKRQNVVKDLSVELDRLSEESVNNDISSWTKGRSGEALSLLKKRFSHRPVQEKFVCLNCGFETHADEQAALNIARSWLFLRSQEYKKYQTNKTTGNTDKRAFVETWQSFYRKKLKEVWKPAV

SEQ ID NO: 47095 - protein, 978 aa, synthetic construct
  REGION 1..978: note = engineered CasX variant
QEIKRINKIRRRLVKDSNTKKAGKTGPMKTLLVRVMTPDLRERLENLRKKPENIPQPISNTSRANLNKLLTDYTEMKKAILHVYWEEFQKDPVGLMSRVAQPASKKIDQNKLKPEMDEKGNLTTAGFACSQCGQPLFVYKLEQVSEKGKAYTNYFGRCNVAEHEKLILLAQLKPEKDSDEAVTYSLGKFGQRALDFYSIHVTKESTHPVKPLAQIAGNRYASPVGKALSGACMGTIASFLSKYQDIIIEHQKVVKGNQKRLESLRELAGKENLEYPSVTLPPQPHTKEGVDAYNEVIARVRMWVNLNLWQKLKLSRDDAKPLLRLKGFPSFPLVERQANEVDWWDMVCNVKKLINEKKEDGKVFWQNLAGYKRQEALRPYLSSEEDVRKKGKKFARYQLGDLLLHLEKKHGEDWGKVYDEAWERIDKKVEGLSKHIKLEEERRSEDAQSKAALTDWLRAKASFVIEGLKEADKDEFCRCELKLQKWYGDLRGKPFAIEAENSILDISGFSKQYNCAFIWQKDGVKKLNLYLIINYFKGGKLRFKKIKPEAFEANRFYTVINKKSGEIVPMEVNFNFDDPNLIILPLAFGKRQGREFIWNDLLSLETGSLKLANGRVIEKTLYNRRTRQDEPALFVALTFERREVLDSSNIKPMNLIGVDRGENIPAVIALTDPEGCPLSRFKDSLGNPTHILRIGESYKEKQRTIQAKKEVEQRRAGGYSRKYASKAKNLADDMVRNTARDLLYYAVTQDAMLIFENLSRGFGRQGKRTFMAERQYTRMEDWLTAKLAYEGLPSKTYLSKTLAQYTSKTCSNCGFTITSADYDRVLEKLKKTATGWMTTINGKELKVEGQITYYNRYKRQNVVKDLSVELDRLSEESVNNDISSWTKGRSGEALSLLKKRFSHRPVQEKFVCLNCGFETHADEQAALNIARSWLFLRSQEYKKYQTNKTTGNTDKRAFVETWQSFYRKKLKEVWKPAV

SEQ ID NO: 47096 - protein, 979 aa, synthetic construct
  REGION 1..979: note = engineered CasX variant
QEIKRINKIRRRLVKDSNTKKAGKTGPMKTLLVRVMTPDLRERLENLRKKPENIPQPISNTSRANLNKLLTDYTEMKKAILHVYWEEFQKDPVGLMSRVAQPASKKIDQNKLKPEMDEKGNLTTAGFACSQCGQPLFVYKLEQVSEKGKAYTNYFGRCNVAEHEKLILLAQLKPEKDSDEAVTYSLGKFGQRALDFYSIHVTKESTHPVKPLAQIAGNRYASYPVGKALSDACMGTIASFLSKYQDIIIEHQKVVKGNQKRLESLRELAGKENLEYPSVTLPPQPHTKEGVDAYNEVIARVRMWVNLNLWQKLKLSRDDAKPLLRLKNFPSFPLVERQANEVDWWDMVCNVKKLINEKKEDGKVFWQNLAGYKRQEALRPYLSSEEDVRKKGKKFARYQLGDLLLHLEKKHGEDWGKVYDEAWERIDKKVEGLSKHIKLEEERRSEDAQSKAALTDWLRAKASFVIEGLKEADKDEFCRCELKLQKWYGDLRGKPFAIEAENSILDISGFSKQYNCAFIWQKDGVKKLNLYLIINYFKGGKLRFKKIKPEAFEANRFYTVINKKSGEIVPMEVNFNFDDPNLIILPLAFGKRQGREFIWNDLLSLETGSLKLANGRVIEKTLYNRRTRQDEPALFVALTFERREVLDSSNIKPMNLIGVDRGENIPAVIALTDPEGCPLSRFKDSLGNPTHILRIGESYKEKQRTIQAKKEVEQRRAGGYSRKYASKAKNLADDMVRNTARDLLYYAVTQDAMLIFENLSRGFGRQGKRTFMAERQYTRMEDWLTAKLAYEGLPSKTYLSKTLAQYTSKTCSNCGFTITSADYDRVLEKLKKTATGWMTTINGKELKVEGQITYYNRYKRQNVVKDLSVELDRLSEESVNNDISSWTKGRSGEALSLLKKRFSHRPVQEKFVCLNCGFETHADEQAALNIARSWLFLRSQEYKKYQTNKTTGNTDKRAFVETWQSFYRKKLKEVWKPAV

SEQ ID NO: 47097 - protein, 979 aa, synthetic construct
  REGION 1..979: note = engineered CasX variant
QEIKRINKIRRRLVKDSNTKKAGKTGPMKTLLVRVMTPDLRERLENLRKKPENIPQPISNTSRANLNKLLTDYTEMKKAILHVYWEEFQKDPVGLMSRVAQPASKKIDQNKLKPEMDEKGNLTTAGFACSQCGQPLFVYKLEQVSEKGKAYTNYFGRCNVAEHEKLILLAQLKPEKDSDEAVTYSLGKFGQRALDFYSIHVTKESTHPVKPLAQIAGNRYASHPVGKALSDACMGTIASFLSKYQDIIIEHQKVVKGNQKRLESLRELAGKENLEYPSVTLPPQPHTKEGVDAYNEVIARVRMWVNLNLWQKLKLSRDDAKPLLRLKNFPSFPLVERQANEVDWWDMVCNVKKLINEKKEDGKVFWQNLAGYKRQEALRPYLSSEEDVRKKGKKFARYQLGDLLLHLEKKHGEDWGKVYDEAWERIDKKVEGLSKHIKLEEERRSEDAQSKAALTDWLRAKASFVIEGLKEADKDEFCRCELKLQKWYGDLRGKPFAIEAENSILDISGFSKQYNCAFIWQKDGVKKLNLYLIINYFKGGKLRFKKIKPEAFEANRFYTVINKKSGEIVPMEVNFNFDDPNLIILPLAFGKRQGREFIWNDLLSLETGSLKLANGRVIEKTLYNRRTRQDEPALFVALTFERREVLDSSNIKPMNLIGVDRGENIPAVIALTDPEGCPLSRFKDSLGNPTHILRIGESYKEKQRTIQAKKEVEQRRAGGYSRKYASKAKNLADDMVRNTARDLLYYAVTQDAMLIFENLSRGFGRQGKRTFMAERQYTRMEDWLTAKLAYEGLPSKTYLSKTLAQYTSKTCSNCGFTITSADYDRVLEKLKKTATGWMTTINGKELKVEGQITYYNRYKRQNVVKDLSVELDRLSEESVNNDISSWTKGRSGEALSLLKKRFSHRPVQEKFVCLNCGFETHADEQAALNIARSWLFLRSQEYKKYQTNKTTGNTDKRAFVETWQSFYRKKLKEVWKPAV

SEQ ID NO: 47098 - protein, 979 aa, synthetic construct
  REGION 1..979: note = engineered CasX variant
QEIKRINKIRRRLVKDSNTKKAGKTGPMKTLLVRVMTPDLRERLENLRKKPENIPQPISNTSRANLNKLLTDYTEMKKAILHVYWEEFQKDPVGLMSRVAQPASKKIDQNKLKPEMDEKGNLTTAGFACSQCGQPLFVYKLEQVSEKGKAYTNYFGRCNVAEHEKLILLAQLKPEKDSDEAVTYSLGKFGQRALDFYSIHVTKESTHPVKPLAQIAGNRYASSPVGKALSDACMGTIASFLSKYQDIIIEHQKVVKGNQKRLESLRELAGKENLEYPSVTLPPQPHTKEGVDAYNEVIARVRMWVNLNLWQKLKLSRDDAKPLLRLKNFPSFPLVERQANEVDWWDMVCNVKKLINEKKEDGKVFWQNLAGYKRQEALRPYLSSEEDVRKKGKKFARYQLGDLLLHLEKKHGEDWGKVYDEAWERIDKKVEGLSKHIKLEEERRSEDAQSKAALTDWLRAKASFVIEGLKEADKDEFCRCELKLQKWYGDLRGKPFAIEAENSILDISGFSKQYNCAFIWQKDGVKKLNLYLIINYFKGGKLRFKKIKPEAFEANRFYTVINKKSGEIVPMEVNFNFDDPNLIILPLAFGKRQGREFIWNDLLSLETGSLKLANGRVIEKTLYNRRTRQDEPALFVALTFERREVLDSSNIKPMNLIGVDRGENIPAVIALTDPEGCPLSRFKDSLGNPTHILRIGESYKEKQRTIQAKKEVEQRRAGGYSRKYASKAKNLADDMVRNTARDLLYYAVTQDAMLIFENLSRGFGRQGKRTFMAERQYTRMEDWLTAKLAYEGLPSKTYLSKTLAQYTSKTCSNCGFTITSADYDRVLEKLKKTATGWMTTINGKELKVEGQITYYNRYKRQNVVKDLSVELDRLSEESVNNDISSWTKGRSGEALSLLKKRFSHRPVQEKFVCLNCGFETHADEQAALNIARSWLFLRSQEYKKYQTNKTTGNTDKRAFVETWQSFYRKKLKEVWKPAV

SEQ ID NO: 47099 - protein, 979 aa, synthetic construct
  REGION 1..979: note = engineered CasX variant
QEIKRINKIRRRLVKDSNTKKAGKTGPMKTLLVRVMTPDLRERLENLRKKPENIPQPISNTSRANLNKLLTDYTEMKKAILHVYWEEFQKDPVGLMSRVAQPASKKIDQNKLKPEMDEKGNLTTAGFACSQCGQPLFVYKLEQVSEKGKAYTNYFGRCNVAEHEKLILLAQLKPEKDSDEAVTYSLGKFGQRALDFYSIHVTKESTHPVKPLAQIAGNRYASTPVGKALSDACMGTIASFLSKYQDIIIEHQKVVKGNQKRLESLRELAGKENLEYPSVTLPPQPHTKEGVDAYNEVIARVRMWVNLNLWQKLKLSRDDAKPLLRLKNFPSFPLVERQANEVDWWDMVCNVKKLINEKKEDGKVFWQNLAGYKRQEALRPYLSSEEDVRKKGKKFARYQLGDLLLHLEKKHGEDWGKVYDEAWERIDKKVEGLSKHIKLEEERRSEDAQSKAALTDWLRAKASFVIEGLKEADKDEFCRCELKLQKWYGDLRGKPFAIEAENSILDISGFSKQYNCAFIWQKDGVKKLNLYLIINYFKGGKLRFKKIKPEAFEANRFYTVINKKSGEIVPMEVNFNFDDPNLIILPLAFGKRQGREFIWNDLLSLETGSLKLANGRVIEKTLYNRRTRQDEPALFVALTFERREVLDSSNIKPMNLIGVDRGENIPAVIALTDPEGCPLSRFKDSLGNPTHILRIGESYKEKQRTIQAKKEVEQRRAGGYSRKYASKAKNLADDMVRNTARDLLYYAVTQDAMLIFENLSRGFGRQGKRTFMAERQYTRMEDWLTAKLAYEGLPSKTYLSKTLAQYTSKTCSNCGFTITSADYDRVLEKLKKTATGWMTTINGKELKVEGQITYYNRYKRQNVVKDLSVELDRLSEESVNNDISSWTKGRSGEALSLLKKRFSHRPVQEKFVCLNCGFETHADEQAALNIARSWLFLRSQEYKKYQTNKTTGNTDKRAFVETWQSFYRKKLKEVWKPAV

SEQ ID NO: 47100 - protein, 979 aa, synthetic construct
  REGION 1..979: note = engineered CasX variant
QEIKRINKIRRRLVKDSNTKKAGKTGPMKTLLVRVMTPDLRERLENLRKKPENIPQPISNTSRANLNKLLTDYTEMKKAILHVYWEEFQKDPVGLMSRVAQPASKKIDQNKLKPEMDEKGNLTTAGFACSQCGQPLFVYKLEQVSEKGKAYTNYFGRCNVAEHEKLILLAQLKPEKDSDEAVTYSLGKFGQRALDFYSIHVTKESTHPVKPLAQIAGNRYASAPVGKALSDACMGTIASFLSKYQDIIIEHQKVVKGNQKRLESLRELAGKENLEYPSVTLPPQPHTKEGVDAYNEVIARVRMWVNLNLWQKLKLSRDDAKPLLRLKNFPSFPLVERQANEVDWWDMVCNVKKLINEKKEDGKVFWQNLAGYKRQEALRPYLSSEEDVRKKGKKFARYQLGDLLLHLEKKHGEDWGKVYDEAWERIDKKVEGLSKHIKLEEERRSEDAQSKAALTDWLRAKASFVIEGLKEADKDEFCRCELKLQKWYGDLRGKPFAIEAENSILDISGFSKQYNCAFIWQKDGVKKLNLYLIINYFKGGKLRFKKIKPEAFEANRFYTVINKKSGEIVPMEVNFNFDDPNLIILPLAFGKRQGREFIWNDLLSLETGSLKLANGRVIEKTLYNRRTRQDEPALFVALTFERREVLDSSNIKPMNLIGVDRGENIPAVIALTDPEGCPLSRFKDSLGNPTHILRIGESYKEKQRTIQAKKEVEQRRAGGYSRKYASKAKNLADDMVRNTARDLLYYAVTQDAMLIFENLSRGFGRQGKRTFMAERQYTRMEDWLTAKLAYEGLPSKTYLSKTLAQYTSKTCSNCGFTITSADYDRVLEKLKKTATGWMTTINGKELKVEGQITYYNRYKRQNVVKDLSVELDRLSEESVNNDISSWTKGRSGEALSLLKKRFSHRPVQEKFVCLNCGFETHADEQAALNIARSWLFLRSQEYKKYQTNKTTGNTDKRAFVETWQSFYRKKLKEVWKPAV

SEQ ID NO: 47101 - protein, 979 aa, synthetic construct
  REGION 1..979: note = engineered CasX variant
QEIKRINKIRRRLVKDSNTKKAGKTGPMKTLLVRVMTPDLRERLENLRKKPENIPQPISNTSRANLNKLLTDYTEMKKAILHVYWEEFQKDPVGLMSRVAQPASKKIDQNKLKPEMDEKGNLTTAGFACSQCGQPLFVYKLEQVSEKGKAYTNYFGRCNVAEHEKLILLAQLKPEKDSDEAVTYSLGKFGQRALDFYSIHVTKESTHPVKPLAQIAGNRYASVPVGKALSDACMGTIASFLSKYQDIIIEHQKVVKGNQKRLESLRELAGKENLEYPSVTLPPQPHTKEGVDAYNEVIARVRMWVNLNLWQKLKLSRDDAKPLLRLKNFPSFPLVERQANEVDWWDMVCNVKKLINEKKEDGKVFWQNLAGYKRQEALRPYLSSEEDVRKKGKKFARYQLGDLLLHLEKKHGEDWGKVYDEAWERIDKKVEGLSKHIKLEEERRSEDAQSKAALTDWLRAKASFVIEGLKEADKDEFCRCELKLQKWYGDLRGKPFAIEAENSILDISGFSKQYNCAFIWQKDGVKKLNLYLIINYFKGGKLRFKKIKPEAFEANRFYTVINKKSGEIVPMEVNFNFDDPNLIILPLAFGKRQGREFIWNDLLSLETGSLKLANGRVIEKTLYNRRTRQDEPALFVALTFERREVLDSSNIKPMNLIGVDRGENIPAVIALTDPEGCPLSRFKDSLGNPTHILRIGESYKEKQRTIQAKKEVEQRRAGGYSRKYASKAKNLADDMVRNTARDLLYYAVTQDAMLIFENLSRGFGRQGKRTFMAERQYTRMEDWLTAKLAYEGLPSKTYLSKTLAQYTSKTCSNCGFTITSADYDRVLEKLKKTATGWMTTINGKELKVEGQITYYNRYKRQNVVKDLSVELDRLSEESVNNDISSWTKGRSGEALSLLKKRFSHRPVQEKFVCLNCGFETHADEQAALNIARSWLFLRSQEYKKYQTNKTTGNTDKRAFVETWQSFYRKKLKEVWKPAV

SEQ ID NO: 47102 - protein, 979 aa, synthetic construct
  REGION 1..979: note = engineered CasX variant
QEIKRINKIRRRLVKDSNTKKAGKTGPMKTLLVRVMTPDLRERLENLRKKPENIPQPISNTSRANLNKLLTDYTEMKKAILHVYWEEFQKDPVGLMSRVAQPASKKIDQNKLKPEMDEKGNLTTAGFACSQCGQPLFVYKLEQVSEKGKAYTNYFGRCNVAEHEKLIKLAQLKPEKDSDEAVTYSLGKFGQRALDFYSIHVTKESTHPVKPLAQIAGNRYASGPVGKALSDACMGTIASFLSKYQDIIIEHQKVVKGNQKRLESLRELAGKENLEYPSVTLPPQPHTKEGVDAYNEVIARVRMWVNLNLWQKLKLSRDDAKPLLRLKNFPSFPLVERQANEVDWWDMVCNVKKLINEKKEDGKVFWQNLAGYKRQEALRPYLSSEEDVRKKGKKFARYQLGDLLLHLEKKHGEDWGKVYDEAWERIDKKVEGLSKHIKLEEERRSEDAQSKAALTDWLRAKASFVIEGLKEADKDEFCRCELKLQKWYGDLRGKPFAIEAENSILDISGFSKQYNCAFIWQKDGVKKLNLYLIINYFKGGKLRFKKIKPEAFEANRFYTVINKKSGEIVPMEVNFNFDDPNLIILPLAFGKRQGREFIWNDLLSLETGSLKLANGRVIEKTLYNRRTRQDEPALFVALTFERREVLDSSNIKPMNLIGVDRGENIPAVIALTDPEGCPLSRFKDSLGNPTHILRIGESYKEKQRTIQAKKEVEQRRAGGYSRKYASKAKNLADDMVRNTARDLLYYAVTQDAMLIFENLSRGFGRQGKRTFMAERQYTRMEDWLTAKLAYEGLPSKTYLSKTLAQYTSKTCSNCGFTITSADYDRVLEKLKKTATGWMTTINGKELKVEGQITYYNRYKRQNVVKDLSVELDRLSEESVNNDISSWTKGRSGEALSLLKKRFSHRPVQEKFVCLNCGFETHADEQAALNIARSWLFLRSQEYKKYQTNKTTGNTDKRAFVETWQSFYRKKLKEVWKPAV

SEQ ID NO: 47103 - protein, 978 aa, synthetic construct
  REGION 1..978: note = engineered CasX variant
QEIKRINKIRRRLVKDSNTKKAGKTGPMKTLLVRVMTPDLRERLENLRKKPENIPQPISNTSRANLNKLLTDYTEMKKAILHVYWEEFQKDPVGLMSRVAQPASKKIDQNKLKPEMDEKGNLTTAGFACSQCGQPLFVYKLEQVSEKGKAYTNYFGRCNVAEHEKLILLAQLKPEKDSDEAVTYSLGKFGQRALDFYSIHVTKESTHPVKPLAQIAGNRYASPVGKALSDACMGTIASFLSKYQDIIIEHQKVVKGNQKRLESLRELAGKENLEYPSVTLPPQPHTKEGVDAYNEVIARVRMWVNLNLWQKLKLSRDDAKPLLRLKNFPSFPLVERQANEVDWWDMVCNVKKLINEKKEDGKVFWQNLAGYKRQEALRPYLSSEEDVRKKGKKFARYQLGDLLLHLEKKHGEDWGKVYDEAWERIDKKVEGLSKHIKLEEERRSEDAQSKAALTDWLRAKASFVIEGLKEADKDEFCRCELKLQKWYGDLRGKPFAIEAENSILDISGFSKQYNCAFIWQKDGVKKLNLYLIINYFKGGKLRFKKIKPEAFEANRFYTVINKKSGEIVPMEVNFNFDDPNLIILPLAFGKRQGREFIWNDLLSLETGSLKLANGRVIEKTLYNRRTRQDEPALFVALTFERREVLDSSNIKPMNLIGVDRGENIPAVIALTDPEGCPLSRFKDSLGNPTHILRIGESYKEKQRTIQAKKEVEQRRAGGYSRKYASKAKNLADDMVRNTARDLLYYAVTQDAMLIFENLSRGFGRQGKRTFMAERQYTRMEDWLTAKLAYEGLPSKTYLSKTLAQYTSKTCSNCGFTITSADYDRVLEKLKKTATGWMTTINGKELKVEGQITYYNRYKRQNVVKDLSVELDRLSEESVNNDISSWTKGRSGEALSLLKKRFSHRPVQEKFVCLNCGFETHADEQAALNIARSWLFLRSQEYKKYQTNKTTGNTDKRAFVETWQSFYRKKLKEVWKPAV

SEQ ID NO: 47104 - protein, 979 aa, synthetic construct
  REGION 1..979: note = engineered CasX variant
QEIKRINKIRRRLVKDSNTKKAGKTGPMKTLLVRVMTPDLRERLENLRKKPENIPQPISNTSRANLNKLLTDYTEMKKAILHVYWEEFQKDPVGLMSRVAQPASKKIDQNKLKPEMDEKGNLTTAGFACSQCGQPLFVYKLEQVSEKGKAYTNYFGRCNVAEHEKLILLAQLKPEKDSDEAVTYSLGKFGQRALDFYSIHVTKESTHPVKPLAQIAGNRYASYPVGKALSDACMGTIASFLSKYQDIIIEHQKVVKGNQKRLESLRELAGKENLEYPSVTLPPQPHTKEGVDAYNEVIARVRMWVNLNLWQKLKLSRDDAKPLLRLKGFPSFPLVERQANEVDWWDMVCNVKKLINEKKEDGKVFWQNLAGYKRQEALRPYLSSEEDVRKKGKKFARYQLGDLLNHLEKKHGEDWGKVYDEAWERIDKKVEGLSKHIKLEEERRSEDAQSKAALTDWLRAKASFVIEGLKEADKDEFCRCELKLQKWYGDLRGKPFAIEAENSILDISGFSKQYNCAFIWQKDGVKKLNLYLIINYFKGGKLRFKKIKPEAFEANRFYTVINKKSGEIVPMEVNFNFDDPNLIILPLAFGKRQGREFIWNDLLSLETGSLKLANGRVIEKTLYNRRTRQDEPALFVALTFERREVLDSSNIKPMNLIGVDRGENIPAVIALTDPEGCPLSRFKDSLGNPTHILRIGESYKEKQRTIQAKKEVEQRRAGGYSRKYASKAKNLADDMVRNTARDLLYYAVTQDAMLIFENLSRGFGRQGKRTFMAERQYTRMEDWLTAKLAYEGLPSKTYLSKTLAQYTSKTCSNCGFTITSADYDRVLEKLKKTATGWMTTINGKELKVEGQITYYNRYKRQNVVKDLSVELDRLSEESVNNDISSWTKGRSGEALSLLKKRFSHRPVQEKFVCLNCGFETHADEQAALNIARSWLFLRSQEYKKYQTNKTTGNTDKRAFVETWQSFYRKKLKEVWKPAV

SEQ ID NO: 47105 - protein, 979 aa, synthetic construct
  REGION 1..979: note = engineered CasX variant
QEIKRINKIRRRLVKDSNTKKAGKTGPMKTLLVRVMTPDLRERLENLRKKPENIPQPISNTSRANLNKLLTDYTEMKKAILHVYWEEFQKDPVGLMSRVAQPASKKIDQNKLKPEMDEKGNLTTAGFACSQCGQPLFVYKLEQVSEKGKAYTNYFGRCNVAEHEKLILLAQLKPEKDSDEAVTYSLGKFGQRALDFYSIHVTKESTHPVKPLAQIAGNRYASHPVGKALSDACMGTIASFLSKYQDIIIEHQKVVKGNQKRLESLRELAGKENLEYPSVTLPPQPHTKEGVDAYNEVIARVRMWVNLNLWQKLKLSRDDAKPLLRLKGFPSFPLVERQANEVDWWDMVCNVKKLINEKKEDGKVFWQNLAGYKRQEALRPYLSSEEDVRKKGKKFARYQLGDLLNHLEKKHGEDWGKVYDEAWERIDKKVEGLSKHIKLEEERRSEDAQSKAALTDWLRAKASFVIEGLKEADKDEFCRCELKLQKWYGDLRGKPFAIEAENSILDISGFSKQYNCAFIWQKDGVKKLNLYLIINYFKGGKLRFKKIKPEAFEANRFYTVINKKSGEIVPMEVNFNFDDPNLIILPLAFGKRQGREFIWNDLLSLETGSLKLANGRVIEKTLYNRRTRQDEPALFVALTFERREVLDSSNIKPMNLIGVDRGENIPAVIALTDPEGCPLSRFKDSLGNPTHILRIGESYKEKQRTIQAKKEVEQRRAGGYSRKYASKAKNLADDMVRNTARDLLYYAVTQDAMLIFENLSRGFGRQGKRTFMAERQYTRMEDWLTAKLAYEGLPSKTYLSKTLAQYTSKTCSNCGFTITSADYDRVLEKLKKTATGWMTTINGKELKVEGQITYYNRYKRQNVVKDLSVELDRLSEESVNNDISSWTKGRSGEALSLLKKRFSHRPVQEKFVCLNCGFETHADEQAALNIARSWLFLRSQEYKKYQTNKTTGNTDKRAFVETWQSFYRKKLKEVWKPAV

SEQ ID NO: 47106 - protein, 979 aa, synthetic construct
  REGION 1..979: note = engineered CasX variant
QEIKRINKIRRRLVKDSNTKKAGKTGPMKTLLVRVMTPDLRERLENLRKKPENIPQPISNTSRANLNKLLTDYTEMKKAILHVYWEEFQKDPVGLMSRVAQPASKKIDQNKLKPEMDEKGNLTTAGFACSQCGQPLFVYKLEQVSEKGKAYTNYFGRCNVAEHEKLILLAQLKPEKDSDEAVTYSLGKFGQRALDFYSIHVTKESTHPVKPLAQIAGNRYASSPVGKALSDACMGTIASFLSKYQDIIIEHQKVVKGNQKRLESLRELAGKENLEYPSVTLPPQPHTKEGVDAYNEVIARVRMWVNLNLWQKLKLSRDDAKPLLRLKGFPSFPLVERQANEVDWWDMVCNVKKLINEKKEDGKVFWQNLAGYKRQEALRPYLSSEEDVRKKGKKFARYQLGDLLNHLEKKHGEDWGKVYDEAWERIDKKVEGLSKHIKLEEERRSEDAQSKAALTDWLRAKASFVIEGLKEADKDEFCRCELKLQKWYGDLRGKPFAIEAENSILDISGFSKQYNCAFIWQKDGVKKLNLYLIINYFKGGKLRFKKIKPEAFEANRFYTVINKKSGEIVPMEVNFNFDDPNLIILPLAFGKRQGREFIWNDLLSLETGSLKLANGRVIEKTLYNRRTRQDEPALFVALTFERREVLDSSNIKPMNLIGVDRGENIPAVIALTDPEGCPLSRFKDSLGNPTHILRIGESYKEKQRTIQAKKEVEQRRAGGYSRKYASKAKNLADDMVRNTARDLLYYAVTQDAMLIFENLSRGFGRQGKRTFMAERQYTRMEDWLTAKLAYEGLPSKTYLSKTLAQYTSKTCSNCGFTITSADYDRVLEKLKKTATGWMTTINGKELKVEGQITYYNRYKRQNVVKDLSVELDRLSEESVNNDISSWTKGRSGEALSLLKKRFSHRPVQEKFVCLNCGFETHADEQAALNIARSWLFLRSQEYKKYQTNKTTGNTDKRAFVETWQSFYRKKLKEVWKPAV

SEQ ID NO: 47107 - protein, 979 aa, synthetic construct
  REGION 1..979: note = engineered CasX variant
QEIKRINKIRRRLVKDSNTKKAGKTGPMKTLLVRVMTPDLRERLENLRKKPENIPQPISNTSRANLNKLLTDYTEMKKAILHVYWEEFQKDPVGLMSRVAQPASKKIDQNKLKPEMDEKGNLTTAGFACSQCGQPLFVYKLEQVSEKGKAYTNYFGRCNVAEHEKLILLAQLKPEKDSDEAVTYSLGKFGQRALDFYSIHVTKESTHPVKPLAQIAGNRYASTPVGKALSDACMGTIASFLSKYQDIIIEHQKVVKGNQKRLESLRELAGKENLEYPSVTLPPQPHTKEGVDAYNEVIARVRMWVNLNLWQKLKLSRDDAKPLLRLKGFPSFPLVERQANEVDWWDMVCNVKKLINEKKEDGKVFWQNLAGYKRQEALRPYLSSEEDVRKKGKKFARYQLGDLLNHLEKKHGEDWGKVYDEAWERIDKKVEGLSKHIKLEEERRSEDAQSKAALTDWLRAKASFVIEGLKEADKDEFCRCELKLQKWYGDLRGKPFAIEAENSILDISGFSKQYNCAFIWQKDGVKKLNLYLIINYFKGGKLRFKKIKPEAFEANRFYTVINKKSGEIVPMEVNFNFDDPNLIILPLAFGKRQGREFIWNDLLSLETGSLKLANGRVIEKTLYNRRTRQDEPALFVALTFERREVLDSSNIKPMNLIGVDRGENIPAVIALTDPEGCPLSRFKDSLGNPTHILRIGESYKEKQRTIQAKKEVEQRRAGGYSRKYASKAKNLADDMVRNTARDLLYYAVTQDAMLIFENLSRGFGRQGKRTFMAERQYTRMEDWLTAKLAYEGLPSKTYLSKTLAQYTSKTCSNCGFTITSADYDRVLEKLKKTATGWMTTINGKELKVEGQITYYNRYKRQNVVKDLSVELDRLSEESVNNDISSWTKGRSGEALSLLKKRFSHRPVQEKFVCLNCGFETHADEQAALNIARSWLFLRSQEYKKYQTNKTTGNTDKRAFVETWQSFYRKKLKEVWKPAV

SEQ ID NO: 47108 - protein, 979 aa, synthetic construct
  REGION 1..979: note = engineered CasX variant
QEIKRINKIRRRLVKDSNTKKAGKTGPMKTLLVRVMTPDLRERLENLRKKPENIPQPISNTSRANLNKLLTDYTEMKKAILHVYWEEFQKDPVGLMSRVAQPASKKIDQNKLKPEMDEKGNLTTAGFACSQCGQPLFVYKLEQVSEKGKAYTNYFGRCNVAEHEKLILLAQLKPEKDSDEAVTYSLGKFGQRALDFYSIHVTKESTHPVKPLAQIAGNRYASAPVGKALSDACMGTIASFLSKYQDIIIEHQKVVKGNQKRLESLRELAGKENLEYPSVTLPPQPHTKEGVDAYNEVIARVRMWVNLNLWQKLKLSRDDAKPLLRLKGFPSFPLVERQANEVDWWDMVCNVKKLINEKKEDGKVFWQNLAGYKRQEALRPYLSSEEDVRKKGKKFARYQLGDLLNHLEKKHGEDWGKVYDEAWERIDKKVEGLSKHIKLEEERRSEDAQSKAALTDWLRAKASFVIEGLKEADKDEFCRCELKLQKWYGDLRGKPFAIEAENSILDISGFSKQYNCAFIWQKDGVKKLNLYLIINYFKGGKLRFKKIKPEAFEANRFYTVINKKSGEIVPMEVNFNFDDPNLIILPLAFGKRQGREFIWNDLLSLETGSLKLANGRVIEKTLYNRRTRQDEPALFVALTFERREVLDSSNIKPMNLIGVDRGENIPAVIALTDPEGCPLSRFKDSLGNPTHILRIGESYKEKQRTIQAKKEVEQRRAGGYSRKYASKAKNLADDMVRNTARDLLYYAVTQDAMLIFENLSRGFGRQGKRTFMAERQYTRMEDWLTAKLAYEGLPSKTYLSKTLAQYTSKTCSNCGFTITSADYDRVLEKLKKTATGWMTTINGKELKVEGQITYYNRYKRQNVVKDLSVELDRLSEESVNNDISSWTKGRSGEALSLLKKRFSHRPVQEKFVCLNCGFETHADEQAALNIARSWLFLRSQEYKKYQTNKTTGNTDKRAFVETWQSFYRKKLKEVWKPAV

SEQ ID NO: 47109 - protein, 979 aa, synthetic construct
  REGION 1..979: note = engineered CasX variant
QEIKRINKIRRRLVKDSNTKKAGKTGPMKTLLVRVMTPDLRERLENLRKKPENIPQPISNTSRANLNKLLTDYTEMKKAILHVYWEEFQKDPVGLMSRVAQPASKKIDQNKLKPEMDEKGNLTTAGFACSQCGQPLFVYKLEQVSEKGKAYTNYFGRCNVAEHEKLILLAQLKPEKDSDEAVTYSLGKFGQRALDFYSIHVTKESTHPVKPLAQIAGNRYASVPVGKALSDACMGTIASFLSKYQDIIIEHQKVVKGNQKRLESLRELAGKENLEYPSVTLPPQPHTKEGVDAYNEVIARVRMWVNLNLWQKLKLSRDDAKPLLRLKGFPSFPLVERQANEVDWWDMVCNVKKLINEKKEDGKVFWQNLAGYKRQEALRPYLSSEEDVRKKGKKFARYQLGDLLNHLEKKHGEDWGKVYDEAWERIDKKVEGLSKHIKLEEERRSEDAQSKAALTDWLRAKASFVIEGLKEADKDEFCRCELKLQKWYGDLRGKPFAIEAENSILDISGFSKQYNCAFIWQKDGVKKLNLYLIINYFKGGKLRFKKIKPEAFEANRFYTVINKKSGEIVPMEVNFNFDDPNLIILPLAFGKRQGREFIWNDLLSLETGSLKLANGRVIEKTLYNRRTRQDEPALFVALTFERREVLDSSNIKPMNLIGVDRGENIPAVIALTDPEGCPLSRFKDSLGNPTHILRIGESYKEKQRTIQAKKEVEQRRAGGYSRKYASKAKNLADDMVRNTARDLLYYAVTQDAMLIFENLSRGFGRQGKRTFMAERQYTRMEDWLTAKLAYEGLPSKTYLSKTLAQYTSKTCSNCGFTITSADYDRVLEKLKKTATGWMTTINGKELKVEGQITYYNRYKRQNVVKDLSVELDRLSEESVNNDISSWTKGRSGEALSLLKKRFSHRPVQEKFVCLNCGFETHADEQAALNIARSWLFLRSQEYKKYQTNKTTGNTDKRAFVETWQSFYRKKLKEVWKPAV

SEQ ID NO: 47110 - protein, 979 aa, synthetic construct
  REGION 1..979: note = engineered CasX variant
QEIKRINKIRRRLVKDSNTKKAGKTGPMKTLLVRVMTPDLRERLENLRKKPENIPQPISNTSRANLNKLLTDYTEMKKAILHVYWEEFQKDPVGLMSRVAQPASKKIDQNKLKPEMDEKGNLTTAGFACSQCGQPLFVYKLEQVSEKGKAYTNYFGRCNVAEHEKLIKLAQLKPEKDSDEAVTYSLGKFGQRALDFYSIHVTKESTHPVKPLAQIAGNRYASGPVGKALSDACMGTIASFLSKYQDIIIEHQKVVKGNQKRLESLRELAGKENLEYPSVTLPPQPHTKEGVDAYNEVIARVRMWVNLNLWQKLKLSRDDAKPLLRLKGFPSFPLVERQANEVDWWDMVCNVKKLINEKKEDGKVFWQNLAGYKRQEALRPYLSSEEDVRKKGKKFARYQLGDLLNHLEKKHGEDWGKVYDEAWERIDKKVEGLSKHIKLEEERRSEDAQSKAALTDWLRAKASFVIEGLKEADKDEFCRCELKLQKWYGDLRGKPFAIEAENSILDISGFSKQYNCAFIWQKDGVKKLNLYLIINYFKGGKLRFKKIKPEAFEANRFYTVINKKSGEIVPMEVNFNFDDPNLIILPLAFGKRQGREFIWNDLLSLETGSLKLANGRVIEKTLYNRRTRQDEPALFVALTFERREVLDSSNIKPMNLIGVDRGENIPAVIALTDPEGCPLSRFKDSLGNPTHILRIGESYKEKQRTIQAKKEVEQRRAGGYSRKYASKAKNLADDMVRNTARDLLYYAVTQDAMLIFENLSRGFGRQGKRTFMAERQYTRMEDWLTAKLAYEGLPSKTYLSKTLAQYTSKTCSNCGFTITSADYDRVLEKLKKTATGWMTTINGKELKVEGQITYYNRYKRQNVVKDLSVELDRLSEESVNNDISSWTKGRSGEALSLLKKRFSHRPVQEKFVCLNCGFETHADEQAALNIARSWLFLRSQEYKKYQTNKTTGNTDKRAFVETWQSFYRKKLKEVWKPAV

SEQ ID NO: 47111 - protein, 978 aa, synthetic construct
  REGION 1..978: note = engineered CasX variant
QEIKRINKIRRRLVKDSNTKKAGKTGPMKTLLVRVMTPDLRERLENLRKKPENIPQPISNTSRANLNKLLTDYTEMKKAILHVYWEEFQKDPVGLMSRVAQPASKKIDQNKLKPEMDEKGNLTTAGFACSQCGQPLFVYKLEQVSEKGKAYTNYFGRCNVAEHEKLILLAQLKPEKDSDEAVTYSLGKFGQRALDFYSIHVTKESTHPVKPLAQIAGNRYASPVGKALSDACMGTIASFLSKYQDIIIEHQKVVKGNQKRLESLRELAGKENLEYPSVTLPPQPHTKEGVDAYNEVIARVRMWVNLNLWQKLKLSRDDAKPLLRLKGFPSFPLVERQANEVDWWDMVCNVKKLINEKKEDGKVFWQNLAGYKRQEALRPYLSSEEDVRKKGKKFARYQLGDLLNHLEKKHGEDWGKVYDEAWERIDKKVEGLSKHIKLEEERRSEDAQSKAALTDWLRAKASFVIEGLKEADKDEFCRCELKLQKWYGDLRGKPFAIEAENSILDISGFSKQYNCAFIWQKDGVKKLNLYLIINYFKGGKLRFKKIKPEAFEANRFYTVINKKSGEIVPMEVNFNFDDPNLIILPLAFGKRQGREFIWNDLLSLETGSLKLANGRVIEKTLYNRRTRQDEPALFVALTFERREVLDSSNIKPMNLIGVDRGENIPAVIALTDPEGCPLSRFKDSLGNPTHILRIGESYKEKQRTIQAKKEVEQRRAGGYSRKYASKAKNLADDMVRNTARDLLYYAVTQDAMLIFENLSRGFGRQGKRTFMAERQYTRMEDWLTAKLAYEGLPSKTYLSKTLAQYTSKTCSNCGFTITSADYDRVLEKLKKTATGWMTTINGKELKVEGQITYYNRYKRQNVVKDLSVELDRLSEESVNNDISSWTKGRSGEALSLLKKRFSHRPVQEKFVCLNCGFETHADEQAALNIARSWLFLRSQEYKKYQTNKTTGNTDKRAFVETWQSFYRKKLKEVWKPAV

SEQ ID NO: 47112 - protein, 979 aa, synthetic construct
  REGION 1..979: note = engineered CasX variant
QEIKRINKIRRRLVKDSNTKKAGKTGPMKTLLVRVMTPDLRERLENLRKKPENIPQPISNTSRANLNKLLTDYTEMKKAILHVYWEEFQKDPVGLMSRVAQPASKKIDQNKLKPEMDEKGNLTTAGFACSQCGQPLFVYKLEQVSEKGKAYTNYFGRCNVAEHEKLILLAQLKPEKDSDEAVTYSLGKFGQRALDFYSIHVTKESTHPVKPLAQIAGNRYASYPVGKALSDACMGTIASFLSKYQDIIIEHQKVVKGNQKRLESLRELAGKENLEYPSVTLPPQPHTKEGVDAYNEVIARVRMWVNLNLWQKLKLSRDDAKPLLRLKGFPSFPLVERQANEVDWWDMVCNVKKLINEKKEDGKVFWQNLAGYKRQEALRPYLSSEEDVRKKGKKFARYQLGDLLWHLEKKHGEDWGKVYDEAWERIDKKVEGLSKHIKLEEERRSEDAQSKAALTDWLRAKASFVIEGLKEADKDEFCRCELKLQKWYGDLRGKPFAIEAENSILDISGFSKQYNCAFIWQKDGVKKLNLYLIINYFKGGKLRFKKIKPEAFEANRFYTVINKKSGEIVPMEVNFNFDDPNLIILPLAFGKRQGREFIWNDLLSLETGSLKLANGRVIEKTLYNRRTRQDEPALFVALTFERREVLDSSNIKPMNLIGVDRGENIPAVIALTDPEGCPLSRFKDSLGNPTHILRIGESYKEKQRTIQAKKEVEQRRAGGYSRKYASKAKNLADDMVRNTARDLLYYAVTQDAMLIFENLSRGFGRQGKRTFMAERQYTRMEDWLTAKLAYEGLPSKTYLSKTLAQYTSKTCSNCGFTITSADYDRVLEKLKKTATGWMTTINGKELKVEGQITYYNRYKRQNVVKDLSVELDRLSEESVNNDISSWTKGRSGEALSLLKKRFSHRPVQEKFVCLNCGFETHADEQAALNIARSWLFLRSQEYKKYQTNKTTGNTDKRAFVETWQSFYRKKLKEVWKPAV

SEQ ID NO: 47113 - protein, 979 aa, synthetic construct
  REGION 1..979: note = engineered CasX variant
QEIKRINKIRRRLVKDSNTKKAGKTGPMKTLLVRVMTPDLRERLENLRKKPENIPQPISNTSRANLNKLLTDYTEMKKAILHVYWEEFQKDPVGLMSRVAQPASKKIDQNKLKPEMDEKGNLTTAGFACSQCGQPLFVYKLEQVSEKGKAYTNYFGRCNVAEHEKLILLAQLKPEKDSDEAVTYSLGKFGQRALDFYSIHVTKESTHPVKPLAQIAGNRYASHPVGKALSDACMGTIASFLSKYQDIIIEHQKVVKGNQKRLESLRELAGKENLEYPSVTLPPQPHTKEGVDAYNEVIARVRMWVNLNLWQKLKLSRDDAKPLLRLKGFPSFPLVERQANEVDWWDMVCNVKKLINEKKEDGKVFWQNLAGYKRQEALRPYLSSEEDVRKKGKKFARYQLGDLLWHLEKKHGEDWGKVYDEAWERIDKKVEGLSKHIKLEEERRSEDAQSKAALTDWLRAKASFVIEGLKEADKDEFCRCELKLQKWYGDLRGKPFAIEAENSILDISGFSKQYNCAFIWQKDGVKKLNLYLIINYFKGGKLRFKKIKPEAFEANRFYTVINKKSGEIVPMEVNFNFDDPNLIILPLAFGKRQGREFIWNDLLSLETGSLKLANGRVIEKTLYNRRTRQDEPALFVALTFERREVLDSSNIKPMNLIGVDRGENIPAVIALTDPEGCPLSRFKDSLGNPTHILRIGESYKEKQRTIQAKKEVEQRRAGGYSRKYASKAKNLADDMVRNTARDLLYYAVTQDAMLIFENLSRGFGRQGKRTFMAERQYTRMEDWLTAKLAYEGLPSKTYLSKTLAQYTSKTCSNCGFTITSADYDRVLEKLKKTATGWMTTINGKELKVEGQITYYNRYKRQNVVKDLSVELDRLSEESVNNDISSWTKGRSGEALSLLKKRFSHRPVQEKFVCLNCGFETHADEQAALNIARSWLFLRSQEYKKYQTNKTTGNTDKRAFVETWQSFYRKKLKEVWKPAV

SEQ ID NO: 47114 - protein, 979 aa, synthetic construct
  REGION 1..979: note = engineered CasX variant
QEIKRINKIRRRLVKDSNTKKAGKTGPMKTLLVRVMTPDLRERLENLRKKPENIPQPISNTSRANLNKLLTDYTEMKKAILHVYWEEFQKDPVGLMSRVAQPASKKIDQNKLKPEMDEKGNLTTAGFACSQCGQPLFVYKLEQVSEKGKAYTNYFGRCNVAEHEKLILLAQLKPEKDSDEAVTYSLGKFGQRALDFYSIHVTKESTHPVKPLAQIAGNRYASSPVGKALSDACMGTIASFLSKYQDIIIEHQKVVKGNQKRLESLRELAGKENLEYPSVTLPPQPHTKEGVDAYNEVIARVRMWVNLNLWQKLKLSRDDAKPLLRLKGFPSFPLVERQANEVDWWDMVCNVKKLINEKKEDGKVFWQNLAGYKRQEALRPYLSSEEDVRKKGKKFARYQLGDLLWHLEKKHGEDWGKVYDEAWERIDKKVEGLSKHIKLEEERRSEDAQSKAALTDWLRAKASFVIEGLKEADKDEFCRCELKLQKWYGDLRGKPFAIEAENSILDISGFSKQYNCAFIWQKDGVKKLNLYLIINYFKGGKLRFKKIKPEAFEANRFYTVINKKSGEIVPMEVNFNFDDPNLIILPLAFGKRQGREFIWNDLLSLETGSLKLANGRVIEKTLYNRRTRQDEPALFVALTFERREVLDSSNIKPMNLIGVDRGENIPAVIALTDPEGCPLSRFKDSLGNPTHILRIGESYKEKQRTIQAKKEVEQRRAGGYSRKYASKAKNLADDMVRNTARDLLYYAVTQDAMLIFENLSRGFGRQGKRTFMAERQYTRMEDWLTAKLAYEGLPSKTYLSKTLAQYTSKTCSNCGFTITSADYDRVLEKLKKTATGWMTTINGKELKVEGQITYYNRYKRQNVVKDLSVELDRLSEESVNNDISSWTKGRSGEALSLLKKRFSHRPVQEKFVCLNCGFETHADEQAALNIARSWLFLRSQEYKKYQTNKTTGNTDKRAFVETWQSFYRKKLKEVWKPAV

SEQ ID NO: 47115 - protein, 979 aa, synthetic construct
  REGION 1..979: note = engineered CasX variant
QEIKRINKIRRRLVKDSNTKKAGKTGPMKTLLVRVMTPDLRERLENLRKKPENIPQPISNTSRANLNKLLTDYTEMKKAILHVYWEEFQKDPVGLMSRVAQPASKKIDQNKLKPEMDEKGNLTTAGFACSQCGQPLFVYKLEQVSEKGKAYTNYFGRCNVAEHEKLILLAQLKPEKDSDEAVTYSLGKFGQRALDFYSIHVTKESTHPVKPLAQIAGNRYASTPVGKALSDACMGTIASFLSKYQDIIIEHQKVVKGNQKRLESLRELAGKENLEYPSVTLPPQPHTKEGVDAYNEVIARVRMWVNLNLWQKLKLSRDDAKPLLRLKGFPSFPLVERQANEVDWWDMVCNVKKLINEKKEDGKVFWQNLAGYKRQEALRPYLSSEEDVRKKGKKFARYQLGDLLWHLEKKHGEDWGKVYDEAWERIDKKVEGLSKHIKLEEERRSEDAQSKAALTDWLRAKASFVIEGLKEADKDEFCRCELKLQKWYGDLRGKPFAIEAENSILDISGFSKQYNCAFIWQKDGVKKLNLYLIINYFKGGKLRFKKIKPEAFEANRFYTVINKKSGEIVPMEVNFNFDDPNLIILPLAFGKRQGREFIWNDLLSLETGSLKLANGRVIEKTLYNRRTRQDEPALFVALTFERREVLDSSNIKPMNLIGVDRGENIPAVIALTDPEGCPLSRFKDSLGNPTHILRIGESYKEKQRTIQAKKEVEQRRAGGYSRKYASKAKNLADDMVRNTARDLLYYAVTQDAMLIFENLSRGFGRQGKRTFMAERQYTRMEDWLTAKLAYEGLPSKTYLSKTLAQYTSKTCSNCGFTITSADYDRVLEKLKKTATGWMTTINGKELKVEGQITYYNRYKRQNVVKDLSVELDRLSEESVNNDISSWTKGRSGEALSLLKKRFSHRPVQEKFVCLNCGFETHADEQAALNIARSWLFLRSQEYKKYQTNKTTGNTDKRAFVETWQSFYRKKLKEVWKPAV

SEQ ID NO: 47116 - protein, 979 aa, synthetic construct
  REGION 1..979: note = engineered CasX variant
QEIKRINKIRRRLVKDSNTKKAGKTGPMKTLLVRVMTPDLRERLENLRKKPENIPQPISNTSRANLNKLLTDYTEMKKAILHVYWEEFQKDPVGLMSRVAQPASKKIDQNKLKPEMDEKGNLTTAGFACSQCGQPLFVYKLEQVSEKGKAYTNYFGRCNVAEHEKLILLAQLKPEKDSDEAVTYSLGKFGQRALDFYSIHVTKESTHPVKPLAQIAGNRYASAPVGKALSDACMGTIASFLSKYQDIIIEHQKVVKGNQKRLESLRELAGKENLEYPSVTLPPQPHTKEGVDAYNEVIARVRMWVNLNLWQKLKLSRDDAKPLLRLKGFPSFPLVERQANEVDWWDMVCNVKKLINEKKEDGKVFWQNLAGYKRQEALRPYLSSEEDVRKKGKKFARYQLGDLLWHLEKKHGEDWGKVYDEAWERIDKKVEGLSKHIKLEEERRSEDAQSKAALTDWLRAKASFVIEGLKEADKDEFCRCELKLQKWYGDLRGKPFAIEAENSILDISGFSKQYNCAFIWQKDGVKKLNLYLIINYFKGGKLRFKKIKPEAFEANRFYTVINKKSGEIVPMEVNFNFDDPNLIILPLAFGKRQGREFIWNDLLSLETGSLKLANGRVIEKTLYNRRTRQDEPALFVALTFERREVLDSSNIKPMNLIGVDRGENIPAVIALTDPEGCPLSRFKDSLGNPTHILRIGESYKEKQRTIQAKKEVEQRRAGGYSRKYASKAKNLADDMVRNTARDLLYYAVTQDAMLIFENLSRGFGRQGKRTFMAERQYTRMEDWLTAKLAYEGLPSKTYLSKTLAQYTSKTCSNCGFTITSADYDRVLEKLKKTATGWMTTINGKELKVEGQITYYNRYKRQNVVKDLSVELDRLSEESVNNDISSWTKGRSGEALSLLKKRFSHRPVQEKFVCLNCGFETHADEQAALNIARSWLFLRSQEYKKYQTNKTTGNTDKRAFVETWQSFYRKKLKEVWKPAV

SEQ ID NO: 47117 - protein, 979 aa, synthetic construct
  REGION 1..979: note = engineered CasX variant
QEIKRINKIRRRLVKDSNTKKAGKTGPMKTLLVRVMTPDLRERLENLRKKPENIPQPISNTSRANLNKLLTDYTEMKKAILHVYWEEFQKDPVGLMSRVAQPASKKIDQNKLKPEMDEKGNLTTAGFACSQCGQPLFVYKLEQVSEKGKAYTNYFGRCNVAEHEKLILLAQLKPEKDSDEAVTYSLGKFGQRALDFYSIHVTKESTHPVKPLAQIAGNRYASVPVGKALSDACMGTIASFLSKYQDIIIEHQKVVKGNQKRLESLRELAGKENLEYPSVTLPPQPHTKEGVDAYNEVIARVRMWVNLNLWQKLKLSRDDAKPLLRLKGFPSFPLVERQANEVDWWDMVCNVKKLINEKKEDGKVFWQNLAGYKRQEALRPYLSSEEDVRKKGKKFARYQLGDLLWHLEKKHGEDWGKVYDEAWERIDKKVEGLSKHIKLEEERRSEDAQSKAALTDWLRAKASFVIEGLKEADKDEFCRCELKLQKWYGDLRGKPFAIEAENSILDISGFSKQYNCAFIWQKDGVKKLNLYLIINYFKGGKLRFKKIKPEAFEANRFYTVINKKSGEIVPMEVNFNFDDPNLIILPLAFGKRQGREFIWNDLLSLETGSLKLANGRVIEKTLYNRRTRQDEPALFVALTFERREVLDSSNIKPMNLIGVDRGENIPAVIALTDPEGCPLSRFKDSLGNPTHILRIGESYKEKQRTIQAKKEVEQRRAGGYSRKYASKAKNLADDMVRNTARDLLYYAVTQDAMLIFENLSRGFGRQGKRTFMAERQYTRMEDWLTAKLAYEGLPSKTYLSKTLAQYTSKTCSNCGFTITSADYDRVLEKLKKTATGWMTTINGKELKVEGQITYYNRYKRQNVVKDLSVELDRLSEESVNNDISSWTKGRSGEALSLLKKRFSHRPVQEKFVCLNCGFETHADEQAALNIARSWLFLRSQEYKKYQTNKTTGNTDKRAFVETWQSFYRKKLKEVWKPAV

SEQ ID NO: 47118 - protein, 979 aa, synthetic construct
  REGION 1..979: note = engineered CasX variant
QEIKRINKIRRRLVKDSNTKKAGKTGPMKTLLVRVMTPDLRERLENLRKKPENIPQPISNTSRANLNKLLTDYTEMKKAILHVYWEEFQKDPVGLMSRVAQPASKKIDQNKLKPEMDEKGNLTTAGFACSQCGQPLFVYKLEQVSEKGKAYTNYFGRCNVAEHEKLIKLAQLKPEKDSDEAVTYSLGKFGQRALDFYSIHVTKESTHPVKPLAQIAGNRYASGPVGKALSDACMGTIASFLSKYQDIIIEHQKVVKGNQKRLESLRELAGKENLEYPSVTLPPQPHTKEGVDAYNEVIARVRMWVNLNLWQKLKLSRDDAKPLLRLKGFPSFPLVERQANEVDWWDMVCNVKKLINEKKEDGKVFWQNLAGYKRQEALRPYLSSEEDVRKKGKKFARYQLGDLLWHLEKKHGEDWGKVYDEAWERIDKKVEGLSKHIKLEEERRSEDAQSKAALTDWLRAKASFVIEGLKEADKDEFCRCELKLQKWYGDLRGKPFAIEAENSILDISGFSKQYNCAFIWQKDGVKKLNLYLIINYFKGGKLRFKKIKPEAFEANRFYTVINKKSGEIVPMEVNFNFDDPNLIILPLAFGKRQGREFIWNDLLSLETGSLKLANGRVIEKTLYNRRTRQDEPALFVALTFERREVLDSSNIKPMNLIGVDRGENIPAVIALTDPEGCPLSRFKDSLGNPTHILRIGESYKEKQRTIQAKKEVEQRRAGGYSRKYASKAKNLADDMVRNTARDLLYYAVTQDAMLIFENLSRGFGRQGKRTFMAERQYTRMEDWLTAKLAYEGLPSKTYLSKTLAQYTSKTCSNCGFTITSADYDRVLEKLKKTATGWMTTINGKELKVEGQITYYNRYKRQNVVKDLSVELDRLSEESVNNDISSWTKGRSGEALSLLKKRFSHRPVQEKFVCLNCGFETHADEQAALNIARSWLFLRSQEYKKYQTNKTTGNTDKRAFVETWQSFYRKKLKEVWKPAV

SEQ ID NO: 47119 - protein, 978 aa, synthetic construct
  REGION 1..978: note = engineered CasX variant
QEIKRINKIRRRLVKDSNTKKAGKTGPMKTLLVRVMTPDLRERLENLRKKPENIPQPISNTSRANLNKLLTDYTEMKKAILHVYWEEFQKDPVGLMSRVAQPASKKIDQNKLKPEMDEKGNLTTAGFACSQCGQPLFVYKLEQVSEKGKAYTNYFGRCNVAEHEKLILLAQLKPEKDSDEAVTYSLGKFGQRALDFYSIHVTKESTHPVKPLAQIAGNRYASPVGKALSDACMGTIASFLSKYQDIIIEHQKVVKGNQKRLESLRELAGKENLEYPSVTLPPQPHTKEGVDAYNEVIARVRMWVNLNLWQKLKLSRDDAKPLLRLKGFPSFPLVERQANEVDWWDMVCNVKKLINEKKEDGKVFWQNLAGYKRQEALRPYLSSEEDVRKKGKKFARYQLGDLLWHLEKKHGEDWGKVYDEAWERIDKKVEGLSKHIKLEEERRSEDAQSKAALTDWLRAKASFVIEGLKEADKDEFCRCELKLQKWYGDLRGKPFAIEAENSILDISGFSKQYNCAFIWQKDGVKKLNLYLIINYFKGGKLRFKKIKPEAFEANRFYTVINKKSGEIVPMEVNFNFDDPNLIILPLAFGKRQGREFIWNDLLSLETGSLKLANGRVIEKTLYNRRTRQDEPALFVALTFERREVLDSSNIKPMNLIGVDRGENIPAVIALTDPEGCPLSRFKDSLGNPTHILRIGESYKEKQRTIQAKKEVEQRRAGGYSRKYASKAKNLADDMVRNTARDLLYYAVTQDAMLIFENLSRGFGRQGKRTFMAERQYTRMEDWLTAKLAYEGLPSKTYLSKTLAQYTSKTCSNCGFTITSADYDRVLEKLKKTATGWMTTINGKELKVEGQITYYNRYKRQNVVKDLSVELDRLSEESVNNDISSWTKGRSGEALSLLKKRFSHRPVQEKFVCLNCGFETHADEQAALNIARSWLFLRSQEYKKYQTNKTTGNTDKRAFVETWQSFYRKKLKEVWKPAV

SEQ ID NO: 47120 - protein, 979 aa, synthetic construct
  REGION 1..979: note = engineered CasX variant
QEIKRINKIRRRLVKDSNTKKAGKTGPMKTLLVRVMTPDLRERLENLRKKPENIPQPISNTSRANLNKLLTDYTEMKKAILHVYWEEFQKDPVGLMSRVAQPASKKIDQNKLKPEMDEKGNLTTAGFACSQCGQPLFVYKLEQVSEKGKAYTNYFGRCNVAEHEKLILLAQLKPEKDSDEAVTYSLGKFGQRALDFYSIHVTKESTHPVKPLAQIAGNRYASYPVGKALSDACMGTIASFLSKYQDIIIEHQKVVKGNQKRLESLRELAGKENLEYPSVTLPPQPHTKEGVDAYNEVIARVRMWVNLNLWQKLKLSRDDAKPLLRLKGFPSFPLVERQANEVDWWDMVCNVKKLINEKKEDGKVFWQNLAGYKRQEALRPYLSSEEDVRKKGKKFARYQLGDLLLHLYKKHGEDWGKVYDEAWERIDKKVEGLSKHIKLEEERRSEDAQSKAALTDWLRAKASFVIEGLKEADKDEFCRCELKLQKWYGDLRGKPFAIEAENSILDISGFSKQYNCAFIWQKDGVKKLNLYLIINYFKGGKLRFKKIKPEAFEANRFYTVINKKSGEIVPMEVNFNFDDPNLIILPLAFGKRQGREFIWNDLLSLETGSLKLANGRVIEKTLYNRRTRQDEPALFVALTFERREVLDSSNIKPMNLIGVDRGENIPAVIALTDPEGCPLSRFKDSLGNPTHILRIGESYKEKQRTIQAKKEVEQRRAGGYSRKYASKAKNLADDMVRNTARDLLYYAVTQDAMLIFENLSRGFGRQGKRTFMAERQYTRMEDWLTAKLAYEGLPSKTYLSKTLAQYTSKTCSNCGFTITSADYDRVLEKLKKTATGWMTTINGKELKVEGQITYYNRYKRQNVVKDLSVELDRLSEESVNNDISSWTKGRSGEALSLLKKRFSHRPVQEKFVCLNCGFETHADEQAALNIARSWLFLRSQEYKKYQTNKTTGNTDKRAFVETWQSFYRKKLKEVWKPAV

SEQ ID NO: 47121 - protein, 979 aa, synthetic construct
  REGION 1..979: note = engineered CasX variant
QEIKRINKIRRRLVKDSNTKKAGKTGPMKTLLVRVMTPDLRERLENLRKKPENIPQPISNTSRANLNKLLTDYTEMKKAILHVYWEEFQKDPVGLMSRVAQPASKKIDQNKLKPEMDEKGNLTTAGFACSQCGQPLFVYKLEQVSEKGKAYTNYFGRCNVAEHEKLILLAQLKPEKDSDEAVTYSLGKFGQRALDFYSIHVTKESTHPVKPLAQIAGNRYASHPVGKALSDACMGTIASFLSKYQDIIIEHQKVVKGNQKRLESLRELAGKENLEYPSVTLPPQPHTKEGVDAYNEVIARVRMWVNLNLWQKLKLSRDDAKPLLRLKGFPSFPLVERQANEVDWWDMVCNVKKLINEKKEDGKVFWQNLAGYKRQEALRPYLSSEEDVRKKGKKFARYQLGDLLLHLYKKHGEDWGKVYDEAWERIDKKVEGLSKHIKLEEERRSEDAQSKAALTDWLRAKASFVIEGLKEADKDEFCRCELKLQKWYGDLRGKPFAIEAENSILDISGFSKQYNCAFIWQKDGVKKLNLYLIINYFKGGKLRFKKIKPEAFEANRFYTVINKKSGEIVPMEVNFNFDDPNLIILPLAFGKRQGREFIWNDLLSLETGSLKLANGRVIEKTLYNRRTRQDEPALFVALTFERREVLDSSNIKPMNLIGVDRGENIPAVIALTDPEGCPLSRFKDSLGNPTHILRIGESYKEKQRTIQAKKEVEQRRAGGYSRKYASKAKNLADDMVRNTARDLLYYAVTQDAMLIFENLSRGFGRQGKRTFMAERQYTRMEDWLTAKLAYEGLPSKTYLSKTLAQYTSKTCSNCGFTITSADYDRVLEKLKKTATGWMTTINGKELKVEGQITYYNRYKRQNVVKDLSVELDRLSEESVNNDISSWTKGRSGEALSLLKKRFSHRPVQEKFVCLNCGFETHADEQAALNIARSWLFLRSQEYKKYQTNKTTGNTDKRAFVETWQSFYRKKLKEVWKPAV

SEQ ID NO: 47122 - protein, 979 aa, synthetic construct
  REGION 1..979: note = engineered CasX variant
QEIKRINKIRRRLVKDSNTKKAGKTGPMKTLLVRVMTPDLRERLENLRKKPENIPQPISNTSRANLNKLLTDYTEMKKAILHVYWEEFQKDPVGLMSRVAQPASKKIDQNKLKPEMDEKGNLTTAGFACSQCGQPLFVYKLEQVSEKGKAYTNYFGRCNVAEHEKLILLAQLKPEKDSDEAVTYSLGKFGQRALDFYSIHVTKESTHPVKPLAQIAGNRYASSPVGKALSDACMGTIASFLSKYQDIIIEHQKVVKGNQKRLESLRELAGKENLEYPSVTLPPQPHTKEGVDAYNEVIARVRMWVNLNLWQKLKLSRDDAKPLLRLKGFPSFPLVERQANEVDWWDMVCNVKKLINEKKEDGKVFWQNLAGYKRQEALRPYLSSEEDVRKKGKKFARYQLGDLLLHLYKKHGEDWGKVYDEAWERIDKKVEGLSKHIKLEEERRSEDAQSKAALTDWLRAKASFVIEGLKEADKDEFCRCELKLQKWYGDLRGKPFAIEAENSILDISGFSKQYNCAFIWQKDGVKKLNLYLIINYFKGGKLRFKKIKPEAFEANRFYTVINKKSGEIVPMEVNFNFDDPNLIILPLAFGKRQGREFIWNDLLSLETGSLKLANGRVIEKTLYNRRTRQDEPALFVALTFERREVLDSSNIKPMNLIGVDRGENIPAVIALTDPEGCPLSRFKDSLGNPTHILRIGESYKEKQRTIQAKKEVEQRRAGGYSRKYASKAKNLADDMVRNTARDLLYYAVTQDAMLIFENLSRGFGRQGKRTFMAERQYTRMEDWLTAKLAYEGLPSKTYLSKTLAQYTSKTCSNCGFTITSADYDRVLEKLKKTATGWMTTINGKELKVEGQITYYNRYKRQNVVKDLSVELDRLSEESVNNDISSWTKGRSGEALSLLKKRFSHRPVQEKFVCLNCGFETHADEQAALNIARSWLFLRSQEYKKYQTNKTTGNTDKRAFVETWQSFYRKKLKEVWKPAV

SEQ ID NO: 47123 - protein, 979 aa, synthetic construct
  REGION 1..979: note = engineered CasX variant
QEIKRINKIRRRLVKDSNTKKAGKTGPMKTLLVRVMTPDLRERLENLRKKPENIPQPISNTSRANLNKLLTDYTEMKKAILHVYWEEFQKDPVGLMSRVAQPASKKIDQNKLKPEMDEKGNLTTAGFACSQCGQPLFVYKLEQVSEKGKAYTNYFGRCNVAEHEKLILLAQLKPEKDSDEAVTYSLGKFGQRALDFYSIHVTKESTHPVKPLAQIAGNRYASTPVGKALSDACMGTIASFLSKYQDIIIEHQKVVKGNQKRLESLRELAGKENLEYPSVTLPPQPHTKEGVDAYNEVIARVRMWVNLNLWQKLKLSRDDAKPLLRLKGFPSFPLVERQANEVDWWDMVCNVKKLINEKKEDGKVFWQNLAGYKRQEALRPYLSSEEDVRKKGKKFARYQLGDLLLHLYKKHGEDWGKVYDEAWERIDKKVEGLSKHIKLEEERRSEDAQSKAALTDWLRAKASFVIEGLKEADKDEFCRCELKLQKWYGDLRGKPFAIEAENSILDISGFSKQYNCAFIWQKDGVKKLNLYLIINYFKGGKLRFKKIKPEAFEANRFYTVINKKSGEIVPMEVNFNFDDPNLIILPLAFGKRQGREFIWNDLLSLETGSLKLANGRVIEKTLYNRRTRQDEPALFVALTFERREVLDSSNIKPMNLIGVDRGENIPAVIALTDPEGCPLSRFKDSLGNPTHILRIGESYKEKQRTIQAKKEVEQRRAGGYSRKYASKAKNLADDMVRNTARDLLYYAVTQDAMLIFENLSRGFGRQGKRTFMAERQYTRMEDWLTAKLAYEGLPSKTYLSKTLAQYTSKTCSNCGFTITSADYDRVLEKLKKTATGWMTTINGKELKVEGQITYYNRYKRQNVVKDLSVELDRLSEESVNNDISSWTKGRSGEALSLLKKRFSHRPVQEKFVCLNCGFETHADEQAALNIARSWLFLRSQEYKKYQTNKTTGNTDKRAFVETWQSFYRKKLKEVWKPAV

SEQ ID NO: 47124 - protein, 979 aa, synthetic construct
  REGION 1..979: note = engineered CasX variant
QEIKRINKIRRRLVKDSNTKKAGKTGPMKTLLVRVMTPDLRERLENLRKKPENIPQPISNTSRANLNKLLTDYTEMKKAILHVYWEEFQKDPVGLMSRVAQPASKKIDQNKLKPEMDEKGNLTTAGFACSQCGQPLFVYKLEQVSEKGKAYTNYFGRCNVAEHEKLILLAQLKPEKDSDEAVTYSLGKFGQRALDFYSIHVTKESTHPVKPLAQIAGNRYASAPVGKALSDACMGTIASFLSKYQDIIIEHQKVVKGNQKRLESLRELAGKENLEYPSVTLPPQPHTKEGVDAYNEVIARVRMWVNLNLWQKLKLSRDDAKPLLRLKGFPSFPLVERQANEVDWWDMVCNVKKLINEKKEDGKVFWQNLAGYKRQEALRPYLSSEEDVRKKGKKFARYQLGDLLLHLYKKHGEDWGKVYDEAWERIDKKVEGLSKHIKLEEERRSEDAQSKAALTDWLRAKASFVIEGLKEADKDEFCRCELKLQKWYGDLRGKPFAIEAENSILDISGFSKQYNCAFIWQKDGVKKLNLYLIINYFKGGKLRFKKIKPEAFEANRFYTVINKKSGEIVPMEVNFNFDDPNLIILPLAFGKRQGREFIWNDLLSLETGSLKLANGRVIEKTLYNRRTRQDEPALFVALTFERREVLDSSNIKPMNLIGVDRGENIPAVIALTDPEGCPLSRFKDSLGNPTHILRIGESYKEKQRTIQAKKEVEQRRAGGYSRKYASKAKNLADDMVRNTARDLLYYAVTQDAMLIFENLSRGFGRQGKRTFMAERQYTRMEDWLTAKLAYEGLPSKTYLSKTLAQYTSKTCSNCGFTITSADYDRVLEKLKKTATGWMTTINGKELKVEGQITYYNRYKRQNVVKDLSVELDRLSEESVNNDISSWTKGRSGEALSLLKKRFSHRPVQEKFVCLNCGFETHADEQAALNIARSWLFLRSQEYKKYQTNKTTGNTDKRAFVETWQSFYRKKLKEVWKPAV

SEQ ID NO: 47125 - protein, 979 aa, synthetic construct
  REGION 1..979: note = engineered CasX variant
QEIKRINKIRRRLVKDSNTKKAGKTGPMKTLLVRVMTPDLRERLENLRKKPENIPQPISNTSRANLNKLLTDYTEMKKAILHVYWEEFQKDPVGLMSRVAQPASKKIDQNKLKPEMDEKGNLTTAGFACSQCGQPLFVYKLEQVSEKGKAYTNYFGRCNVAEHEKLILLAQLKPEKDSDEAVTYSLGKFGQRALDFYSIHVTKESTHPVKPLAQIAGNRYASVPVGKALSDACMGTIASFLSKYQDIIIEHQKVVKGNQKRLESLRELAGKENLEYPSVTLPPQPHTKEGVDAYNEVIARVRMWVNLNLWQKLKLSRDDAKPLLRLKGFPSFPLVERQANEVDWWDMVCNVKKLINEKKEDGKVFWQNLAGYKRQEALRPYLSSEEDVRKKGKKFARYQLGDLLLHLYKKHGEDWGKVYDEAWERIDKKVEGLSKHIKLEEERRSEDAQSKAALTDWLRAKASFVIEGLKEADKDEFCRCELKLQKWYGDLRGKPFAIEAENSILDISGFSKQYNCAFIWQKDGVKKLNLYLIINYFKGGKLRFKKIKPEAFEANRFYTVINKKSGEIVPMEVNFNFDDPNLIILPLAFGKRQGREFIWNDLLSLETGSLKLANGRVIEKTLYNRRTRQDEPALFVALTFERREVLDSSNIKPMNLIGVDRGENIPAVIALTDPEGCPLSRFKDSLGNPTHILRIGESYKEKQRTIQAKKEVEQRRAGGYSRKYASKAKNLADDMVRNTARDLLYYAVTQDAMLIFENLSRGFGRQGKRTFMAERQYTRMEDWLTAKLAYEGLPSKTYLSKTLAQYTSKTCSNCGFTITSADYDRVLEKLKKTATGWMTTINGKELKVEGQITYYNRYKRQNVVKDLSVELDRLSEESVNNDISSWTKGRSGEALSLLKKRFSHRPVQEKFVCLNCGFETHADEQAALNIARSWLFLRSQEYKKYQTNKTTGNTDKRAFVETWQSFYRKKLKEVWKPAV

SEQ ID NO: 47126 - protein, 979 aa, synthetic construct
  REGION 1..979: note = engineered CasX variant
QEIKRINKIRRRLVKDSNTKKAGKTGPMKTLLVRVMTPDLRERLENLRKKPENIPQPISNTSRANLNKLLTDYTEMKKAILHVYWEEFQKDPVGLMSRVAQPASKKIDQNKLKPEMDEKGNLTTAGFACSQCGQPLFVYKLEQVSEKGKAYTNYFGRCNVAEHEKLIKLAQLKPEKDSDEAVTYSLGKFGQRALDFYSIHVTKESTHPVKPLAQIAGNRYASGPVGKALSDACMGTIASFLSKYQDIIIEHQKVVKGNQKRLESLRELAGKENLEYPSVTLPPQPHTKEGVDAYNEVIARVRMWVNLNLWQKLKLSRDDAKPLLRLKGFPSFPLVERQANEVDWWDMVCNVKKLINEKKEDGKVFWQNLAGYKRQEALRPYLSSEEDVRKKGKKFARYQLGDLLLHLYKKHGEDWGKVYDEAWERIDKKVEGLSKHIKLEEERRSEDAQSKAALTDWLRAKASFVIEGLKEADKDEFCRCELKLQKWYGDLRGKPFAIEAENSILDISGFSKQYNCAFIWQKDGVKKLNLYLIINYFKGGKLRFKKIKPEAFEANRFYTVINKKSGEIVPMEVNFNFDDPNLIILPLAFGKRQGREFIWNDLLSLETGSLKLANGRVIEKTLYNRRTRQDEPALFVALTFERREVLDSSNIKPMNLIGVDRGENIPAVIALTDPEGCPLSRFKDSLGNPTHILRIGESYKEKQRTIQAKKEVEQRRAGGYSRKYASKAKNLADDMVRNTARDLLYYAVTQDAMLIFENLSRGFGRQGKRTFMAERQYTRMEDWLTAKLAYEGLPSKTYLSKTLAQYTSKTCSNCGFTITSADYDRVLEKLKKTATGWMTTINGKELKVEGQITYYNRYKRQNVVKDLSVELDRLSEESVNNDISSWTKGRSGEALSLLKKRFSHRPVQEKFVCLNCGFETHADEQAALNIARSWLFLRSQEYKKYQTNKTTGNTDKRAFVETWQSFYRKKLKEVWKPAV

SEQ ID NO: 47127 - protein, 978 aa, synthetic construct
  REGION 1..978: note = engineered CasX variant
QEIKRINKIRRRLVKDSNTKKAGKTGPMKTLLVRVMTPDLRERLENLRKKPENIPQPISNTSRANLNKLLTDYTEMKKAILHVYWEEFQKDPVGLMSRVAQPASKKIDQNKLKPEMDEKGNLTTAGFACSQCGQPLFVYKLEQVSEKGKAYTNYFGRCNVAEHEKLILLAQLKPEKDSDEAVTYSLGKFGQRALDFYSIHVTKESTHPVKPLAQIAGNRYASPVGKALSDACMGTIASFLSKYQDIIIEHQKVVKGNQKRLESLRELAGKENLEYPSVTLPPQPHTKEGVDAYNEVIARVRMWVNLNLWQKLKLSRDDAKPLLRLKGFPSFPLVERQANEVDWWDMVCNVKKLINEKKEDGKVFWQNLAGYKRQEALRPYLSSEEDVRKKGKKFARYQLGDLLLHLYKKHGEDWGKVYDEAWERIDKKVEGLSKHIKLEEERRSEDAQSKAALTDWLRAKASFVIEGLKEADKDEFCRCELKLQKWYGDLRGKPFAIEAENSILDISGFSKQYNCAFIWQKDGVKKLNLYLIINYFKGGKLRFKKIKPEAFEANRFYTVINKKSGEIVPMEVNFNFDDPNLIILPLAFGKRQGREFIWNDLLSLETGSLKLANGRVIEKTLYNRRTRQDEPALFVALTFERREVLDSSNIKPMNLIGVDRGENIPAVIALTDPEGCPLSRFKDSLGNPTHILRIGESYKEKQRTIQAKKEVEQRRAGGYSRKYASKAKNLADDMVRNTARDLLYYAVTQDAMLIFENLSRGFGRQGKRTFMAERQYTRMEDWLTAKLAYEGLPSKTYLSKTLAQYTSKTCSNCGFTITSADYDRVLEKLKKTATGWMTTINGKELKVEGQITYYNRYKRQNVVKDLSVELDRLSEESVNNDISSWTKGRSGEALSLLKKRFSHRPVQEKFVCLNCGFETHADEQAALNIARSWLFLRSQEYKKYQTNKTTGNTDKRAFVETWQSFYRKKLKEVWKPAV

SEQ ID NO: 47128 - protein, 979 aa, synthetic construct
  REGION 1..979: note = engineered CasX variant
QEIKRINKIRRRLVKDSNTKKAGKTGPMKTLLVRVMTPDLRERLENLRKKPENIPQPISNTSRANLNKLLTDYTEMKKAILHVYWEEFQKDPVGLMSRVAQPASKKIDQNKLKPEMDEKGNLTTAGFACSQCGQPLFVYKLEQVSEKGKAYTNYFGRCNVAEHEKLILLAQLKPEKDSDEAVTYSLGKFGQRALDFYSIHVTKESTHPVKPLAQIAGNRYASYPVGKALSDACMGTIASFLSKYQDIIIEHQKVVKGNQKRLESLRELAGKENLEYPSVTLPPQPHTKEGVDAYNEVIARVRMWVNLNLWQKLKLSRDDAKPLLRLKGFPSFPLVERQANEVDWWDMVCNVKKLINEKKEDGKVFWQNLAGYKRQEALRPYLSSEEDVRKKGKKFARYQLGDLLLHLEKKHPEDWGKVYDEAWERIDKKVEGLSKHIKLEEERRSEDAQSKAALTDWLRAKASFVIEGLKEADKDEFCRCELKLQKWYGDLRGKPFAIEAENSILDISGFSKQYNCAFIWQKDGVKKLNLYLIINYFKGGKLRFKKIKPEAFEANRFYTVINKKSGEIVPMEVNFNFDDPNLIILPLAFGKRQGREFIWNDLLSLETGSLKLANGRVIEKTLYNRRTRQDEPALFVALTFERREVLDSSNIKPMNLIGVDRGENIPAVIALTDPEGCPLSRFKDSLGNPTHILRIGESYKEKQRTIQAKKEVEQRRAGGYSRKYASKAKNLADDMVRNTARDLLYYAVTQDAMLIFENLSRGFGRQGKRTFMAERQYTRMEDWLTAKLAYEGLPSKTYLSKTLAQYTSKTCSNCGFTITSADYDRVLEKLKKTATGWMTTINGKELKVEGQITYYNRYKRQNVVKDLSVELDRLSEESVNNDISSWTKGRSGEALSLLKKRFSHRPVQEKFVCLNCGFETHADEQAALNIARSWLFLRSQEYKKYQTNKTTGNTDKRAFVETWQSFYRKKLKEVWKPAV

SEQ ID NO: 47129 - protein, 979 aa, synthetic construct
  REGION 1..979: note = engineered CasX variant
QEIKRINKIRRRLVKDSNTKKAGKTGPMKTLLVRVMTPDLRERLENLRKKPENIPQPISNTSRANLNKLLTDYTEMKKAILHVYWEEFQKDPVGLMSRVAQPASKKIDQNKLKPEMDEKGNLTTAGFACSQCGQPLFVYKLEQVSEKGKAYTNYFGRCNVAEHEKLILLAQLKPEKDSDEAVTYSLGKFGQRALDFYSIHVTKESTHPVKPLAQIAGNRYASHPVGKALSDACMGTIASFLSKYQDIIIEHQKVVKGNQKRLESLRELAGKENLEYPSVTLPPQPHTKEGVDAYNEVIARVRMWVNLNLWQKLKLSRDDAKPLLRLKGFPSFPLVERQANEVDWWDMVCNVKKLINEKKEDGKVFWQNLAGYKRQEALRPYLSSEEDVRKKGKKFARYQLGDLLLHLEKKHPEDWGKVYDEAWERIDKKVEGLSKHIKLEEERRSEDAQSKAALTDWLRAKASFVIEGLKEADKDEFCRCELKLQKWYGDLRGKPFAIEAENSILDISGFSKQYNCAFIWQKDGVKKLNLYLIINYFKGGKLRFKKIKPEAFEANRFYTVINKKSGEIVPMEVNFNFDDPNLIILPLAFGKRQGREFIWNDLLSLETGSLKLANGRVIEKTLYNRRTRQDEPALFVALTFERREVLDSSNIKPMNLIGVDRGENIPAVIALTDPEGCPLSRFKDSLGNPTHILRIGESYKEKQRTIQAKKEVEQRRAGGYSRKYASKAKNLADDMVRNTARDLLYYAVTQDAMLIFENLSRGFGRQGKRTFMAERQYTRMEDWLTAKLAYEGLPSKTYLSKTLAQYTSKTCSNCGFTITSADYDRVLEKLKKTATGWMTTINGKELKVEGQITYYNRYKRQNVVKDLSVELDRLSEESVNNDISSWTKGRSGEALSLLKKRFSHRPVQEKFVCLNCGFETHADEQAALNIARSWLFLRSQEYKKYQTNKTTGNTDKRAFVETWQSFYRKKLKEVWKPAV

SEQ ID NO: 47130 - protein, 979 aa, synthetic construct
  REGION 1..979: note = engineered CasX variant
QEIKRINKIRRRLVKDSNTKKAGKTGPMKTLLVRVMTPDLRERLENLRKKPENIPQPISNTSRANLNKLLTDYTEMKKAILHVYWEEFQKDPVGLMSRVAQPASKKIDQNKLKPEMDEKGNLTTAGFACSQCGQPLFVYKLEQVSEKGKAYTNYFGRCNVAEHEKLILLAQLKPEKDSDEAVTYSLGKFGQRALDFYSIHVTKESTHPVKPLAQIAGNRYASSPVGKALSDACMGTIASFLSKYQDIIIEHQKVVKGNQKRLESLRELAGKENLEYPSVTLPPQPHTKEGVDAYNEVIARVRMWVNLNLWQKLKLSRDDAKPLLRLKGFPSFPLVERQANEVDWWDMVCNVKKLINEKKEDGKVFWQNLAGYKRQEALRPYLSSEEDVRKKGKKFARYQLGDLLLHLEKKHPEDWGKVYDEAWERIDKKVEGLSKHIKLEEERRSEDAQSKAALTDWLRAKASFVIEGLKEADKDEFCRCELKLQKWYGDLRGKPFAIEAENSILDISGFSKQYNCAFIWQKDGVKKLNLYLIINYFKGGKLRFKKIKPEAFEANRFYTVINKKSGEIVPMEVNFNFDDPNLIILPLAFGKRQGREFIWNDLLSLETGSLKLANGRVIEKTLYNRRTRQDEPALFVALTFERREVLDSSNIKPMNLIGVDRGENIPAVIALTDPEGCPLSRFKDSLGNPTHILRIGESYKEKQRTIQAKKEVEQRRAGGYSRKYASKAKNLADDMVRNTARDLLYYAVTQDAMLIFENLSRGFGRQGKRTFMAERQYTRMEDWLTAKLAYEGLPSKTYLSKTLAQYTSKTCSNCGFTITSADYDRVLEKLKKTATGWMTTINGKELKVEGQITYYNRYKRQNVVKDLSVELDRLSEESVNNDISSWTKGRSGEALSLLKKRFSHRPVQEKFVCLNCGFETHADEQAALNIARSWLFLRSQEYKKYQTNKTTGNTDKRAFVETWQSFYRKKLKEVWKPAV

SEQ ID NO: 47131 - protein, 979 aa, synthetic construct
  REGION 1..979: note = engineered CasX variant
QEIKRINKIRRRLVKDSNTKKAGKTGPMKTLLVRVMTPDLRERLENLRKKPENIPQPISNTSRANLNKLLTDYTEMKKAILHVYWEEFQKDPVGLMSRVAQPASKKIDQNKLKPEMDEKGNLTTAGFACSQCGQPLFVYKLEQVSEKGKAYTNYFGRCNVAEHEKLILLAQLKPEKDSDEAVTYSLGKFGQRALDFYSIHVTKESTHPVKPLAQIAGNRYASTPVGKALSDACMGTIASFLSKYQDIIIEHQKVVKGNQKRLESLRELAGKENLEYPSVTLPPQPHTKEGVDAYNEVIARVRMWVNLNLWQKLKLSRDDAKPLLRLKGFPSFPLVERQANEVDWWDMVCNVKKLINEKKEDGKVFWQNLAGYKRQEALRPYLSSEEDVRKKGKKFARYQLGDLLLHLEKKHPEDWGKVYDEAWERIDKKVEGLSKHIKLEEERRSEDAQSKAALTDWLRAKASFVIEGLKEADKDEFCRCELKLQKWYGDLRGKPFAIEAENSILDISGFSKQYNCAFIWQKDGVKKLNLYLIINYFKGGKLRFKKIKPEAFEANRFYTVINKKSGEIVPMEVNFNFDDPNLIILPLAFGKRQGREFIWNDLLSLETGSLKLANGRVIEKTLYNRRTRQDEPALFVALTFERREVLDSSNIKPMNLIGVDRGENIPAVIALTDPEGCPLSRFKDSLGNPTHILRIGESYKEKQRTIQAKKEVEQRRAGGYSRKYASKAKNLADDMVRNTARDLLYYAVTQDAMLIFENLSRGFGRQGKRTFMAERQYTRMEDWLTAKLAYEGLPSKTYLSKTLAQYTSKTCSNCGFTITSADYDRVLEKLKKTATGWMTTINGKELKVEGQITYYNRYKRQNVVKDLSVELDRLSEESVNNDISSWTKGRSGEALSLLKKRFSHRPVQEKFVCLNCGFETHADEQAALNIARSWLFLRSQEYKKYQTNKTTGNTDKRAFVETWQSFYRKKLKEVWKPAV

SEQ ID NO: 47132 - protein, 979 aa, synthetic construct
  REGION 1..979: note = engineered CasX variant
QEIKRINKIRRRLVKDSNTKKAGKTGPMKTLLVRVMTPDLRERLENLRKKPENIPQPISNTSRANLNKLLTDYTEMKKAILHVYWEEFQKDPVGLMSRVAQPASKKIDQNKLKPEMDEKGNLTTAGFACSQCGQPLFVYKLEQVSEKGKAYTNYFGRCNVAEHEKLILLAQLKPEKDSDEAVTYSLGKFGQRALDFYSIHVTKESTHPVKPLAQIAGNRYASAPVGKALSDACMGTIASFLSKYQDIIIEHQKVVKGNQKRLESLRELAGKENLEYPSVTLPPQPHTKEGVDAYNEVIARVRMWVNLNLWQKLKLSRDDAKPLLRLKGFPSFPLVERQANEVDWWDMVCNVKKLINEKKEDGKVFWQNLAGYKRQEALRPYLSSEEDVRKKGKKFARYQLGDLLLHLEKKHPEDWGKVYDEAWERIDKKVEGLSKHIKLEEERRSEDAQSKAALTDWLRAKASFVIEGLKEADKDEFCRCELKLQKWYGDLRGKPFAIEAENSILDISGFSKQYNCAFIWQKDGVKKLNLYLIINYFKGGKLRFKKIKPEAFEANRFYTVINKKSGEIVPMEVNFNFDDPNLIILPLAFGKRQGREFIWNDLLSLETGSLKLANGRVIEKTLYNRRTRQDEPALFVALTFERREVLDSSNIKPMNLIGVDRGENIPAVIALTDPEGCPLSRFKDSLGNPTHILRIGESYKEKQRTIQAKKEVEQRRAGGYSRKYASKAKNLADDMVRNTARDLLYYAVTQDAMLIFENLSRGFGRQGKRTFMAERQYTRMEDWLTAKLAYEGLPSKTYLSKTLAQYTSKTCSNCGFTITSADYDRVLEKLKKTATGWMTTINGKELKVEGQITYYNRYKRQNVVKDLSVELDRLSEESVNNDISSWTKGRSGEALSLLKKRFSHRPVQEKFVCLNCGFETHADEQAALNIARSWLFLRSQEYKKYQTNKTTGNTDKRAFVETWQSFYRKKLKEVWKPAV

SEQ ID NO: 47133 - protein, 979 aa, synthetic construct
  REGION 1..979: note = engineered CasX variant
QEIKRINKIRRRLVKDSNTKKAGKTGPMKTLLVRVMTPDLRERLENLRKKPENIPQPISNTSRANLNKLLTDYTEMKKAILHVYWEEFQKDPVGLMSRVAQPASKKIDQNKLKPEMDEKGNLTTAGFACSQCGQPLFVYKLEQVSEKGKAYTNYFGRCNVAEHEKLILLAQLKPEKDSDEAVTYSLGKFGQRALDFYSIHVTKESTHPVKPLAQIAGNRYASVPVGKALSDACMGTIASFLSKYQDIIIEHQKVVKGNQKRLESLRELAGKENLEYPSVTLPPQPHTKEGVDAYNEVIARVRMWVNLNLWQKLKLSRDDAKPLLRLKGFPSFPLVERQANEVDWWDMVCNVKKLINEKKEDGKVFWQNLAGYKRQEALRPYLSSEEDVRKKGKKFARYQLGDLLLHLEKKHPEDWGKVYDEAWERIDKKVEGLSKHIKLEEERRSEDAQSKAALTDWLRAKASFVIEGLKEADKDEFCRCELKLQKWYGDLRGKPFAIEAENSILDISGFSKQYNCAFIWQKDGVKKLNLYLIINYFKGGKLRFKKIKPEAFEANRFYTVINKKSGEIVPMEVNFNFDDPNLIILPLAFGKRQGREFIWNDLLSLETGSLKLANGRVIEKTLYNRRTRQDEPALFVALTFERREVLDSSNIKPMNLIGVDRGENIPAVIALTDPEGCPLSRFKDSLGNPTHILRIGESYKEKQRTIQAKKEVEQRRAGGYSRKYASKAKNLADDMVRNTARDLLYYAVTQDAMLIFENLSRGFGRQGKRTFMAERQYTRMEDWLTAKLAYEGLPSKTYLSKTLAQYTSKTCSNCGFTITSADYDRVLEKLKKTATGWMTTINGKELKVEGQITYYNRYKRQNVVKDLSVELDRLSEESVNNDISSWTKGRSGEALSLLKKRFSHRPVQEKFVCLNCGFETHADEQAALNIARSWLFLRSQEYKKYQTNKTTGNTDKRAFVETWQSFYRKKLKEVWKPAV

SEQ ID NO: 47134 - protein, 979 aa, synthetic construct
  REGION 1..979: note = engineered CasX variant
QEIKRINKIRRRLVKDSNTKKAGKTGPMKTLLVRVMTPDLRERLENLRKKPENIPQPISNTSRANLNKLLTDYTEMKKAILHVYWEEFQKDPVGLMSRVAQPASKKIDQNKLKPEMDEKGNLTTAGFACSQCGQPLFVYKLEQVSEKGKAYTNYFGRCNVAEHEKLIKLAQLKPEKDSDEAVTYSLGKFGQRALDFYSIHVTKESTHPVKPLAQIAGNRYASGPVGKALSDACMGTIASFLSKYQDIIIEHQKVVKGNQKRLESLRELAGKENLEYPSVTLPPQPHTKEGVDAYNEVIARVRMWVNLNLWQKLKLSRDDAKPLLRLKGFPSFPLVERQANEVDWWDMVCNVKKLINEKKEDGKVFWQNLAGYKRQEALRPYLSSEEDVRKKGKKFARYQLGDLLLHLEKKHPEDWGKVYDEAWERIDKKVEGLSKHIKLEEERRSEDAQSKAALTDWLRAKASFVIEGLKEADKDEFCRCELKLQKWYGDLRGKPFAIEAENSILDISGFSKQYNCAFIWQKDGVKKLNLYLIINYFKGGKLRFKKIKPEAFEANRFYTVINKKSGEIVPMEVNFNFDDPNLIILPLAFGKRQGREFIWNDLLSLETGSLKLANGRVIEKTLYNRRTRQDEPALFVALTFERREVLDSSNIKPMNLIGVDRGENIPAVIALTDPEGCPLSRFKDSLGNPTHILRIGESYKEKQRTIQAKKEVEQRRAGGYSRKYASKAKNLADDMVRNTARDLLYYAVTQDAMLIFENLSRGFGRQGKRTFMAERQYTRMEDWLTAKLAYEGLPSKTYLSKTLAQYTSKTCSNCGFTITSADYDRVLEKLKKTATGWMTTINGKELKVEGQITYYNRYKRQNVVKDLSVELDRLSEESVNNDISSWTKGRSGEALSLLKKRFSHRPVQEKFVCLNCGFETHADEQAALNIARSWLFLRSQEYKKYQTNKTTGNTDKRAFVETWQSFYRKKLKEVWKPAV

SEQ ID NO: 47135 - protein, 978 aa, synthetic construct
  REGION 1..978: note = engineered CasX variant
QEIKRINKIRRRLVKDSNTKKAGKTGPMKTLLVRVMTPDLRERLENLRKKPENIPQPISNTSRANLNKLLTDYTEMKKAILHVYWEEFQKDPVGLMSRVAQPASKKIDQNKLKPEMDEKGNLTTAGFACSQCGQPLFVYKLEQVSEKGKAYTNYFGRCNVAEHEKLILLAQLKPEKDSDEAVTYSLGKFGQRALDFYSIHVTKESTHPVKPLAQIAGNRYASPVGKALSDACMGTIASFLSKYQDIIIEHQKVVKGNQKRLESLRELAGKENLEYPSVTLPPQPHTKEGVDAYNEVIARVRMWVNLNLWQKLKLSRDDAKPLLRLKGFPSFPLVERQANEVDWWDMVCNVKKLINEKKEDGKVFWQNLAGYKRQEALRPYLSSEEDVRKKGKKFARYQLGDLLLHLEKKHPEDWGKVYDEAWERIDKKVEGLSKHIKLEEERRSEDAQSKAALTDWLRAKASFVIEGLKEADKDEFCRCELKLQKWYGDLRGKPFAIEAENSILDISGFSKQYNCAFIWQKDGVKKLNLYLIINYFKGGKLRFKKIKPEAFEANRFYTVINKKSGEIVPMEVNFNFDDPNLIILPLAFGKRQGREFIWNDLLSLETGSLKLANGRVIEKTLYNRRTRQDEPALFVALTFERREVLDSSNIKPMNLIGVDRGENIPAVIALTDPEGCPLSRFKDSLGNPTHILRIGESYKEKQRTIQAKKEVEQRRAGGYSRKYASKAKNLADDMVRNTARDLLYYAVTQDAMLIFENLSRGFGRQGKRTFMAERQYTRMEDWLTAKLAYEGLPSKTYLSKTLAQYTSKTCSNCGFTITSADYDRVLEKLKKTATGWMTTINGKELKVEGQITYYNRYKRQNVVKDLSVELDRLSEESVNNDISSWTKGRSGEALSLLKKRFSHRPVQEKFVCLNCGFETHADEQAALNIARSWLFLRSQEYKKYQTNKTTGNTDKRAFVETWQSFYRKKLKEVWKPAV

SEQ ID NO: 47136 - protein, 980 aa, synthetic construct
  REGION 1..980: note = engineered CasX variant
QEIKRINKIRRRLVKDSNTKKAGKTGPMKTLLVRVMTPDLRERLENLRKKPENIPQPISNTSRANLNKLLTDYTEMKKAILHVYWEEFQKDPVGLMSRVAQPASKKIDQNKLKPEMDEKGNLTTAGFACSQCGQPLFVYKLEQVSEKGKAYTNYFGRCNVAEHEKLILLAQLKPEKDSDEAVTYSLGKFGQRALDFYSIHVTKESTHPVKPLAQIAGNRYASYPVGKALSDACMGTIASFLSKYQDIIIEHQKVVKGNQKRLESLRELAGKENLEYPSVTLPPQPHTKEGVDAYNEVIARVRMWVNLNLWQKLKLSRDDAKPLLRLKGFPSFPLVERQANEVDWWDMVCNVKKLINEKKEDGKVFWQNLAGYKRQEALRPYLSSEEDVRKKGKKFARYQLGDLLLHLEKKHGERDWGKVYDEAWERIDKKVEGLSKHIKLEEERRSEDAQSKAALTDWLRAKASFVIEGLKEADKDEFCRCELKLQKWYGDLRGKPFAIEAENSILDISGFSKQYNCAFIWQKDGVKKLNLYLIINYFKGGKLRFKKIKPEAFEANRFYTVINKKSGEIVPMEVNFNFDDPNLIILPLAFGKRQGREFIWNDLLSLETGSLKLANGRVIEKTLYNRRTRQDEPALFVALTFERREVLDSSNIKPMNLIGVDRGENIPAVIALTDPEGCPLSRFKDSLGNPTHILRIGESYKEKQRTIQAKKEVEQRRAGGYSRKYASKAKNLADDMVRNTARDLLYYAVTQDAMLIFENLSRGFGRQGKRTFMAERQYTRMEDWLTAKLAYEGLPSKTYLSKTLAQYTSKTCSNCGFTITSADYDRVLEKLKKTATGWMTTINGKELKVEGQITYYNRYKRQNVVKDLSVELDRLSEESVNNDISSWTKGRSGEALSLLKKRFSHRPVQEKFVCLNCGFETHADEQAALNIARSWLFLRSQEYKKYQTNKTTGNTDKRAFVETWQSFYRKKLKEVWKPAV

SEQ ID NO: 47137 - protein, 980 aa, synthetic construct
  REGION 1..980: note = engineered CasX variant
QEIKRINKIRRRLVKDSNTKKAGKTGPMKTLLVRVMTPDLRERLENLRKKPENIPQPISNTSRANLNKLLTDYTEMKKAILHVYWEEFQKDPVGLMSRVAQPASKKIDQNKLKPEMDEKGNLTTAGFACSQCGQPLFVYKLEQVSEKGKAYTNYFGRCNVAEHEKLILLAQLKPEKDSDEAVTYSLGKFGQRALDFYSIHVTKESTHPVKPLAQIAGNRYASHPVGKALSDACMGTIASFLSKYQDIIIEHQKVVKGNQKRLESLRELAGKENLEYPSVTLPPQPHTKEGVDAYNEVIARVRMWVNLNLWQKLKLSRDDAKPLLRLKGFPSFPLVERQANEVDWWDMVCNVKKLINEKKEDGKVFWQNLAGYKRQEALRPYLSSEEDVRKKGKKFARYQLGDLLLHLEKKHGERDWGKVYDEAWERIDKKVEGLSKHIKLEEERRSEDAQSKAALTDWLRAKASFVIEGLKEADKDEFCRCELKLQKWYGDLRGKPFAIEAENSILDISGFSKQYNCAFIWQKDGVKKLNLYLIINYFKGGKLRFKKIKPEAFEANRFYTVINKKSGEIVPMEVNFNFDDPNLIILPLAFGKRQGREFIWNDLLSLETGSLKLANGRVIEKTLYNRRTRQDEPALFVALTFERREVLDSSNIKPMNLIGVDRGENIPAVIALTDPEGCPLSRFKDSLGNPTHILRIGESYKEKQRTIQAKKEVEQRRAGGYSRKYASKAKNLADDMVRNTARDLLYYAVTQDAMLIFENLSRGFGRQGKRTFMAERQYTRMEDWLTAKLAYEGLPSKTYLSKTLAQYTSKTCSNCGFTITSADYDRVLEKLKKTATGWMTTINGKELKVEGQITYYNRYKRQNVVKDLSVELDRLSEESVNNDISSWTKGRSGEALSLLKKRFSHRPVQEKFVCLNCGFETHADEQAALNIARSWLFLRSQEYKKYQTNKTTGNTDKRAFVETWQSFYRKKLKEVWKPAV

SEQ ID NO: 47138 - protein, 980 aa, synthetic construct
  REGION 1..980: note = engineered CasX variant
QEIKRINKIRRRLVKDSNTKKAGKTGPMKTLLVRVMTPDLRERLENLRKKPENIPQPISNTSRANLNKLLTDYTEMKKAILHVYWEEFQKDPVGLMSRVAQPASKKIDQNKLKPEMDEKGNLTTAGFACSQCGQPLFVYKLEQVSEKGKAYTNYFGRCNVAEHEKLILLAQLKPEKDSDEAVTYSLGKFGQRALDFYSIHVTKESTHPVKPLAQIAGNRYASSPVGKALSDACMGTIASFLSKYQDIIIEHQKVVKGNQKRLESLRELAGKENLEYPSVTLPPQPHTKEGVDAYNEVIARVRMWVNLNLWQKLKLSRDDAKPLLRLKGFPSFPLVERQANEVDWWDMVCNVKKLINEKKEDGKVFWQNLAGYKRQEALRPYLSSEEDVRKKGKKFARYQLGDLLLHLEKKHGERDWGKVYDEAWERIDKKVEGLSKHIKLEEERRSEDAQSKAALTDWLRAKASFVIEGLKEADKDEFCRCELKLQKWYGDLRGKPFAIEAENSILDISGFSKQYNCAFIWQKDGVKKLNLYLIINYFKGGKLRFKKIKPEAFEANRFYTVINKKSGEIVPMEVNFNFDDPNLIILPLAFGKRQGREFIWNDLLSLETGSLKLANGRVIEKTLYNRRTRQDEPALFVALTFERREVLDSSNIKPMNLIGVDRGENIPAVIALTDPEGCPLSRFKDSLGNPTHILRIGESYKEKQRTIQAKKEVEQRRAGGYSRKYASKAKNLADDMVRNTARDLLYYAVTQDAMLIFENLSRGFGRQGKRTFMAERQYTRMEDWLTAKLAYEGLPSKTYLSKTLAQYTSKTCSNCGFTITSADYDRVLEKLKKTATGWMTTINGKELKVEGQITYYNRYKRQNVVKDLSVELDRLSEESVNNDISSWTKGRSGEALSLLKKRFSHRPVQEKFVCLNCGFETHADEQAALNIARSWLFLRSQEYKKYQTNKTTGNTDKRAFVETWQSFYRKKLKEVWKPAV

SEQ ID NO: 47139 - protein, 980 aa, synthetic construct
  REGION 1..980: note = engineered CasX variant
QEIKRINKIRRRLVKDSNTKKAGKTGPMKTLLVRVMTPDLRERLENLRKKPENIPQPISNTSRANLNKLLTDYTEMKKAILHVYWEEFQKDPVGLMSRVAQPASKKIDQNKLKPEMDEKGNLTTAGFACSQCGQPLFVYKLEQVSEKGKAYTNYFGRCNVAEHEKLILLAQLKPEKDSDEAVTYSLGKFGQRALDFYSIHVTKESTHPVKPLAQIAGNRYASTPVGKALSDACMGTIASFLSKYQDIIIEHQKVVKGNQKRLESLRELAGKENLEYPSVTLPPQPHTKEGVDAYNEVIARVRMWVNLNLWQKLKLSRDDAKPLLRLKGFPSFPLVERQANEVDWWDMVCNVKKLINEKKEDGKVFWQNLAGYKRQEALRPYLSSEEDVRKKGKKFARYQLGDLLLHLEKKHGERDWGKVYDEAWERIDKKVEGLSKHIKLEEERRSEDAQSKAALTDWLRAKASFVIEGLKEADKDEFCRCELKLQKWYGDLRGKPFAIEAENSILDISGFSKQYNCAFIWQKDGVKKLNLYLIINYFKGGKLRFKKIKPEAFEANRFYTVINKKSGEIVPMEVNFNFDDPNLIILPLAFGKRQGREFIWNDLLSLETGSLKLANGRVIEKTLYNRRTRQDEPALFVALTFERREVLDSSNIKPMNLIGVDRGENIPAVIALTDPEGCPLSRFKDSLGNPTHILRIGESYKEKQRTIQAKKEVEQRRAGGYSRKYASKAKNLADDMVRNTARDLLYYAVTQDAMLIFENLSRGFGRQGKRTFMAERQYTRMEDWLTAKLAYEGLPSKTYLSKTLAQYTSKTCSNCGFTITSADYDRVLEKLKKTATGWMTTINGKELKVEGQITYYNRYKRQNVVKDLSVELDRLSEESVNNDISSWTKGRSGEALSLLKKRFSHRPVQEKFVCLNCGFETHADEQAALNIARSWLFLRSQEYKKYQTNKTTGNTDKRAFVETWQSFYRKKLKEVWKPAV

SEQ ID NO: 47140 - protein, 980 aa, synthetic construct
  REGION 1..980: note = engineered CasX variant
QEIKRINKIRRRLVKDSNTKKAGKTGPMKTLLVRVMTPDLRERLENLRKKPENIPQPISNTSRANLNKLLTDYTEMKKAILHVYWEEFQKDPVGLMSRVAQPASKKIDQNKLKPEMDEKGNLTTAGFACSQCGQPLFVYKLEQVSEKGKAYTNYFGRCNVAEHEKLILLAQLKPEKDSDEAVTYSLGKFGQRALDFYSIHVTKESTHPVKPLAQIAGNRYASAPVGKALSDACMGTIASFLSKYQDIIIEHQKVVKGNQKRLESLRELAGKENLEYPSVTLPPQPHTKEGVDAYNEVIARVRMWVNLNLWQKLKLSRDDAKPLLRLKGFPSFPLVERQANEVDWWDMVCNVKKLINEKKEDGKVFWQNLAGYKRQEALRPYLSSEEDVRKKGKKFARYQLGDLLLHLEKKHGERDWGKVYDEAWERIDKKVEGLSKHIKLEEERRSEDAQSKAALTDWLRAKASFVIEGLKEADKDEFCRCELKLQKWYGDLRGKPFAIEAENSILDISGFSKQYNCAFIWQKDGVKKLNLYLIINYFKGGKLRFKKIKPEAFEANRFYTVINKKSGEIVPMEVNFNFDDPNLIILPLAFGKRQGREFIWNDLLSLETGSLKLANGRVIEKTLYNRRTRQDEPALFVALTFERREVLDSSNIKPMNLIGVDRGENIPAVIALTDPEGCPLSRFKDSLGNPTHILRIGESYKEKQRTIQAKKEVEQRRAGGYSRKYASKAKNLADDMVRNTARDLLYYAVTQDAMLIFENLSRGFGRQGKRTFMAERQYTRMEDWLTAKLAYEGLPSKTYLSKTLAQYTSKTCSNCGFTITSADYDRVLEKLKKTATGWMTTINGKELKVEGQITYYNRYKRQNVVKDLSVELDRLSEESVNNDISSWTKGRSGEALSLLKKRFSHRPVQEKFVCLNCGFETHADEQAALNIARSWLFLRSQEYKKYQTNKTTGNTDKRAFVETWQSFYRKKLKEVWKPAV

SEQ ID NO: 47141 - protein, 980 aa, synthetic construct
  REGION 1..980: note = engineered CasX variant
QEIKRINKIRRRLVKDSNTKKAGKTGPMKTLLVRVMTPDLRERLENLRKKPENIPQPISNTSRANLNKLLTDYTEMKKAILHVYWEEFQKDPVGLMSRVAQPASKKIDQNKLKPEMDEKGNLTTAGFACSQCGQPLFVYKLEQVSEKGKAYTNYFGRCNVAEHEKLILLAQLKPEKDSDEAVTYSLGKFGQRALDFYSIHVTKESTHPVKPLAQIAGNRYASVPVGKALSDACMGTIASFLSKYQDIIIEHQKVVKGNQKRLESLRELAGKENLEYPSVTLPPQPHTKEGVDAYNEVIARVRMWVNLNLWQKLKLSRDDAKPLLRLKGFPSFPLVERQANEVDWWDMVCNVKKLINEKKEDGKVFWQNLAGYKRQEALRPYLSSEEDVRKKGKKFARYQLGDLLLHLEKKHGERDWGKVYDEAWERIDKKVEGLSKHIKLEEERRSEDAQSKAALTDWLRAKASFVIEGLKEADKDEFCRCELKLQKWYGDLRGKPFAIEAENSILDISGFSKQYNCAFIWQKDGVKKLNLYLIINYFKGGKLRFKKIKPEAFEANRFYTVINKKSGEIVPMEVNFNFDDPNLIILPLAFGKRQGREFIWNDLLSLETGSLKLANGRVIEKTLYNRRTRQDEPALFVALTFERREVLDSSNIKPMNLIGVDRGENIPAVIALTDPEGCPLSRFKDSLGNPTHILRIGESYKEKQRTIQAKKEVEQRRAGGYSRKYASKAKNLADDMVRNTARDLLYYAVTQDAMLIFENLSRGFGRQGKRTFMAERQYTRMEDWLTAKLAYEGLPSKTYLSKTLAQYTSKTCSNCGFTITSADYDRVLEKLKKTATGWMTTINGKELKVEGQITYYNRYKRQNVVKDLSVELDRLSEESVNNDISSWTKGRSGEALSLLKKRFSHRPVQEKFVCLNCGFETHADEQAALNIARSWLFLRSQEYKKYQTNKTTGNTDKRAFVETWQSFYRKKLKEVWKPAV

SEQ ID NO: 47142 - protein, 980 aa, synthetic construct
  REGION 1..980: note = engineered CasX variant
QEIKRINKIRRRLVKDSNTKKAGKTGPMKTLLVRVMTPDLRERLENLRKKPENIPQPISNTSRANLNKLLTDYTEMKKAILHVYWEEFQKDPVGLMSRVAQPASKKIDQNKLKPEMDEKGNLTTAGFACSQCGQPLFVYKLEQVSEKGKAYTNYFGRCNVAEHEKLIKLAQLKPEKDSDEAVTYSLGKFGQRALDFYSIHVTKESTHPVKPLAQIAGNRYASGPVGKALSDACMGTIASFLSKYQDIIIEHQKVVKGNQKRLESLRELAGKENLEYPSVTLPPQPHTKEGVDAYNEVIARVRMWVNLNLWQKLKLSRDDAKPLLRLKGFPSFPLVERQANEVDWWDMVCNVKKLINEKKEDGKVFWQNLAGYKRQEALRPYLSSEEDVRKKGKKFARYQLGDLLLHLEKKHGERDWGKVYDEAWERIDKKVEGLSKHIKLEEERRSEDAQSKAALTDWLRAKASFVIEGLKEADKDEFCRCELKLQKWYGDLRGKPFAIEAENSILDISGFSKQYNCAFIWQKDGVKKLNLYLIINYFKGGKLRFKKIKPEAFEANRFYTVINKKSGEIVPMEVNFNFDDPNLIILPLAFGKRQGREFIWNDLLSLETGSLKLANGRVIEKTLYNRRTRQDEPALFVALTFERREVLDSSNIKPMNLIGVDRGENIPAVIALTDPEGCPLSRFKDSLGNPTHILRIGESYKEKQRTIQAKKEVEQRRAGGYSRKYASKAKNLADDMVRNTARDLLYYAVTQDAMLIFENLSRGFGRQGKRTFMAERQYTRMEDWLTAKLAYEGLPSKTYLSKTLAQYTSKTCSNCGFTITSADYDRVLEKLKKTATGWMTTINGKELKVEGQITYYNRYKRQNVVKDLSVELDRLSEESVNNDISSWTKGRSGEALSLLKKRFSHRPVQEKFVCLNCGFETHADEQAALNIARSWLFLRSQEYKKYQTNKTTGNTDKRAFVETWQSFYRKKLKEVWKPAV

SEQ ID NO: 47143 - protein, 979 aa, synthetic construct
  REGION 1..979: note = engineered CasX variant
QEIKRINKIRRRLVKDSNTKKAGKTGPMKTLLVRVMTPDLRERLENLRKKPENIPQPISNTSRANLNKLLTDYTEMKKAILHVYWEEFQKDPVGLMSRVAQPASKKIDQNKLKPEMDEKGNLTTAGFACSQCGQPLFVYKLEQVSEKGKAYTNYFGRCNVAEHEKLILLAQLKPEKDSDEAVTYSLGKFGQRALDFYSIHVTKESTHPVKPLAQIAGNRYASPVGKALSDACMGTIASFLSKYQDIIIEHQKVVKGNQKRLESLRELAGKENLEYPSVTLPPQPHTKEGVDAYNEVIARVRMWVNLNLWQKLKLSRDDAKPLLRLKGFPSFPLVERQANEVDWWDMVCNVKKLINEKKEDGKVFWQNLAGYKRQEALRPYLSSEEDVRKKGKKFARYQLGDLLLHLEKKHGERDWGKVYDEAWERIDKKVEGLSKHIKLEEERRSEDAQSKAALTDWLRAKASFVIEGLKEADKDEFCRCELKLQKWYGDLRGKPFAIEAENSILDISGFSKQYNCAFIWQKDGVKKLNLYLIINYFKGGKLRFKKIKPEAFEANRFYTVINKKSGEIVPMEVNFNFDDPNLIILPLAFGKRQGREFIWNDLLSLETGSLKLANGRVIEKTLYNRRTRQDEPALFVALTFERREVLDSSNIKPMNLIGVDRGENIPAVIALTDPEGCPLSRFKDSLGNPTHILRIGESYKEKQRTIQAKKEVEQRRAGGYSRKYASKAKNLADDMVRNTARDLLYYAVTQDAMLIFENLSRGFGRQGKRTFMAERQYTRMEDWLTAKLAYEGLPSKTYLSKTLAQYTSKTCSNCGFTITSADYDRVLEKLKKTATGWMTTINGKELKVEGQITYYNRYKRQNVVKDLSVELDRLSEESVNNDISSWTKGRSGEALSLLKKRFSHRPVQEKFVCLNCGFETHADEQAALNIARSWLFLRSQEYKKYQTNKTTGNTDKRAFVETWQSFYRKKLKEVWKPAV

SEQ ID NO: 47144 - protein, 980 aa, synthetic construct
  REGION 1..980: note = engineered CasX variant
QEIKRINKIRRRLVKDSNTKKAGKTGPMKTLLVRVMTPDLRERLENLRKKPENIPQPISNTSRANLNKLLTDYTEMKKAILHVYWEEFQKDPVGLMSRVAQPASKKIDQNKLKPEMDEKGNLTTAGFACSQCGQPLFVYKLEQVSEKGKAYTNYFGRCNVAEHEKLILLAQLKPEKDSDEAVTYSLGKFGQRALDFYSIHVTKESTHPVKPLAQIAGNRYASYPVGKALSDACMGTIASFLSKYQDIIIEHQKVVKGNQKRLESLRELAGKENLEYPSVTLPPQPHTKEGVDAYNEVIARVRMWVNLNLWQKLKLSRDDAKPLLRLKGFPSFPLVERQANEVDWWDMVCNVKKLINEKKEDGKVFWQNLAGYKRQEALRPYLSSEEDVRKKGKKFARYQLGDLLLHLEKKHGEYDWGKVYDEAWERIDKKVEGLSKHIKLEEERRSEDAQSKAALTDWLRAKASFVIEGLKEADKDEFCRCELKLQKWYGDLRGKPFAIEAENSILDISGFSKQYNCAFIWQKDGVKKLNLYLIINYFKGGKLRFKKIKPEAFEANRFYTVINKKSGEIVPMEVNFNFDDPNLIILPLAFGKRQGREFIWNDLLSLETGSLKLANGRVIEKTLYNRRTRQDEPALFVALTFERREVLDSSNIKPMNLIGVDRGENIPAVIALTDPEGCPLSRFKDSLGNPTHILRIGESYKEKQRTIQAKKEVEQRRAGGYSRKYASKAKNLADDMVRNTARDLLYYAVTQDAMLIFENLSRGFGRQGKRTFMAERQYTRMEDWLTAKLAYEGLPSKTYLSKTLAQYTSKTCSNCGFTITSADYDRVLEKLKKTATGWMTTINGKELKVEGQITYYNRYKRQNVVKDLSVELDRLSEESVNNDISSWTKGRSGEALSLLKKRFSHRPVQEKFVCLNCGFETHADEQAALNIARSWLFLRSQEYKKYQTNKTTGNTDKRAFVETWQSFYRKKLKEVWKPAV

SEQ ID NO: 47145 - protein, 980 aa, synthetic construct
  REGION 1..980: note = engineered CasX variant
QEIKRINKIRRRLVKDSNTKKAGKTGPMKTLLVRVMTPDLRERLENLRKKPENIPQPISNTSRANLNKLLTDYTEMKKAILHVYWEEFQKDPVGLMSRVAQPASKKIDQNKLKPEMDEKGNLTTAGFACSQCGQPLFVYKLEQVSEKGKAYTNYFGRCNVAEHEKLILLAQLKPEKDSDEAVTYSLGKFGQRALDFYSIHVTKESTHPVKPLAQIAGNRYASHPVGKALSDACMGTIASFLSKYQDIIIEHQKVVKGNQKRLESLRELAGKENLEYPSVTLPPQPHTKEGVDAYNEVIARVRMWVNLNLWQKLKLSRDDAKPLLRLKGFPSFPLVERQANEVDWWDMVCNVKKLINEKKEDGKVFWQNLAGYKRQEALRPYLSSEEDVRKKGKKFARYQLGDLLLHLEKKHGEYDWGKVYDEAWERIDKKVEGLSKHIKLEEERRSEDAQSKAALTDWLRAKASFVIEGLKEADKDEFCRCELKLQKWYGDLRGKPFAIEAENSILDISGFSKQYNCAFIWQKDGVKKLNLYLIINYFKGGKLRFKKIKPEAFEANRFYTVINKKSGEIVPMEVNFNFDDPNLIILPLAFGKRQGREFIWNDLLSLETGSLKLANGRVIEKTLYNRRTRQDEPALFVALTFERREVLDSSNIKPMNLIGVDRGENIPAVIALTDPEGCPLSRFKDSLGNPTHILRIGESYKEKQRTIQAKKEVEQRRAGGYSRKYASKAKNLADDMVRNTARDLLYYAVTQDAMLIFENLSRGFGRQGKRTFMAERQYTRMEDWLTAKLAYEGLPSKTYLSKTLAQYTSKTCSNCGFTITSADYDRVLEKLKKTATGWMTTINGKELKVEGQITYYNRYKRQNVVKDLSVELDRLSEESVNNDISSWTKGRSGEALSLLKKRFSHRPVQEKFVCLNCGFETHADEQAALNIARSWLFLRSQEYKKYQTNKTTGNTDKRAFVETWQSFYRKKLKEVWKPAV

SEQ ID NO: 47146 - protein, 980 aa, synthetic construct
  REGION 1..980: note = engineered CasX variant
QEIKRINKIRRRLVKDSNTKKAGKTGPMKTLLVRVMTPDLRERLENLRKKPENIPQPISNTSRANLNKLLTDYTEMKKAILHVYWEEFQKDPVGLMSRVAQPASKKIDQNKLKPEMDEKGNLTTAGFACSQCGQPLFVYKLEQVSEKGKAYTNYFGRCNVAEHEKLILLAQLKPEKDSDEAVTYSLGKFGQRALDFYSIHVTKESTHPVKPLAQIAGNRYASSPVGKALSDACMGTIASFLSKYQDIIIEHQKVVKGNQKRLESLRELAGKENLEYPSVTLPPQPHTKEGVDAYNEVIARVRMWVNLNLWQKLKLSRDDAKPLLRLKGFPSFPLVERQANEVDWWDMVCNVKKLINEKKEDGKVFWQNLAGYKRQEALRPYLSSEEDVRKKGKKFARYQLGDLLLHLEKKHGEYDWGKVYDEAWERIDKKVEGLSKHIKLEEERRSEDAQSKAALTDWLRAKASFVIEGLKEADKDEFCRCELKLQKWYGDLRGKPFAIEAENSILDISGFSKQYNCAFIWQKDGVKKLNLYLIINYFKGGKLRFKKIKPEAFEANRFYTVINKKSGEIVPMEVNFNFDDPNLIILPLAFGKRQGREFIWNDLLSLETGSLKLANGRVIEKTLYNRRTRQDEPALFVALTFERREVLDSSNIKPMNLIGVDRGENIPAVIALTDPEGCPLSRFKDSLGNPTHILRIGESYKEKQRTIQAKKEVEQRRAGGYSRKYASKAKNLADDMVRNTARDLLYYAVTQDAMLIFENLSRGFGRQGKRTFMAERQYTRMEDWLTAKLAYEGLPSKTYLSKTLAQYTSKTCSNCGFTITSADYDRVLEKLKKTATGWMTTINGKELKVEGQITYYNRYKRQNVVKDLSVELDRLSEESVNNDISSWTKGRSGEALSLLKKRFSHRPVQEKFVCLNCGFETHADEQAALNIARSWLFLRSQEYKKYQTNKTTGNTDKRAFVETWQSFYRKKLKEVWKPAV

SEQ ID NO: 47147 - protein, 980 aa, synthetic construct
  REGION 1..980: note = engineered CasX variant
QEIKRINKIRRRLVKDSNTKKAGKTGPMKTLLVRVMTPDLRERLENLRKKPENIPQPISNTSRANLNKLLTDYTEMKKAILHVYWEEFQKDPVGLMSRVAQPASKKIDQNKLKPEMDEKGNLTTAGFACSQCGQPLFVYKLEQVSEKGKAYTNYFGRCNVAEHEKLILLAQLKPEKDSDEAVTYSLGKFGQRALDFYSIHVTKESTHPVKPLAQIAGNRYASTPVGKALSDACMGTIASFLSKYQDIIIEHQKVVKGNQKRLESLRELAGKENLEYPSVTLPPQPHTKEGVDAYNEVIARVRMWVNLNLWQKLKLSRDDAKPLLRLKGFPSFPLVERQANEVDWWDMVCNVKKLINEKKEDGKVFWQNLAGYKRQEALRPYLSSEEDVRKKGKKFARYQLGDLLLHLEKKHGEYDWGKVYDEAWERIDKKVEGLSKHIKLEEERRSEDAQSKAALTDWLRAKASFVIEGLKEADKDEFCRCELKLQKWYGDLRGKPFAIEAENSILDISGFSKQYNCAFIWQKDGVKKLNLYLIINYFKGGKLRFKKIKPEAFEANRFYTVINKKSGEIVPMEVNFNFDDPNLIILPLAFGKRQGREFIWNDLLSLETGSLKLANGRVIEKTLYNRRTRQDEPALFVALTFERREVLDSSNIKPMNLIGVDRGENIPAVIALTDPEGCPLSRFKDSLGNPTHILRIGESYKEKQRTIQAKKEVEQRRAGGYSRKYASKAKNLADDMVRNTARDLLYYAVTQDAMLIFENLSRGFGRQGKRTFMAERQYTRMEDWLTAKLAYEGLPSKTYLSKTLAQYTSKTCSNCGFTITSADYDRVLEKLKKTATGWMTTINGKELKVEGQITYYNRYKRQNVVKDLSVELDRLSEESVNNDISSWTKGRSGEALSLLKKRFSHRPVQEKFVCLNCGFETHADEQAALNIARSWLFLRSQEYKKYQTNKTTGNTDKRAFVETWQSFYRKKLKEVWKPAV

SEQ ID NO: 47148 - protein, 980 aa, synthetic construct
  REGION 1..980: note = engineered CasX variant
QEIKRINKIRRRLVKDSNTKKAGKTGPMKTLLVRVMTPDLRERLENLRKKPENIPQPISNTSRANLNKLLTDYTEMKKAILHVYWEEFQKDPVGLMSRVAQPASKKIDQNKLKPEMDEKGNLTTAGFACSQCGQPLFVYKLEQVSEKGKAYTNYFGRCNVAEHEKLILLAQLKPEKDSDEAVTYSLGKFGQRALDFYSIHVTKESTHPVKPLAQIAGNRYASAPVGKALSDACMGTIASFLSKYQDIIIEHQKVVKGNQKRLESLRELAGKENLEYPSVTLPPQPHTKEGVDAYNEVIARVRMWVNLNLWQKLKLSRDDAKPLLRLKGFPSFPLVERQANEVDWWDMVCNVKKLINEKKEDGKVFWQNLAGYKRQEALRPYLSSEEDVRKKGKKFARYQLGDLLLHLEKKHGEYDWGKVYDEAWERIDKKVEGLSKHIKLEEERRSEDAQSKAALTDWLRAKASFVIEGLKEADKDEFCRCELKLQKWYGDLRGKPFAIEAENSILDISGFSKQYNCAFIWQKDGVKKLNLYLIINYFKGGKLRFKKIKPEAFEANRFYTVINKKSGEIVPMEVNFNFDDPNLIILPLAFGKRQGREFIWNDLLSLETGSLKLANGRVIEKTLYNRRTRQDEPALFVALTFERREVLDSSNIKPMNLIGVDRGENIPAVIALTDPEGCPLSRFKDSLGNPTHILRIGESYKEKQRTIQAKKEVEQRRAGGYSRKYASKAKNLADDMVRNTARDLLYYAVTQDAMLIFENLSRGFGRQGKRTFMAERQYTRMEDWLTAKLAYEGLPSKTYLSKTLAQYTSKTCSNCGFTITSADYDRVLEKLKKTATGWMTTINGKELKVEGQITYYNRYKRQNVVKDLSVELDRLSEESVNNDISSWTKGRSGEALSLLKKRFSHRPVQEKFVCLNCGFETHADEQAALNIARSWLFLRSQEYKKYQTNKTTGNTDKRAFVETWQSFYRKKLKEVWKPAV

SEQ ID NO: 47149 - protein, 980 aa, synthetic construct
  REGION 1..980: note = engineered CasX variant
QEIKRINKIRRRLVKDSNTKKAGKTGPMKTLLVRVMTPDLRERLENLRKKPENIPQPISNTSRANLNKLLTDYTEMKKAILHVYWEEFQKDPVGLMSRVAQPASKKIDQNKLKPEMDEKGNLTTAGFACSQCGQPLFVYKLEQVSEKGKAYTNYFGRCNVAEHEKLILLAQLKPEKDSDEAVTYSLGKFGQRALDFYSIHVTKESTHPVKPLAQIAGNRYASVPVGKALSDACMGTIASFLSKYQDIIIEHQKVVKGNQKRLESLRELAGKENLEYPSVTLPPQPHTKEGVDAYNEVIARVRMWVNLNLWQKLKLSRDDAKPLLRLKGFPSFPLVERQANEVDWWDMVCNVKKLINEKKEDGKVFWQNLAGYKRQEALRPYLSSEEDVRKKGKKFARYQLGDLLLHLEKKHGEYDWGKVYDEAWERIDKKVEGLSKHIKLEEERRSEDAQSKAALTDWLRAKASFVIEGLKEADKDEFCRCELKLQKWYGDLRGKPFAIEAENSILDISGFSKQYNCAFIWQKDGVKKLNLYLIINYFKGGKLRFKKIKPEAFEANRFYTVINKKSGEIVPMEVNFNFDDPNLIILPLAFGKRQGREFIWNDLLSLETGSLKLANGRVIEKTLYNRRTRQDEPALFVALTFERREVLDSSNIKPMNLIGVDRGENIPAVIALTDPEGCPLSRFKDSLGNPTHILRIGESYKEKQRTIQAKKEVEQRRAGGYSRKYASKAKNLADDMVRNTARDLLYYAVTQDAMLIFENLSRGFGRQGKRTFMAERQYTRMEDWLTAKLAYEGLPSKTYLSKTLAQYTSKTCSNCGFTITSADYDRVLEKLKKTATGWMTTINGKELKVEGQITYYNRYKRQNVVKDLSVELDRLSEESVNNDISSWTKGRSGEALSLLKKRFSHRPVQEKFVCLNCGFETHADEQAALNIARSWLFLRSQEYKKYQTNKTTGNTDKRAFVETWQSFYRKKLKEVWKPAV

SEQ ID NO: 47150 - protein, 980 aa, synthetic construct
  REGION 1..980: note = engineered CasX variant
QEIKRINKIRRRLVKDSNTKKAGKTGPMKTLLVRVMTPDLRERLENLRKKPENIPQPISNTSRANLNKLLTDYTEMKKAILHVYWEEFQKDPVGLMSRVAQPASKKIDQNKLKPEMDEKGNLTTAGFACSQCGQPLFVYKLEQVSEKGKAYTNYFGRCNVAEHEKLIKLAQLKPEKDSDEAVTYSLGKFGQRALDFYSIHVTKESTHPVKPLAQIAGNRYASGPVGKALSDACMGTIASFLSKYQDIIIEHQKVVKGNQKRLESLRELAGKENLEYPSVTLPPQPHTKEGVDAYNEVIARVRMWVNLNLWQKLKLSRDDAKPLLRLKGFPSFPLVERQANEVDWWDMVCNVKKLINEKKEDGKVFWQNLAGYKRQEALRPYLSSEEDVRKKGKKFARYQLGDLLLHLEKKHGEYDWGKVYDEAWERIDKKVEGLSKHIKLEEERRSEDAQSKAALTDWLRAKASFVIEGLKEADKDEFCRCELKLQKWYGDLRGKPFAIEAENSILDISGFSKQYNCAFIWQKDGVKKLNLYLIINYFKGGKLRFKKIKPEAFEANRFYTVINKKSGEIVPMEVNFNFDDPNLIILPLAFGKRQGREFIWNDLLSLETGSLKLANGRVIEKTLYNRRTRQDEPALFVALTFERREVLDSSNIKPMNLIGVDRGENIPAVIALTDPEGCPLSRFKDSLGNPTHILRIGESYKEKQRTIQAKKEVEQRRAGGYSRKYASKAKNLADDMVRNTARDLLYYAVTQDAMLIFENLSRGFGRQGKRTFMAERQYTRMEDWLTAKLAYEGLPSKTYLSKTLAQYTSKTCSNCGFTITSADYDRVLEKLKKTATGWMTTINGKELKVEGQITYYNRYKRQNVVKDLSVELDRLSEESVNNDISSWTKGRSGEALSLLKKRFSHRPVQEKFVCLNCGFETHADEQAALNIARSWLFLRSQEYKKYQTNKTTGNTDKRAFVETWQSFYRKKLKEVWKPAV

SEQ ID NO: 47151 - protein, 979 aa, synthetic construct
  REGION 1..979: note = engineered CasX variant
QEIKRINKIRRRLVKDSNTKKAGKTGPMKTLLVRVMTPDLRERLENLRKKPENIPQPISNTSRANLNKLLTDYTEMKKAILHVYWEEFQKDPVGLMSRVAQPASKKIDQNKLKPEMDEKGNLTTAGFACSQCGQPLFVYKLEQVSEKGKAYTNYFGRCNVAEHEKLILLAQLKPEKDSDEAVTYSLGKFGQRALDFYSIHVTKESTHPVKPLAQIAGNRYASPVGKALSDACMGTIASFLSKYQDIIIEHQKVVKGNQKRLESLRELAGKENLEYPSVTLPPQPHTKEGVDAYNEVIARVRMWVNLNLWQKLKLSRDDAKPLLRLKGFPSFPLVERQANEVDWWDMVCNVKKLINEKKEDGKVFWQNLAGYKRQEALRPYLSSEEDVRKKGKKFARYQLGDLLLHLEKKHGEYDWGKVYDEAWERIDKKVEGLSKHIKLEEERRSEDAQSKAALTDWLRAKASFVIEGLKEADKDEFCRCELKLQKWYGDLRGKPFAIEAENSILDISGFSKQYNCAFIWQKDGVKKLNLYLIINYFKGGKLRFKKIKPEAFEANRFYTVINKKSGEIVPMEVNFNFDDPNLIILPLAFGKRQGREFIWNDLLSLETGSLKLANGRVIEKTLYNRRTRQDEPALFVALTFERREVLDSSNIKPMNLIGVDRGENIPAVIALTDPEGCPLSRFKDSLGNPTHILRIGESYKEKQRTIQAKKEVEQRRAGGYSRKYASKAKNLADDMVRNTARDLLYYAVTQDAMLIFENLSRGFGRQGKRTFMAERQYTRMEDWLTAKLAYEGLPSKTYLSKTLAQYTSKTCSNCGFTITSADYDRVLEKLKKTATGWMTTINGKELKVEGQITYYNRYKRQNVVKDLSVELDRLSEESVNNDISSWTKGRSGEALSLLKKRFSHRPVQEKFVCLNCGFETHADEQAALNIARSWLFLRSQEYKKYQTNKTTGNTDKRAFVETWQSFYRKKLKEVWKPAV

SEQ ID NO: 47152 - protein, 979 aa, synthetic construct
  REGION 1..979: note = engineered CasX variant
QEIKRINKIRRRLVKDSNTKKAGKTGPMKTLLVRVMTPDLRERLENLRKKPENIPQPISNTSRANLNKLLTDYTEMKKAILHVYWEEFQKDPVGLMSRVAQPASKKIDQNKLKPEMDEKGNLTTAGFACSQCGQPLFVYKLEQVSEKGKAYTNYFGRCNVAEHEKLILLAQLKPEKDSDEAVTYSLGKFGQRALDFYSIHVTKESTHPVKPLAQIAGNRYASYPVGKALSDACMGTIASFLSKYQDIIIEHQKVVKGNQKRLESLRELAGKENLEYPSVTLPPQPHTKEGVDAYNEVIARVRMWVNLNLWQKLKLSRDDAKPLLRLKGFPSFPLVERQANEVDWWDMVCNVKKLINEKKEDGKVFWQNLAGYKRQEALRPYLSSEEDVRKKGKKFARYQLGDLLLHLEKKHGEDWGDVYDEAWERIDKKVEGLSKHIKLEEERRSEDAQSKAALTDWLRAKASFVIEGLKEADKDEFCRCELKLQKWYGDLRGKPFAIEAENSILDISGFSKQYNCAFIWQKDGVKKLNLYLIINYFKGGKLRFKKIKPEAFEANRFYTVINKKSGEIVPMEVNFNFDDPNLIILPLAFGKRQGREFIWNDLLSLETGSLKLANGRVIEKTLYNRRTRQDEPALFVALTFERREVLDSSNIKPMNLIGVDRGENIPAVIALTDPEGCPLSRFKDSLGNPTHILRIGESYKEKQRTIQAKKEVEQRRAGGYSRKYASKAKNLADDMVRNTARDLLYYAVTQDAMLIFENLSRGFGRQGKRTFMAERQYTRMEDWLTAKLAYEGLPSKTYLSKTLAQYTSKTCSNCGFTITSADYDRVLEKLKKTATGWMTTINGKELKVEGQITYYNRYKRQNVVKDLSVELDRLSEESVNNDISSWTKGRSGEALSLLKKRFSHRPVQEKFVCLNCGFETHADEQAALNIARSWLFLRSQEYKKYQTNKTTGNTDKRAFVETWQSFYRKKLKEVWKPAV

SEQ ID NO: 47153 - protein, 979 aa, synthetic construct
  REGION 1..979: note = engineered CasX variant
QEIKRINKIRRRLVKDSNTKKAGKTGPMKTLLVRVMTPDLRERLENLRKKPENIPQPISNTSRANLNKLLTDYTEMKKAILHVYWEEFQKDPVGLMSRVAQPASKKIDQNKLKPEMDEKGNLTTAGFACSQCGQPLFVYKLEQVSEKGKAYTNYFGRCNVAEHEKLILLAQLKPEKDSDEAVTYSLGKFGQRALDFYSIHVTKESTHPVKPLAQIAGNRYASHPVGKALSDACMGTIASFLSKYQDIIIEHQKVVKGNQKRLESLRELAGKENLEYPSVTLPPQPHTKEGVDAYNEVIARVRMWVNLNLWQKLKLSRDDAKPLLRLKGFPSFPLVERQANEVDWWDMVCNVKKLINEKKEDGKVFWQNLAGYKRQEALRPYLSSEEDVRKKGKKFARYQLGDLLLHLEKKHGEDWGDVYDEAWERIDKKVEGLSKHIKLEEERRSEDAQSKAALTDWLRAKASFVIEGLKEADKDEFCRCELKLQKWYGDLRGKPFAIEAENSILDISGFSKQYNCAFIWQKDGVKKLNLYLIINYFKGGKLRFKKIKPEAFEANRFYTVINKKSGEIVPMEVNFNFDDPNLIILPLAFGKRQGREFIWNDLLSLETGSLKLANGRVIEKTLYNRRTRQDEPALFVALTFERREVLDSSNIKPMNLIGVDRGENIPAVIALTDPEGCPLSRFKDSLGNPTHILRIGESYKEKQRTIQAKKEVEQRRAGGYSRKYASKAKNLADDMVRNTARDLLYYAVTQDAMLIFENLSRGFGRQGKRTFMAERQYTRMEDWLTAKLAYEGLPSKTYLSKTLAQYTSKTCSNCGFTITSADYDRVLEKLKKTATGWMTTINGKELKVEGQITYYNRYKRQNVVKDLSVELDRLSEESVNNDISSWTKGRSGEALSLLKKRFSHRPVQEKFVCLNCGFETHADEQAALNIARSWLFLRSQEYKKYQTNKTTGNTDKRAFVETWQSFYRKKLKEVWKPAV

SEQ ID NO: 47154 - protein, 979 aa, synthetic construct
  REGION 1..979: note = engineered CasX variant
QEIKRINKIRRRLVKDSNTKKAGKTGPMKTLLVRVMTPDLRERLENLRKKPENIPQPISNTSRANLNKLLTDYTEMKKAILHVYWEEFQKDPVGLMSRVAQPASKKIDQNKLKPEMDEKGNLTTAGFACSQCGQPLFVYKLEQVSEKGKAYTNYFGRCNVAEHEKLILLAQLKPEKDSDEAVTYSLGKFGQRALDFYSIHVTKESTHPVKPLAQIAGNRYASSPVGKALSDACMGTIASFLSKYQDIIIEHQKVVKGNQKRLESLRELAGKENLEYPSVTLPPQPHTKEGVDAYNEVIARVRMWVNLNLWQKLKLSRDDAKPLLRLKGFPSFPLVERQANEVDWWDMVCNVKKLINEKKEDGKVFWQNLAGYKRQEALRPYLSSEEDVRKKGKKFARYQLGDLLLHLEKKHGEDWGDVYDEAWERIDKKVEGLSKHIKLEEERRSEDAQSKAALTDWLRAKASFVIEGLKEADKDEFCRCELKLQKWYGDLRGKPFAIEAENSILDISGFSKQYNCAFIWQKDGVKKLNLYLIINYFKGGKLRFKKIKPEAFEANRFYTVINKKSGEIVPMEVNFNFDDPNLIILPLAFGKRQGREFIWNDLLSLETGSLKLANGRVIEKTLYNRRTRQDEPALFVALTFERREVLDSSNIKPMNLIGVDRGENIPAVIALTDPEGCPLSRFKDSLGNPTHILRIGESYKEKQRTIQAKKEVEQRRAGGYSRKYASKAKNLADDMVRNTARDLLYYAVTQDAMLIFENLSRGFGRQGKRTFMAERQYTRMEDWLTAKLAYEGLPSKTYLSKTLAQYTSKTCSNCGFTITSADYDRVLEKLKKTATGWMTTINGKELKVEGQITYYNRYKRQNVVKDLSVELDRLSEESVNNDISSWTKGRSGEALSLLKKRFSHRPVQEKFVCLNCGFETHADEQAALNIARSWLFLRSQEYKKYQTNKTTGNTDKRAFVETWQSFYRKKLKEVWKPAV

SEQ ID NO: 47155 - protein, 979 aa, synthetic construct
  REGION 1..979: note = engineered CasX variant
QEIKRINKIRRRLVKDSNTKKAGKTGPMKTLLVRVMTPDLRERLENLRKKPENIPQPISNTSRANLNKLLTDYTEMKKAILHVYWEEFQKDPVGLMSRVAQPASKKIDQNKLKPEMDEKGNLTTAGFACSQCGQPLFVYKLEQVSEKGKAYTNYFGRCNVAEHEKLILLAQLKPEKDSDEAVTYSLGKFGQRALDFYSIHVTKESTHPVKPLAQIAGNRYASTPVGKALSDACMGTIASFLSKYQDIIIEHQKVVKGNQKRLESLRELAGKENLEYPSVTLPPQPHTKEGVDAYNEVIARVRMWVNLNLWQKLKLSRDDAKPLLRLKGFPSFPLVERQANEVDWWDMVCNVKKLINEKKEDGKVFWQNLAGYKRQEALRPYLSSEEDVRKKGKKFARYQLGDLLLHLEKKHGEDWGDVYDEAWERIDKKVEGLSKHIKLEEERRSEDAQSKAALTDWLRAKASFVIEGLKEADKDEFCRCELKLQKWYGDLRGKPFAIEAENSILDISGFSKQYNCAFIWQKDGVKKLNLYLIINYFKGGKLRFKKIKPEAFEANRFYTVINKKSGEIVPMEVNFNFDDPNLIILPLAFGKRQGREFIWNDLLSLETGSLKLANGRVIEKTLYNRRTRQDEPALFVALTFERREVLDSSNIKPMNLIGVDRGENIPAVIALTDPEGCPLSRFKDSLGNPTHILRIGESYKEKQRTIQAKKEVEQRRAGGYSRKYASKAKNLADDMVRNTARDLLYYAVTQDAMLIFENLSRGFGRQGKRTFMAERQYTRMEDWLTAKLAYEGLPSKTYLSKTLAQYTSKTCSNCGFTITSADYDRVLEKLKKTATGWMTTINGKELKVEGQITYYNRYKRQNVVKDLSVELDRLSEESVNNDISSWTKGRSGEALSLLKKRFSHRPVQEKFVCLNCGFETHADEQAALNIARSWLFLRSQEYKKYQTNKTTGNTDKRAFVETWQSFYRKKLKEVWKPAV

SEQ ID NO: 47156 - protein, 979 aa, synthetic construct
  REGION 1..979: note = engineered CasX variant
QEIKRINKIRRRLVKDSNTKKAGKTGPMKTLLVRVMTPDLRERLENLRKKPENIPQPISNTSRANLNKLLTDYTEMKKAILHVYWEEFQKDPVGLMSRVAQPASKKIDQNKLKPEMDEKGNLTTAGFACSQCGQPLFVYKLEQVSEKGKAYTNYFGRCNVAEHEKLILLAQLKPEKDSDEAVTYSLGKFGQRALDFYSIHVTKESTHPVKPLAQIAGNRYASAPVGKALSDACMGTIASFLSKYQDIIIEHQKVVKGNQKRLESLRELAGKENLEYPSVTLPPQPHTKEGVDAYNEVIARVRMWVNLNLWQKLKLSRDDAKPLLRLKGFPSFPLVERQANEVDWWDMVCNVKKLINEKKEDGKVFWQNLAGYKRQEALRPYLSSEEDVRKKGKKFARYQLGDLLLHLEKKHGEDWGDVYDEAWERIDKKVEGLSKHIKLEEERRSEDAQSKAALTDWLRAKASFVIEGLKEADKDEFCRCELKLQKWYGDLRGKPFAIEAENSILDISGFSKQYNCAFIWQKDGVKKLNLYLIINYFKGGKLRFKKIKPEAFEANRFYTVINKKSGEIVPMEVNFNFDDPNLIILPLAFGKRQGREFIWNDLLSLETGSLKLANGRVIEKTLYNRRTRQDEPALFVALTFERREVLDSSNIKPMNLIGVDRGENIPAVIALTDPEGCPLSRFKDSLGNPTHILRIGESYKEKQRTIQAKKEVEQRRAGGYSRKYASKAKNLADDMVRNTARDLLYYAVTQDAMLIFENLSRGFGRQGKRTFMAERQYTRMEDWLTAKLAYEGLPSKTYLSKTLAQYTSKTCSNCGFTITSADYDRVLEKLKKTATGWMTTINGKELKVEGQITYYNRYKRQNVVKDLSVELDRLSEESVNNDISSWTKGRSGEALSLLKKRFSHRPVQEKFVCLNCGFETHADEQAALNIARSWLFLRSQEYKKYQTNKTTGNTDKRAFVETWQSFYRKKLKEVWKPAV

SEQ ID NO: 47157 - protein, 979 aa, synthetic construct
  REGION 1..979: note = engineered CasX variant
QEIKRINKIRRRLVKDSNTKKAGKTGPMKTLLVRVMTPDLRERLENLRKKPENIPQPISNTSRANLNKLLTDYTEMKKAILHVYWEEFQKDPVGLMSRVAQPASKKIDQNKLKPEMDEKGNLTTAGFACSQCGQPLFVYKLEQVSEKGKAYTNYFGRCNVAEHEKLILLAQLKPEKDSDEAVTYSLGKFGQRALDFYSIHVTKESTHPVKPLAQIAGNRYASVPVGKALSDACMGTIASFLSKYQDIIIEHQKVVKGNQKRLESLRELAGKENLEYPSVTLPPQPHTKEGVDAYNEVIARVRMWVNLNLWQKLKLSRDDAKPLLRLKGFPSFPLVERQANEVDWWDMVCNVKKLINEKKEDGKVFWQNLAGYKRQEALRPYLSSEEDVRKKGKKFARYQLGDLLLHLEKKHGEDWGDVYDEAWERIDKKVEGLSKHIKLEEERRSEDAQSKAALTDWLRAKASFVIEGLKEADKDEFCRCELKLQKWYGDLRGKPFAIEAENSILDISGFSKQYNCAFIWQKDGVKKLNLYLIINYFKGGKLRFKKIKPEAFEANRFYTVINKKSGEIVPMEVNFNFDDPNLIILPLAFGKRQGREFIWNDLLSLETGSLKLANGRVIEKTLYNRRTRQDEPALFVALTFERREVLDSSNIKPMNLIGVDRGENIPAVIALTDPEGCPLSRFKDSLGNPTHILRIGESYKEKQRTIQAKKEVEQRRAGGYSRKYASKAKNLADDMVRNTARDLLYYAVTQDAMLIFENLSRGFGRQGKRTFMAERQYTRMEDWLTAKLAYEGLPSKTYLSKTLAQYTSKTCSNCGFTITSADYDRVLEKLKKTATGWMTTINGKELKVEGQITYYNRYKRQNVVKDLSVELDRLSEESVNNDISSWTKGRSGEALSLLKKRFSHRPVQEKFVCLNCGFETHADEQAALNIARSWLFLRSQEYKKYQTNKTTGNTDKRAFVETWQSFYRKKLKEVWKPAV

SEQ ID NO: 47158 - protein, 979 aa, synthetic construct
  REGION 1..979: note = engineered CasX variant
QEIKRINKIRRRLVKDSNTKKAGKTGPMKTLLVRVMTPDLRERLENLRKKPENIPQPISNTSRANLNKLLTDYTEMKKAILHVYWEEFQKDPVGLMSRVAQPASKKIDQNKLKPEMDEKGNLTTAGFACSQCGQPLFVYKLEQVSEKGKAYTNYFGRCNVAEHEKLIKLAQLKPEKDSDEAVTYSLGKFGQRALDFYSIHVTKESTHPVKPLAQIAGNRYASGPVGKALSDACMGTIASFLSKYQDIIIEHQKVVKGNQKRLESLRELAGKENLEYPSVTLPPQPHTKEGVDAYNEVIARVRMWVNLNLWQKLKLSRDDAKPLLRLKGFPSFPLVERQANEVDWWDMVCNVKKLINEKKEDGKVFWQNLAGYKRQEALRPYLSSEEDVRKKGKKFARYQLGDLLLHLEKKHGEDWGDVYDEAWERIDKKVEGLSKHIKLEEERRSEDAQSKAALTDWLRAKASFVIEGLKEADKDEFCRCELKLQKWYGDLRGKPFAIEAENSILDISGFSKQYNCAFIWQKDGVKKLNLYLIINYFKGGKLRFKKIKPEAFEANRFYTVINKKSGEIVPMEVNFNFDDPNLIILPLAFGKRQGREFIWNDLLSLETGSLKLANGRVIEKTLYNRRTRQDEPALFVALTFERREVLDSSNIKPMNLIGVDRGENIPAVIALTDPEGCPLSRFKDSLGNPTHILRIGESYKEKQRTIQAKKEVEQRRAGGYSRKYASKAKNLADDMVRNTARDLLYYAVTQDAMLIFENLSRGFGRQGKRTFMAERQYTRMEDWLTAKLAYEGLPSKTYLSKTLAQYTSKTCSNCGFTITSADYDRVLEKLKKTATGWMTTINGKELKVEGQITYYNRYKRQNVVKDLSVELDRLSEESVNNDISSWTKGRSGEALSLLKKRFSHRPVQEKFVCLNCGFETHADEQAALNIARSWLFLRSQEYKKYQTNKTTGNTDKRAFVETWQSFYRKKLKEVWKPAV

SEQ ID NO: 47159 - protein, 978 aa, synthetic construct
  REGION 1..978: note = engineered CasX variant
QEIKRINKIRRRLVKDSNTKKAGKTGPMKTLLVRVMTPDLRERLENLRKKPENIPQPISNTSRANLNKLLTDYTEMKKAILHVYWEEFQKDPVGLMSRVAQPASKKIDQNKLKPEMDEKGNLTTAGFACSQCGQPLFVYKLEQVSEKGKAYTNYFGRCNVAEHEKLILLAQLKPEKDSDEAVTYSLGKFGQRALDFYSIHVTKESTHPVKPLAQIAGNRYASPVGKALSDACMGTIASFLSKYQDIIIEHQKVVKGNQKRLESLRELAGKENLEYPSVTLPPQPHTKEGVDAYNEVIARVRMWVNLNLWQKLKLSRDDAKPLLRLKGFPSFPLVERQANEVDWWDMVCNVKKLINEKKEDGKVFWQNLAGYKRQEALRPYLSSEEDVRKKGKKFARYQLGDLLLHLEKKHGEDWGDVYDEAWERIDKKVEGLSKHIKLEEERRSEDAQSKAALTDWLRAKASFVIEGLKEADKDEFCRCELKLQKWYGDLRGKPFAIEAENSILDISGFSKQYNCAFIWQKDGVKKLNLYLIINYFKGGKLRFKKIKPEAFEANRFYTVINKKSGEIVPMEVNFNFDDPNLIILPLAFGKRQGREFIWNDLLSLETGSLKLANGRVIEKTLYNRRTRQDEPALFVALTFERREVLDSSNIKPMNLIGVDRGENIPAVIALTDPEGCPLSRFKDSLGNPTHILRIGESYKEKQRTIQAKKEVEQRRAGGYSRKYASKAKNLADDMVRNTARDLLYYAVTQDAMLIFENLSRGFGRQGKRTFMAERQYTRMEDWLTAKLAYEGLPSKTYLSKTLAQYTSKTCSNCGFTITSADYDRVLEKLKKTATGWMTTINGKELKVEGQITYYNRYKRQNVVKDLSVELDRLSEESVNNDISSWTKGRSGEALSLLKKRFSHRPVQEKFVCLNCGFETHADEQAALNIARSWLFLRSQEYKKYQTNKTTGNTDKRAFVETWQSFYRKKLKEVWKPAV

SEQ ID NO: 47160 - protein, 979 aa, synthetic construct
  REGION 1..979: note = engineered CasX variant
QEIKRINKIRRRLVKDSNTKKAGKTGPMKTLLVRVMTPDLRERLENLRKKPENIPQPISNTSRANLNKLLTDYTEMKKAILHVYWEEFQKDPVGLMSRVAQPASKKIDQNKLKPEMDEKGNLTTAGFACSQCGQPLFVYKLEQVSEKGKAYTNYFGRCNVAEHEKLILLAQLKPEKDSDEAVTYSLGKFGQRALDFYSIHVTKESTHPVKPLAQIAGNRYASYPVGKALSDACMGTIASFLSKYQDIIIEHQKVVKGNQKRLESLRELAGKENLEYPSVTLPPQPHTKEGVDAYNEVIARVRMWVNLNLWQKLKLSRDDAKPLLRLKGFPSFPLVERQANEVDWWDMVCNVKKLINEKKEDGKVFWQNLAGYKRQEALRPYLSSEEDVRKKGKKFARYQLGDLLLHLEKKHGEDWGKVYGEAWERIDKKVEGLSKHIKLEEERRSEDAQSKAALTDWLRAKASFVIEGLKEADKDEFCRCELKLQKWYGDLRGKPFAIEAENSILDISGFSKQYNCAFIWQKDGVKKLNLYLIINYFKGGKLRFKKIKPEAFEANRFYTVINKKSGEIVPMEVNFNFDDPNLIILPLAFGKRQGREFIWNDLLSLETGSLKLANGRVIEKTLYNRRTRQDEPALFVALTFERREVLDSSNIKPMNLIGVDRGENIPAVIALTDPEGCPLSRFKDSLGNPTHILRIGESYKEKQRTIQAKKEVEQRRAGGYSRKYASKAKNLADDMVRNTARDLLYYAVTQDAMLIFENLSRGFGRQGKRTFMAERQYTRMEDWLTAKLAYEGLPSKTYLSKTLAQYTSKTCSNCGFTITSADYDRVLEKLKKTATGWMTTINGKELKVEGQITYYNRYKRQNVVKDLSVELDRLSEESVNNDISSWTKGRSGEALSLLKKRFSHRPVQEKFVCLNCGFETHADEQAALNIARSWLFLRSQEYKKYQTNKTTGNTDKRAFVETWQSFYRKKLKEVWKPAV

SEQ ID NO: 47161 - protein, 979 aa, synthetic construct
  REGION 1..979: note = engineered CasX variant
QEIKRINKIRRRLVKDSNTKKAGKTGPMKTLLVRVMTPDLRERLENLRKKPENIPQPISNTSRANLNKLLTDYTEMKKAILHVYWEEFQKDPVGLMSRVAQPASKKIDQNKLKPEMDEKGNLTTAGFACSQCGQPLFVYKLEQVSEKGKAYTNYFGRCNVAEHEKLILLAQLKPEKDSDEAVTYSLGKFGQRALDFYSIHVTKESTHPVKPLAQIAGNRYASHPVGKALSDACMGTIASFLSKYQDIIIEHQKVVKGNQKRLESLRELAGKENLEYPSVTLPPQPHTKEGVDAYNEVIARVRMWVNLNLWQKLKLSRDDAKPLLRLKGFPSFPLVERQANEVDWWDMVCNVKKLINEKKEDGKVFWQNLAGYKRQEALRPYLSSEEDVRKKGKKFARYQLGDLLLHLEKKHGEDWGKVYGEAWERIDKKVEGLSKHIKLEEERRSEDAQSKAALTDWLRAKASFVIEGLKEADKDEFCRCELKLQKWYGDLRGKPFAIEAENSILDISGFSKQYNCAFIWQKDGVKKLNLYLIINYFKGGKLRFKKIKPEAFEANRFYTVINKKSGEIVPMEVNFNFDDPNLIILPLAFGKRQGREFIWNDLLSLETGSLKLANGRVIEKTLYNRRTRQDEPALFVALTFERREVLDSSNIKPMNLIGVDRGENIPAVIALTDPEGCPLSRFKDSLGNPTHILRIGESYKEKQRTIQAKKEVEQRRAGGYSRKYASKAKNLADDMVRNTARDLLYYAVTQDAMLIFENLSRGFGRQGKRTFMAERQYTRMEDWLTAKLAYEGLPSKTYLSKTLAQYTSKTCSNCGFTITSADYDRVLEKLKKTATGWMTTINGKELKVEGQITYYNRYKRQNVVKDLSVELDRLSEESVNNDISSWTKGRSGEALSLLKKRFSHRPVQEKFVCLNCGFETHADEQAALNIARSWLFLRSQEYKKYQTNKTTGNTDKRAFVETWQSFYRKKLKEVWKPAV

SEQ ID NO: 47162 - protein, 979 aa, synthetic construct
  REGION 1..979: note = engineered CasX variant
QEIKRINKIRRRLVKDSNTKKAGKTGPMKTLLVRVMTPDLRERLENLRKKPENIPQPISNTSRANLNKLLTDYTEMKKAILHVYWEEFQKDPVGLMSRVAQPASKKIDQNKLKPEMDEKGNLTTAGFACSQCGQPLFVYKLEQVSEKGKAYTNYFGRCNVAEHEKLILLAQLKPEKDSDEAVTYSLGKFGQRALDFYSIHVTKESTHPVKPLAQIAGNRYASSPVGKALSDACMGTIASFLSKYQDIIIEHQKVVKGNQKRLESLRELAGKENLEYPSVTLPPQPHTKEGVDAYNEVIARVRMWVNLNLWQKLKLSRDDAKPLLRLKGFPSFPLVERQANEVDWWDMVCNVKKLINEKKEDGKVFWQNLAGYKRQEALRPYLSSEEDVRKKGKKFARYQLGDLLLHLEKKHGEDWGKVYGEAWERIDKKVEGLSKHIKLEEERRSEDAQSKAALTDWLRAKASFVIEGLKEADKDEFCRCELKLQKWYGDLRGKPFAIEAENSILDISGFSKQYNCAFIWQKDGVKKLNLYLIINYFKGGKLRFKKIKPEAFEANRFYTVINKKSGEIVPMEVNFNFDDPNLIILPLAFGKRQGREFIWNDLLSLETGSLKLANGRVIEKTLYNRRTRQDEPALFVALTFERREVLDSSNIKPMNLIGVDRGENIPAVIALTDPEGCPLSRFKDSLGNPTHILRIGESYKEKQRTIQAKKEVEQRRAGGYSRKYASKAKNLADDMVRNTARDLLYYAVTQDAMLIFENLSRGFGRQGKRTFMAERQYTRMEDWLTAKLAYEGLPSKTYLSKTLAQYTSKTCSNCGFTITSADYDRVLEKLKKTATGWMTTINGKELKVEGQITYYNRYKRQNVVKDLSVELDRLSEESVNNDISSWTKGRSGEALSLLKKRFSHRPVQEKFVCLNCGFETHADEQAALNIARSWLFLRSQEYKKYQTNKTTGNTDKRAFVETWQSFYRKKLKEVWKPAV

SEQ ID NO: 47163 - protein, 979 aa, synthetic construct
  REGION 1..979: note = engineered CasX variant
QEIKRINKIRRRLVKDSNTKKAGKTGPMKTLLVRVMTPDLRERLENLRKKPENIPQPISNTSRANLNKLLTDYTEMKKAILHVYWEEFQKDPVGLMSRVAQPASKKIDQNKLKPEMDEKGNLTTAGFACSQCGQPLFVYKLEQVSEKGKAYTNYFGRCNVAEHEKLILLAQLKPEKDSDEAVTYSLGKFGQRALDFYSIHVTKESTHPVKPLAQIAGNRYASTPVGKALSDACMGTIASFLSKYQDIIIEHQKVVKGNQKRLESLRELAGKENLEYPSVTLPPQPHTKEGVDAYNEVIARVRMWVNLNLWQKLKLSRDDAKPLLRLKGFPSFPLVERQANEVDWWDMVCNVKKLINEKKEDGKVFWQNLAGYKRQEALRPYLSSEEDVRKKGKKFARYQLGDLLLHLEKKHGEDWGKVYGEAWERIDKKVEGLSKHIKLEEERRSEDAQSKAALTDWLRAKASFVIEGLKEADKDEFCRCELKLQKWYGDLRGKPFAIEAENSILDISGFSKQYNCAFIWQKDGVKKLNLYLIINYFKGGKLRFKKIKPEAFEANRFYTVINKKSGEIVPMEVNFNFDDPNLIILPLAFGKRQGREFIWNDLLSLETGSLKLANGRVIEKTLYNRRTRQDEPALFVALTFERREVLDSSNIKPMNLIGVDRGENIPAVIALTDPEGCPLSRFKDSLGNPTHILRIGESYKEKQRTIQAKKEVEQRRAGGYSRKYASKAKNLADDMVRNTARDLLYYAVTQDAMLIFENLSRGFGRQGKRTFMAERQYTRMEDWLTAKLAYEGLPSKTYLSKTLAQYTSKTCSNCGFTITSADYDRVLEKLKKTATGWMTTINGKELKVEGQITYYNRYKRQNVVKDLSVELDRLSEESVNNDISSWTKGRSGEALSLLKKRFSHRPVQEKFVCLNCGFETHADEQAALNIARSWLFLRSQEYKKYQTNKTTGNTDKRAFVETWQSFYRKKLKEVWKPAV

SEQ ID NO: 47164 - protein, 979 aa, synthetic construct
  REGION 1..979: note = engineered CasX variant
QEIKRINKIRRRLVKDSNTKKAGKTGPMKTLLVRVMTPDLRERLENLRKKPENIPQPISNTSRANLNKLLTDYTEMKKAILHVYWEEFQKDPVGLMSRVAQPASKKIDQNKLKPEMDEKGNLTTAGFACSQCGQPLFVYKLEQVSEKGKAYTNYFGRCNVAEHEKLILLAQLKPEKDSDEAVTYSLGKFGQRALDFYSIHVTKESTHPVKPLAQIAGNRYASAPVGKALSDACMGTIASFLSKYQDIIIEHQKVVKGNQKRLESLRELAGKENLEYPSVTLPPQPHTKEGVDAYNEVIARVRMWVNLNLWQKLKLSRDDAKPLLRLKGFPSFPLVERQANEVDWWDMVCNVKKLINEKKEDGKVFWQNLAGYKRQEALRPYLSSEEDVRKKGKKFARYQLGDLLLHLEKKHGEDWGKVYGEAWERIDKKVEGLSKHIKLEEERRSEDAQSKAALTDWLRAKASFVIEGLKEADKDEFCRCELKLQKWYGDLRGKPFAIEAENSILDISGFSKQYNCAFIWQKDGVKKLNLYLIINYFKGGKLRFKKIKPEAFEANRFYTVINKKSGEIVPMEVNFNFDDPNLIILPLAFGKRQGREFIWNDLLSLETGSLKLANGRVIEKTLYNRRTRQDEPALFVALTFERREVLDSSNIKPMNLIGVDRGENIPAVIALTDPEGCPLSRFKDSLGNPTHILRIGESYKEKQRTIQAKKEVEQRRAGGYSRKYASKAKNLADDMVRNTARDLLYYAVTQDAMLIFENLSRGFGRQGKRTFMAERQYTRMEDWLTAKLAYEGLPSKTYLSKTLAQYTSKTCSNCGFTITSADYDRVLEKLKKTATGWMTTINGKELKVEGQITYYNRYKRQNVVKDLSVELDRLSEESVNNDISSWTKGRSGEALSLLKKRFSHRPVQEKFVCLNCGFETHADEQAALNIARSWLFLRSQEYKKYQTNKTTGNTDKRAFVETWQSFYRKKLKEVWKPAV

SEQ ID NO: 47165 - protein, 979 aa, synthetic construct
  REGION 1..979: note = engineered CasX variant
QEIKRINKIRRRLVKDSNTKKAGKTGPMKTLLVRVMTPDLRERLENLRKKPENIPQPISNTSRANLNKLLTDYTEMKKAILHVYWEEFQKDPVGLMSRVAQPASKKIDQNKLKPEMDEKGNLTTAGFACSQCGQPLFVYKLEQVSEKGKAYTNYFGRCNVAEHEKLILLAQLKPEKDSDEAVTYSLGKFGQRALDFYSIHVTKESTHPVKPLAQIAGNRYASVPVGKALSDACMGTIASFLSKYQDIIIEHQKVVKGNQKRLESLRELAGKENLEYPSVTLPPQPHTKEGVDAYNEVIARVRMWVNLNLWQKLKLSRDDAKPLLRLKGFPSFPLVERQANEVDWWDMVCNVKKLINEKKEDGKVFWQNLAGYKRQEALRPYLSSEEDVRKKGKKFARYQLGDLLLHLEKKHGEDWGKVYGEAWERIDKKVEGLSKHIKLEEERRSEDAQSKAALTDWLRAKASFVIEGLKEADKDEFCRCELKLQKWYGDLRGKPFAIEAENSILDISGFSKQYNCAFIWQKDGVKKLNLYLIINYFKGGKLRFKKIKPEAFEANRFYTVINKKSGEIVPMEVNFNFDDPNLIILPLAFGKRQGREFIWNDLLSLETGSLKLANGRVIEKTLYNRRTRQDEPALFVALTFERREVLDSSNIKPMNLIGVDRGENIPAVIALTDPEGCPLSRFKDSLGNPTHILRIGESYKEKQRTIQAKKEVEQRRAGGYSRKYASKAKNLADDMVRNTARDLLYYAVTQDAMLIFENLSRGFGRQGKRTFMAERQYTRMEDWLTAKLAYEGLPSKTYLSKTLAQYTSKTCSNCGFTITSADYDRVLEKLKKTATGWMTTINGKELKVEGQITYYNRYKRQNVVKDLSVELDRLSEESVNNDISSWTKGRSGEALSLLKKRFSHRPVQEKFVCLNCGFETHADEQAALNIARSWLFLRSQEYKKYQTNKTTGNTDKRAFVETWQSFYRKKLKEVWKPAV

SEQ ID NO: 47166 - protein, 979 aa, synthetic construct
  REGION 1..979: note = engineered CasX variant
QEIKRINKIRRRLVKDSNTKKAGKTGPMKTLLVRVMTPDLRERLENLRKKPENIPQPISNTSRANLNKLLTDYTEMKKAILHVYWEEFQKDPVGLMSRVAQPASKKIDQNKLKPEMDEKGNLTTAGFACSQCGQPLFVYKLEQVSEKGKAYTNYFGRCNVAEHEKLIKLAQLKPEKDSDEAVTYSLGKFGQRALDFYSIHVTKESTHPVKPLAQIAGNRYASGPVGKALSDACMGTIASFLSKYQDIIIEHQKVVKGNQKRLESLRELAGKENLEYPSVTLPPQPHTKEGVDAYNEVIARVRMWVNLNLWQKLKLSRDDAKPLLRLKGFPSFPLVERQANEVDWWDMVCNVKKLINEKKEDGKVFWQNLAGYKRQEALRPYLSSEEDVRKKGKKFARYQLGDLLLHLEKKHGEDWGKVYGEAWERIDKKVEGLSKHIKLEEERRSEDAQSKAALTDWLRAKASFVIEGLKEADKDEFCRCELKLQKWYGDLRGKPFAIEAENSILDISGFSKQYNCAFIWQKDGVKKLNLYLIINYFKGGKLRFKKIKPEAFEANRFYTVINKKSGEIVPMEVNFNFDDPNLIILPLAFGKRQGREFIWNDLLSLETGSLKLANGRVIEKTLYNRRTRQDEPALFVALTFERREVLDSSNIKPMNLIGVDRGENIPAVIALTDPEGCPLSRFKDSLGNPTHILRIGESYKEKQRTIQAKKEVEQRRAGGYSRKYASKAKNLADDMVRNTARDLLYYAVTQDAMLIFENLSRGFGRQGKRTFMAERQYTRMEDWLTAKLAYEGLPSKTYLSKTLAQYTSKTCSNCGFTITSADYDRVLEKLKKTATGWMTTINGKELKVEGQITYYNRYKRQNVVKDLSVELDRLSEESVNNDISSWTKGRSGEALSLLKKRFSHRPVQEKFVCLNCGFETHADEQAALNIARSWLFLRSQEYKKYQTNKTTGNTDKRAFVETWQSFYRKKLKEVWKPAV

SEQ ID NO: 47167 - protein, 978 aa, synthetic construct
  REGION 1..978: note = engineered CasX variant
QEIKRINKIRRRLVKDSNTKKAGKTGPMKTLLVRVMTPDLRERLENLRKKPENIPQPISNTSRANLNKLLTDYTEMKKAILHVYWEEFQKDPVGLMSRVAQPASKKIDQNKLKPEMDEKGNLTTAGFACSQCGQPLFVYKLEQVSEKGKAYTNYFGRCNVAEHEKLILLAQLKPEKDSDEAVTYSLGKFGQRALDFYSIHVTKESTHPVKPLAQIAGNRYASPVGKALSDACMGTIASFLSKYQDIIIEHQKVVKGNQKRLESLRELAGKENLEYPSVTLPPQPHTKEGVDAYNEVIARVRMWVNLNLWQKLKLSRDDAKPLLRLKGFPSFPLVERQANEVDWWDMVCNVKKLINEKKEDGKVFWQNLAGYKRQEALRPYLSSEEDVRKKGKKFARYQLGDLLLHLEKKHGEDWGKVYGEAWERIDKKVEGLSKHIKLEEERRSEDAQSKAALTDWLRAKASFVIEGLKEADKDEFCRCELKLQKWYGDLRGKPFAIEAENSILDISGFSKQYNCAFIWQKDGVKKLNLYLIINYFKGGKLRFKKIKPEAFEANRFYTVINKKSGEIVPMEVNFNFDDPNLIILPLAFGKRQGREFIWNDLLSLETGSLKLANGRVIEKTLYNRRTRQDEPALFVALTFERREVLDSSNIKPMNLIGVDRGENIPAVIALTDPEGCPLSRFKDSLGNPTHILRIGESYKEKQRTIQAKKEVEQRRAGGYSRKYASKAKNLADDMVRNTARDLLYYAVTQDAMLIFENLSRGFGRQGKRTFMAERQYTRMEDWLTAKLAYEGLPSKTYLSKTLAQYTSKTCSNCGFTITSADYDRVLEKLKKTATGWMTTINGKELKVEGQITYYNRYKRQNVVKDLSVELDRLSEESVNNDISSWTKGRSGEALSLLKKRFSHRPVQEKFVCLNCGFETHADEQAALNIARSWLFLRSQEYKKYQTNKTTGNTDKRAFVETWQSFYRKKLKEVWKPAV

SEQ ID NO: 47168 - protein, 979 aa, synthetic construct
  REGION 1..979: note = engineered CasX variant
QEIKRINKIRRRLVKDSNTKKAGKTGPMKTLLVRVMTPDLRERLENLRKKPENIPQPISNTSRANLNKLLTDYTEMKKAILHVYWEEFQKDPVGLMSRVAQPASKKIDQNKLKPEMDEKGNLTTAGFACSQCGQPLFVYKLEQVSEKGKAYTNYFGRCNVAEHEKLILLAQLKPEKDSDEAVTYSLGKFGQRALDFYSIHVTKESTHPVKPLAQIAGNRYASYPVGKALSDACMGTIASFLSKYQDIIIEHQKVVKGNQKRLESLRELAGKENLEYPSVTLPPQPHTKEGVDAYNEVIARVRMWVNLNLWQKLKLSRDDAKPLLRLKGFPSFPLVERQANEVDWWDMVCNVKKLINEKKEDGKVFWQNLAGYKRQEALRPYLSSEEDVRKKGKKFARYQLGDLLLHLEKKHGEDWGKVYDEAWERIDKKVEGLSKHIKLEEERRSEDAQSKAALTDWLRAKASFVIEGKKEADKDEFCRCELKLQKWYGDLRGKPFAIEAENSILDISGFSKQYNCAFIWQKDGVKKLNLYLIINYFKGGKLRFKKIKPEAFEANRFYTVINKKSGEIVPMEVNFNFDDPNLIILPLAFGKRQGREFIWNDLLSLETGSLKLANGRVIEKTLYNRRTRQDEPALFVALTFERREVLDSSNIKPMNLIGVDRGENIPAVIALTDPEGCPLSRFKDSLGNPTHILRIGESYKEKQRTIQAKKEVEQRRAGGYSRKYASKAKNLADDMVRNTARDLLYYAVTQDAMLIFENLSRGFGRQGKRTFMAERQYTRMEDWLTAKLAYEGLPSKTYLSKTLAQYTSKTCSNCGFTITSADYDRVLEKLKKTATGWMTTINGKELKVEGQITYYNRYKRQNVVKDLSVELDRLSEESVNNDISSWTKGRSGEALSLLKKRFSHRPVQEKFVCLNCGFETHADEQAALNIARSWLFLRSQEYKKYQTNKTTGNTDKRAFVETWQSFYRKKLKEVWKPAV

SEQ ID NO: 47169 - protein, 979 aa, synthetic construct
  REGION 1..979: note = engineered CasX variant
QEIKRINKIRRRLVKDSNTKKAGKTGPMKTLLVRVMTPDLRERLENLRKKPENIPQPISNTSRANLNKLLTDYTEMKKAILHVYWEEFQKDPVGLMSRVAQPASKKIDQNKLKPEMDEKGNLTTAGFACSQCGQPLFVYKLEQVSEKGKAYTNYFGRCNVAEHEKLILLAQLKPEKDSDEAVTYSLGKFGQRALDFYSIHVTKESTHPVKPLAQIAGNRYASHPVGKALSDACMGTIASFLSKYQDIIIEHQKVVKGNQKRLESLRELAGKENLEYPSVTLPPQPHTKEGVDAYNEVIARVRMWVNLNLWQKLKLSRDDAKPLLRLKGFPSFPLVERQANEVDWWDMVCNVKKLINEKKEDGKVFWQNLAGYKRQEALRPYLSSEEDVRKKGKKFARYQLGDLLLHLEKKHGEDWGKVYDEAWERIDKKVEGLSKHIKLEEERRSEDAQSKAALTDWLRAKASFVIEGKKEADKDEFCRCELKLQKWYGDLRGKPFAIEAENSILDISGFSKQYNCAFIWQKDGVKKLNLYLIINYFKGGKLRFKKIKPEAFEANRFYTVINKKSGEIVPMEVNFNFDDPNLIILPLAFGKRQGREFIWNDLLSLETGSLKLANGRVIEKTLYNRRTRQDEPALFVALTFERREVLDSSNIKPMNLIGVDRGENIPAVIALTDPEGCPLSRFKDSLGNPTHILRIGESYKEKQRTIQAKKEVEQRRAGGYSRKYASKAKNLADDMVRNTARDLLYYAVTQDAMLIFENLSRGFGRQGKRTFMAERQYTRMEDWLTAKLAYEGLPSKTYLSKTLAQYTSKTCSNCGFTITSADYDRVLEKLKKTATGWMTTINGKELKVEGQITYYNRYKRQNVVKDLSVELDRLSEESVNNDISSWTKGRSGEALSLLKKRFSHRPVQEKFVCLNCGFETHADEQAALNIARSWLFLRSQEYKKYQTNKTTGNTDKRAFVETWQSFYRKKLKEVWKPAV

SEQ ID NO: 47170 - protein, 979 aa, synthetic construct
  REGION 1..979: note = engineered CasX variant
QEIKRINKIRRRLVKDSNTKKAGKTGPMKTLLVRVMTPDLRERLENLRKKPENIPQPISNTSRANLNKLLTDYTEMKKAILHVYWEEFQKDPVGLMSRVAQPASKKIDQNKLKPEMDEKGNLTTAGFACSQCGQPLFVYKLEQVSEKGKAYTNYFGRCNVAEHEKLILLAQLKPEKDSDEAVTYSLGKFGQRALDFYSIHVTKESTHPVKPLAQIAGNRYASSPVGKALSDACMGTIASFLSKYQDIIIEHQKVVKGNQKRLESLRELAGKENLEYPSVTLPPQPHTKEGVDAYNEVIARVRMWVNLNLWQKLKLSRDDAKPLLRLKGFPSFPLVERQANEVDWWDMVCNVKKLINEKKEDGKVFWQNLAGYKRQEALRPYLSSEEDVRKKGKKFARYQLGDLLLHLEKKHGEDWGKVYDEAWERIDKKVEGLSKHIKLEEERRSEDAQSKAALTDWLRAKASFVIEGKKEADKDEFCRCELKLQKWYGDLRGKPFAIEAENSILDISGFSKQYNCAFIWQKDGVKKLNLYLIINYFKGGKLRFKKIKPEAFEANRFYTVINKKSGEIVPMEVNFNFDDPNLIILPLAFGKRQGREFIWNDLLSLETGSLKLANGRVIEKTLYNRRTRQDEPALFVALTFERREVLDSSNIKPMNLIGVDRGENIPAVIALTDPEGCPLSRFKDSLGNPTHILRIGESYKEKQRTIQAKKEVEQRRAGGYSRKYASKAKNLADDMVRNTARDLLYYAVTQDAMLIFENLSRGFGRQGKRTFMAERQYTRMEDWLTAKLAYEGLPSKTYLSKTLAQYTSKTCSNCGFTITSADYDRVLEKLKKTATGWMTTINGKELKVEGQITYYNRYKRQNVVKDLSVELDRLSEESVNNDISSWTKGRSGEALSLLKKRFSHRPVQEKFVCLNCGFETHADEQAALNIARSWLFLRSQEYKKYQTNKTTGNTDKRAFVETWQSFYRKKLKEVWKPAV

SEQ ID NO: 47171 - protein, 979 aa, synthetic construct
  REGION 1..979: note = engineered CasX variant
QEIKRINKIRRRLVKDSNTKKAGKTGPMKTLLVRVMTPDLRERLENLRKKPENIPQPISNTSRANLNKLLTDYTEMKKAILHVYWEEFQKDPVGLMSRVAQPASKKIDQNKLKPEMDEKGNLTTAGFACSQCGQPLFVYKLEQVSEKGKAYTNYFGRCNVAEHEKLILLAQLKPEKDSDEAVTYSLGKFGQRALDFYSIHVTKESTHPVKPLAQIAGNRYASTPVGKALSDACMGTIASFLSKYQDIIIEHQKVVKGNQKRLESLRELAGKENLEYPSVTLPPQPHTKEGVDAYNEVIARVRMWVNLNLWQKLKLSRDDAKPLLRLKGFPSFPLVERQANEVDWWDMVCNVKKLINEKKEDGKVFWQNLAGYKRQEALRPYLSSEEDVRKKGKKFARYQLGDLLLHLEKKHGEDWGKVYDEAWERIDKKVEGLSKHIKLEEERRSEDAQSKAALTDWLRAKASFVIEGKKEADKDEFCRCELKLQKWYGDLRGKPFAIEAENSILDISGFSKQYNCAFIWQKDGVKKLNLYLIINYFKGGKLRFKKIKPEAFEANRFYTVINKKSGEIVPMEVNFNFDDPNLIILPLAFGKRQGREFIWNDLLSLETGSLKLANGRVIEKTLYNRRTRQDEPALFVALTFERREVLDSSNIKPMNLIGVDRGENIPAVIALTDPEGCPLSRFKDSLGNPTHILRIGESYKEKQRTIQAKKEVEQRRAGGYSRKYASKAKNLADDMVRNTARDLLYYAVTQDAMLIFENLSRGFGRQGKRTFMAERQYTRMEDWLTAKLAYEGLPSKTYLSKTLAQYTSKTCSNCGFTITSADYDRVLEKLKKTATGWMTTINGKELKVEGQITYYNRYKRQNVVKDLSVELDRLSEESVNNDISSWTKGRSGEALSLLKKRFSHRPVQEKFVCLNCGFETHADEQAALNIARSWLFLRSQEYKKYQTNKTTGNTDKRAFVETWQSFYRKKLKEVWKPAV

SEQ ID NO: 47172 - protein, 979 aa, synthetic construct
  REGION 1..979: note = engineered CasX variant
QEIKRINKIRRRLVKDSNTKKAGKTGPMKTLLVRVMTPDLRERLENLRKKPENIPQPISNTSRANLNKLLTDYTEMKKAILHVYWEEFQKDPVGLMSRVAQPASKKIDQNKLKPEMDEKGNLTTAGFACSQCGQPLFVYKLEQVSEKGKAYTNYFGRCNVAEHEKLILLAQLKPEKDSDEAVTYSLGKFGQRALDFYSIHVTKESTHPVKPLAQIAGNRYASAPVGKALSDACMGTIASFLSKYQDIIIEHQKVVKGNQKRLESLRELAGKENLEYPSVTLPPQPHTKEGVDAYNEVIARVRMWVNLNLWQKLKLSRDDAKPLLRLKGFPSFPLVERQANEVDWWDMVCNVKKLINEKKEDGKVFWQNLAGYKRQEALRPYLSSEEDVRKKGKKFARYQLGDLLLHLEKKHGEDWGKVYDEAWERIDKKVEGLSKHIKLEEERRSEDAQSKAALTDWLRAKASFVIEGKKEADKDEFCRCELKLQKWYGDLRGKPFAIEAENSILDISGFSKQYNCAFIWQKDGVKKLNLYLIINYFKGGKLRFKKIKPEAFEANRFYTVINKKSGEIVPMEVNFNFDDPNLIILPLAFGKRQGREFIWNDLLSLETGSLKLANGRVIEKTLYNRRTRQDEPALFVALTFERREVLDSSNIKPMNLIGVDRGENIPAVIALTDPEGCPLSRFKDSLGNPTHILRIGESYKEKQRTIQAKKEVEQRRAGGYSRKYASKAKNLADDMVRNTARDLLYYAVTQDAMLIFENLSRGFGRQGKRTFMAERQYTRMEDWLTAKLAYEGLPSKTYLSKTLAQYTSKTCSNCGFTITSADYDRVLEKLKKTATGWMTTINGKELKVEGQITYYNRYKRQNVVKDLSVELDRLSEESVNNDISSWTKGRSGEALSLLKKRFSHRPVQEKFVCLNCGFETHADEQAALNIARSWLFLRSQEYKKYQTNKTTGNTDKRAFVETWQSFYRKKLKEVWKPAV

SEQ ID NO: 47173 - protein, 979 aa, synthetic construct
  REGION 1..979: note = engineered CasX variant
QEIKRINKIRRRLVKDSNTKKAGKTGPMKTLLVRVMTPDLRERLENLRKKPENIPQPISNTSRANLNKLLTDYTEMKKAILHVYWEEFQKDPVGLMSRVAQPASKKIDQNKLKPEMDEKGNLTTAGFACSQCGQPLFVYKLEQVSEKGKAYTNYFGRCNVAEHEKLILLAQLKPEKDSDEAVTYSLGKFGQRALDFYSIHVTKESTHPVKPLAQIAGNRYASVPVGKALSDACMGTIASFLSKYQDIIIEHQKVVKGNQKRLESLRELAGKENLEYPSVTLPPQPHTKEGVDAYNEVIARVRMWVNLNLWQKLKLSRDDAKPLLRLKGFPSFPLVERQANEVDWWDMVCNVKKLINEKKEDGKVFWQNLAGYKRQEALRPYLSSEEDVRKKGKKFARYQLGDLLLHLEKKHGEDWGKVYDEAWERIDKKVEGLSKHIKLEEERRSEDAQSKAALTDWLRAKASFVIEGKKEADKDEFCRCELKLQKWYGDLRGKPFAIEAENSILDISGFSKQYNCAFIWQKDGVKKLNLYLIINYFKGGKLRFKKIKPEAFEANRFYTVINKKSGEIVPMEVNFNFDDPNLIILPLAFGKRQGREFIWNDLLSLETGSLKLANGRVIEKTLYNRRTRQDEPALFVALTFERREVLDSSNIKPMNLIGVDRGENIPAVIALTDPEGCPLSRFKDSLGNPTHILRIGESYKEKQRTIQAKKEVEQRRAGGYSRKYASKAKNLADDMVRNTARDLLYYAVTQDAMLIFENLSRGFGRQGKRTFMAERQYTRMEDWLTAKLAYEGLPSKTYLSKTLAQYTSKTCSNCGFTITSADYDRVLEKLKKTATGWMTTINGKELKVEGQITYYNRYKRQNVVKDLSVELDRLSEESVNNDISSWTKGRSGEALSLLKKRFSHRPVQEKFVCLNCGFETHADEQAALNIARSWLFLRSQEYKKYQTNKTTGNTDKRAFVETWQSFYRKKLKEVWKPAV

SEQ ID NO: 47174 - protein, 979 aa, synthetic construct
  REGION 1..979: note = engineered CasX variant
QEIKRINKIRRRLVKDSNTKKAGKTGPMKTLLVRVMTPDLRERLENLRKKPENIPQPISNTSRANLNKLLTDYTEMKKAILHVYWEEFQKDPVGLMSRVAQPASKKIDQNKLKPEMDEKGNLTTAGFACSQCGQPLFVYKLEQVSEKGKAYTNYFGRCNVAEHEKLIKLAQLKPEKDSDEAVTYSLGKFGQRALDFYSIHVTKESTHPVKPLAQIAGNRYASGPVGKALSDACMGTIASFLSKYQDIIIEHQKVVKGNQKRLESLRELAGKENLEYPSVTLPPQPHTKEGVDAYNEVIARVRMWVNLNLWQKLKLSRDDAKPLLRLKGFPSFPLVERQANEVDWWDMVCNVKKLINEKKEDGKVFWQNLAGYKRQEALRPYLSSEEDVRKKGKKFARYQLGDLLLHLEKKHGEDWGKVYDEAWERIDKKVEGLSKHIKLEEERRSEDAQSKAALTDWLRAKASFVIEGKKEADKDEFCRCELKLQKWYGDLRGKPFAIEAENSILDISGFSKQYNCAFIWQKDGVKKLNLYLIINYFKGGKLRFKKIKPEAFEANRFYTVINKKSGEIVPMEVNFNFDDPNLIILPLAFGKRQGREFIWNDLLSLETGSLKLANGRVIEKTLYNRRTRQDEPALFVALTFERREVLDSSNIKPMNLIGVDRGENIPAVIALTDPEGCPLSRFKDSLGNPTHILRIGESYKEKQRTIQAKKEVEQRRAGGYSRKYASKAKNLADDMVRNTARDLLYYAVTQDAMLIFENLSRGFGRQGKRTFMAERQYTRMEDWLTAKLAYEGLPSKTYLSKTLAQYTSKTCSNCGFTITSADYDRVLEKLKKTATGWMTTINGKELKVEGQITYYNRYKRQNVVKDLSVELDRLSEESVNNDISSWTKGRSGEALSLLKKRFSHRPVQEKFVCLNCGFETHADEQAALNIARSWLFLRSQEYKKYQTNKTTGNTDKRAFVETWQSFYRKKLKEVWKPAV

SEQ ID NO: 47175 - protein, 978 aa, synthetic construct
  REGION 1..978: note = engineered CasX variant
QEIKRINKIRRRLVKDSNTKKAGKTGPMKTLLVRVMTPDLRERLENLRKKPENIPQPISNTSRANLNKLLTDYTEMKKAILHVYWEEFQKDPVGLMSRVAQPASKKIDQNKLKPEMDEKGNLTTAGFACSQCGQPLFVYKLEQVSEKGKAYTNYFGRCNVAEHEKLILLAQLKPEKDSDEAVTYSLGKFGQRALDFYSIHVTKESTHPVKPLAQIAGNRYASPVGKALSDACMGTIASFLSKYQDIIIEHQKVVKGNQKRLESLRELAGKENLEYPSVTLPPQPHTKEGVDAYNEVIARVRMWVNLNLWQKLKLSRDDAKPLLRLKGFPSFPLVERQANEVDWWDMVCNVKKLINEKKEDGKVFWQNLAGYKRQEALRPYLSSEEDVRKKGKKFARYQLGDLLLHLEKKHGEDWGKVYDEAWERIDKKVEGLSKHIKLEEERRSEDAQSKAALTDWLRAKASFVIEGKKEADKDEFCRCELKLQKWYGDLRGKPFAIEAENSILDISGFSKQYNCAFIWQKDGVKKLNLYLIINYFKGGKLRFKKIKPEAFEANRFYTVINKKSGEIVPMEVNFNFDDPNLIILPLAFGKRQGREFIWNDLLSLETGSLKLANGRVIEKTLYNRRTRQDEPALFVALTFERREVLDSSNIKPMNLIGVDRGENIPAVIALTDPEGCPLSRFKDSLGNPTHILRIGESYKEKQRTIQAKKEVEQRRAGGYSRKYASKAKNLADDMVRNTARDLLYYAVTQDAMLIFENLSRGFGRQGKRTFMAERQYTRMEDWLTAKLAYEGLPSKTYLSKTLAQYTSKTCSNCGFTITSADYDRVLEKLKKTATGWMTTINGKELKVEGQITYYNRYKRQNVVKDLSVELDRLSEESVNNDISSWTKGRSGEALSLLKKRFSHRPVQEKFVCLNCGFETHADEQAALNIARSWLFLRSQEYKKYQTNKTTGNTDKRAFVETWQSFYRKKLKEVWKPAV

SEQ ID NO: 47176 - protein, 979 aa, synthetic construct
  REGION 1..979: note = engineered CasX variant
QEIKRINKIRRRLVKDSNTKKAGKTGPMKTLLVRVMTPDLRERLENLRKKPENIPQPISNTSRANLNKLLTDYTEMKKAILHVYWEEFQKDPVGLMSRVAQPASKKIDQNKLKPEMDEKGNLTTAGFACSQCGQPLFVYKLEQVSEKGKAYTNYFGRCNVAEHEKLILLAQLKPEKDSDEAVTYSLGKFGQRALDFYSIHVTKESTHPVKPLAQIAGNRYASYPVGKALSDACMGTIASFLSKYQDIIIEHQKVVKGNQKRLESLRELAGKENLEYPSVTLPPQPHTKEGVDAYNEVIARVRMWVNLNLWQKLKLSRDDAKPLLRLKGFPSFPLVERQANEVDWWDMVCNVKKLINEKKEDGKVFWQNLAGYKRQEALRPYLSSEEDVRKKGKKFARYQLGDLLLHLEKKHGEDWGKVYDEAWERIDKKVEGLSKHIKLEEERRSEDAQSKAALTDWLRAKASFVIEGSKEADKDEFCRCELKLQKWYGDLRGKPFAIEAENSILDISGFSKQYNCAFIWQKDGVKKLNLYLIINYFKGGKLRFKKIKPEAFEANRFYTVINKKSGEIVPMEVNFNFDDPNLIILPLAFGKRQGREFIWNDLLSLETGSLKLANGRVIEKTLYNRRTRQDEPALFVALTFERREVLDSSNIKPMNLIGVDRGENIPAVIALTDPEGCPLSRFKDSLGNPTHILRIGESYKEKQRTIQAKKEVEQRRAGGYSRKYASKAKNLADDMVRNTARDLLYYAVTQDAMLIFENLSRGFGRQGKRTFMAERQYTRMEDWLTAKLAYEGLPSKTYLSKTLAQYTSKTCSNCGFTITSADYDRVLEKLKKTATGWMTTINGKELKVEGQITYYNRYKRQNVVKDLSVELDRLSEESVNNDISSWTKGRSGEALSLLKKRFSHRPVQEKFVCLNCGFETHADEQAALNIARSWLFLRSQEYKKYQTNKTTGNTDKRAFVETWQSFYRKKLKEVWKPAV

SEQ ID NO: 47177 - protein, 979 aa, synthetic construct
  REGION 1..979: note = engineered CasX variant
QEIKRINKIRRRLVKDSNTKKAGKTGPMKTLLVRVMTPDLRERLENLRKKPENIPQPISNTSRANLNKLLTDYTEMKKAILHVYWEEFQKDPVGLMSRVAQPASKKIDQNKLKPEMDEKGNLTTAGFACSQCGQPLFVYKLEQVSEKGKAYTNYFGRCNVAEHEKLILLAQLKPEKDSDEAVTYSLGKFGQRALDFYSIHVTKESTHPVKPLAQIAGNRYASHPVGKALSDACMGTIASFLSKYQDIIIEHQKVVKGNQKRLESLRELAGKENLEYPSVTLPPQPHTKEGVDAYNEVIARVRMWVNLNLWQKLKLSRDDAKPLLRLKGFPSFPLVERQANEVDWWDMVCNVKKLINEKKEDGKVFWQNLAGYKRQEALRPYLSSEEDVRKKGKKFARYQLGDLLLHLEKKHGEDWGKVYDEAWERIDKKVEGLSKHIKLEEERRSEDAQSKAALTDWLRAKASFVIEGSKEADKDEFCRCELKLQKWYGDLRGKPFAIEAENSILDISGFSKQYNCAFIWQKDGVKKLNLYLIINYFKGGKLRFKKIKPEAFEANRFYTVINKKSGEIVPMEVNFNFDDPNLIILPLAFGKRQGREFIWNDLLSLETGSLKLANGRVIEKTLYNRRTRQDEPALFVALTFERREVLDSSNIKPMNLIGVDRGENIPAVIALTDPEGCPLSRFKDSLGNPTHILRIGESYKEKQRTIQAKKEVEQRRAGGYSRKYASKAKNLADDMVRNTARDLLYYAVTQDAMLIFENLSRGFGRQGKRTFMAERQYTRMEDWLTAKLAYEGLPSKTYLSKTLAQYTSKTCSNCGFTITSADYDRVLEKLKKTATGWMTTINGKELKVEGQITYYNRYKRQNVVKDLSVELDRLSEESVNNDISSWTKGRSGEALSLLKKRFSHRPVQEKFVCLNCGFETHADEQAALNIARSWLFLRSQEYKKYQTNKTTGNTDKRAFVETWQSFYRKKLKEVWKPAV

SEQ ID NO: 47178 - protein, 979 aa, synthetic construct
  REGION 1..979: note = engineered CasX variant
QEIKRINKIRRRLVKDSNTKKAGKTGPMKTLLVRVMTPDLRERLENLRKKPENIPQPISNTSRANLNKLLTDYTEMKKAILHVYWEEFQKDPVGLMSRVAQPASKKIDQNKLKPEMDEKGNLTTAGFACSQCGQPLFVYKLEQVSEKGKAYTNYFGRCNVAEHEKLILLAQLKPEKDSDEAVTYSLGKFGQRALDFYSIHVTKESTHPVKPLAQIAGNRYASSPVGKALSDACMGTIASFLSKYQDIIIEHQKVVKGNQKRLESLRELAGKENLEYPSVTLPPQPHTKEGVDAYNEVIARVRMWVNLNLWQKLKLSRDDAKPLLRLKGFPSFPLVERQANEVDWWDMVCNVKKLINEKKEDGKVFWQNLAGYKRQEALRPYLSSEEDVRKKGKKFARYQLGDLLLHLEKKHGEDWGKVYDEAWERIDKKVEGLSKHIKLEEERRSEDAQSKAALTDWLRAKASFVIEGSKEADKDEFCRCELKLQKWYGDLRGKPFAIEAENSILDISGFSKQYNCAFIWQKDGVKKLNLYLIINYFKGGKLRFKKIKPEAFEANRFYTVINKKSGEIVPMEVNFNFDDPNLIILPLAFGKRQGREFIWNDLLSLETGSLKLANGRVIEKTLYNRRTRQDEPALFVALTFERREVLDSSNIKPMNLIGVDRGENIPAVIALTDPEGCPLSRFKDSLGNPTHILRIGESYKEKQRTIQAKKEVEQRRAGGYSRKYASKAKNLADDMVRNTARDLLYYAVTQDAMLIFENLSRGFGRQGKRTFMAERQYTRMEDWLTAKLAYEGLPSKTYLSKTLAQYTSKTCSNCGFTITSADYDRVLEKLKKTATGWMTTINGKELKVEGQITYYNRYKRQNVVKDLSVELDRLSEESVNNDISSWTKGRSGEALSLLKKRFSHRPVQEKFVCLNCGFETHADEQAALNIARSWLFLRSQEYKKYQTNKTTGNTDKRAFVETWQSFYRKKLKEVWKPAV

SEQ ID NO: 47179 - protein, 979 aa, synthetic construct
  REGION 1..979: note = engineered CasX variant
QEIKRINKIRRRLVKDSNTKKAGKTGPMKTLLVRVMTPDLRERLENLRKKPENIPQPISNTSRANLNKLLTDYTEMKKAILHVYWEEFQKDPVGLMSRVAQPASKKIDQNKLKPEMDEKGNLTTAGFACSQCGQPLFVYKLEQVSEKGKAYTNYFGRCNVAEHEKLILLAQLKPEKDSDEAVTYSLGKFGQRALDFYSIHVTKESTHPVKPLAQIAGNRYASTPVGKALSDACMGTIASFLSKYQDIIIEHQKVVKGNQKRLESLRELAGKENLEYPSVTLPPQPHTKEGVDAYNEVIARVRMWVNLNLWQKLKLSRDDAKPLLRLKGFPSFPLVERQANEVDWWDMVCNVKKLINEKKEDGKVFWQNLAGYKRQEALRPYLSSEEDVRKKGKKFARYQLGDLLLHLEKKHGEDWGKVYDEAWERIDKKVEGLSKHIKLEEERRSEDAQSKAALTDWLRAKASFVIEGSKEADKDEFCRCELKLQKWYGDLRGKPFAIEAENSILDISGFSKQYNCAFIWQKDGVKKLNLYLIINYFKGGKLRFKKIKPEAFEANRFYTVINKKSGEIVPMEVNFNFDDPNLIILPLAFGKRQGREFIWNDLLSLETGSLKLANGRVIEKTLYNRRTRQDEPALFVALTFERREVLDSSNIKPMNLIGVDRGENIPAVIALTDPEGCPLSRFKDSLGNPTHILRIGESYKEKQRTIQAKKEVEQRRAGGYSRKYASKAKNLADDMVRNTARDLLYYAVTQDAMLIFENLSRGFGRQGKRTFMAERQYTRMEDWLTAKLAYEGLPSKTYLSKTLAQYTSKTCSNCGFTITSADYDRVLEKLKKTATGWMTTINGKELKVEGQITYYNRYKRQNVVKDLSVELDRLSEESVNNDISSWTKGRSGEALSLLKKRFSHRPVQEKFVCLNCGFETHADEQAALNIARSWLFLRSQEYKKYQTNKTTGNTDKRAFVETWQSFYRKKLKEVWKPAV

SEQ ID NO: 47180 - protein, 979 aa, synthetic construct
  REGION 1..979: note = engineered CasX variant
QEIKRINKIRRRLVKDSNTKKAGKTGPMKTLLVRVMTPDLRERLENLRKKPENIPQPISNTSRANLNKLLTDYTEMKKAILHVYWEEFQKDPVGLMSRVAQPASKKIDQNKLKPEMDEKGNLTTAGFACSQCGQPLFVYKLEQVSEKGKAYTNYFGRCNVAEHEKLILLAQLKPEKDSDEAVTYSLGKFGQRALDFYSIHVTKESTHPVKPLAQIAGNRYASAPVGKALSDACMGTIASFLSKYQDIIIEHQKVVKGNQKRLESLRELAGKENLEYPSVTLPPQPHTKEGVDAYNEVIARVRMWVNLNLWQKLKLSRDDAKPLLRLKGFPSFPLVERQANEVDWWDMVCNVKKLINEKKEDGKVFWQNLAGYKRQEALRPYLSSEEDVRKKGKKFARYQLGDLLLHLEKKHGEDWGKVYDEAWERIDKKVEGLSKHIKLEEERRSEDAQSKAALTDWLRAKASFVIEGSKEADKDEFCRCELKLQKWYGDLRGKPFAIEAENSILDISGFSKQYNCAFIWQKDGVKKLNLYLIINYFKGGKLRFKKIKPEAFEANRFYTVINKKSGEIVPMEVNFNFDDPNLIILPLAFGKRQGREFIWNDLLSLETGSLKLANGRVIEKTLYNRRTRQDEPALFVALTFERREVLDSSNIKPMNLIGVDRGENIPAVIALTDPEGCPLSRFKDSLGNPTHILRIGESYKEKQRTIQAKKEVEQRRAGGYSRKYASKAKNLADDMVRNTARDLLYYAVTQDAMLIFENLSRGFGRQGKRTFMAERQYTRMEDWLTAKLAYEGLPSKTYLSKTLAQYTSKTCSNCGFTITSADYDRVLEKLKKTATGWMTTINGKELKVEGQITYYNRYKRQNVVKDLSVELDRLSEESVNNDISSWTKGRSGEALSLLKKRFSHRPVQEKFVCLNCGFETHADEQAALNIARSWLFLRSQEYKKYQTNKTTGNTDKRAFVETWQSFYRKKLKEVWKPAV

SEQ ID NO: 47181 - protein, 979 aa, synthetic construct
  REGION 1..979: note = engineered CasX variant
QEIKRINKIRRRLVKDSNTKKAGKTGPMKTLLVRVMTPDLRERLENLRKKPENIPQPISNTSRANLNKLLTDYTEMKKAILHVYWEEFQKDPVGLMSRVAQPASKKIDQNKLKPEMDEKGNLTTAGFACSQCGQPLFVYKLEQVSEKGKAYTNYFGRCNVAEHEKLILLAQLKPEKDSDEAVTYSLGKFGQRALDFYSIHVTKESTHPVKPLAQIAGNRYASVPVGKALSDACMGTIASFLSKYQDIIIEHQKVVKGNQKRLESLRELAGKENLEYPSVTLPPQPHTKEGVDAYNEVIARVRMWVNLNLWQKLKLSRDDAKPLLRLKGFPSFPLVERQANEVDWWDMVCNVKKLINEKKEDGKVFWQNLAGYKRQEALRPYLSSEEDVRKKGKKFARYQLGDLLLHLEKKHGEDWGKVYDEAWERIDKKVEGLSKHIKLEEERRSEDAQSKAALTDWLRAKASFVIEGSKEADKDEFCRCELKLQKWYGDLRGKPFAIEAENSILDISGFSKQYNCAFIWQKDGVKKLNLYLIINYFKGGKLRFKKIKPEAFEANRFYTVINKKSGEIVPMEVNFNFDDPNLIILPLAFGKRQGREFIWNDLLSLETGSLKLANGRVIEKTLYNRRTRQDEPALFVALTFERREVLDSSNIKPMNLIGVDRGENIPAVIALTDPEGCPLSRFKDSLGNPTHILRIGESYKEKQRTIQAKKEVEQRRAGGYSRKYASKAKNLADDMVRNTARDLLYYAVTQDAMLIFENLSRGFGRQGKRTFMAERQYTRMEDWLTAKLAYEGLPSKTYLSKTLAQYTSKTCSNCGFTITSADYDRVLEKLKKTATGWMTTINGKELKVEGQITYYNRYKRQNVVKDLSVELDRLSEESVNNDISSWTKGRSGEALSLLKKRFSHRPVQEKFVCLNCGFETHADEQAALNIARSWLFLRSQEYKKYQTNKTTGNTDKRAFVETWQSFYRKKLKEVWKPAV

SEQ ID NO: 47182 - protein, 979 aa, synthetic construct
  REGION 1..979: note = engineered CasX variant
QEIKRINKIRRRLVKDSNTKKAGKTGPMKTLLVRVMTPDLRERLENLRKKPENIPQPISNTSRANLNKLLTDYTEMKKAILHVYWEEFQKDPVGLMSRVAQPASKKIDQNKLKPEMDEKGNLTTAGFACSQCGQPLFVYKLEQVSEKGKAYTNYFGRCNVAEHEKLIKLAQLKPEKDSDEAVTYSLGKFGQRALDFYSIHVTKESTHPVKPLAQIAGNRYASGPVGKALSDACMGTIASFLSKYQDIIIEHQKVVKGNQKRLESLRELAGKENLEYPSVTLPPQPHTKEGVDAYNEVIARVRMWVNLNLWQKLKLSRDDAKPLLRLKGFPSFPLVERQANEVDWWDMVCNVKKLINEKKEDGKVFWQNLAGYKRQEALRPYLSSEEDVRKKGKKFARYQLGDLLLHLEKKHGEDWGKVYDEAWERIDKKVEGLSKHIKLEEERRSEDAQSKAALTDWLRAKASFVIEGSKEADKDEFCRCELKLQKWYGDLRGKPFAIEAENSILDISGFSKQYNCAFIWQKDGVKKLNLYLIINYFKGGKLRFKKIKPEAFEANRFYTVINKKSGEIVPMEVNFNFDDPNLIILPLAFGKRQGREFIWNDLLSLETGSLKLANGRVIEKTLYNRRTRQDEPALFVALTFERREVLDSSNIKPMNLIGVDRGENIPAVIALTDPEGCPLSRFKDSLGNPTHILRIGESYKEKQRTIQAKKEVEQRRAGGYSRKYASKAKNLADDMVRNTARDLLYYAVTQDAMLIFENLSRGFGRQGKRTFMAERQYTRMEDWLTAKLAYEGLPSKTYLSKTLAQYTSKTCSNCGFTITSADYDRVLEKLKKTATGWMTTINGKELKVEGQITYYNRYKRQNVVKDLSVELDRLSEESVNNDISSWTKGRSGEALSLLKKRFSHRPVQEKFVCLNCGFETHADEQAALNIARSWLFLRSQEYKKYQTNKTTGNTDKRAFVETWQSFYRKKLKEVWKPAV

SEQ ID NO: 47183 - protein, 978 aa, synthetic construct
  REGION 1..978: note = engineered CasX variant
QEIKRINKIRRRLVKDSNTKKAGKTGPMKTLLVRVMTPDLRERLENLRKKPENIPQPISNTSRANLNKLLTDYTEMKKAILHVYWEEFQKDPVGLMSRVAQPASKKIDQNKLKPEMDEKGNLTTAGFACSQCGQPLFVYKLEQVSEKGKAYTNYFGRCNVAEHEKLILLAQLKPEKDSDEAVTYSLGKFGQRALDFYSIHVTKESTHPVKPLAQIAGNRYASPVGKALSDACMGTIASFLSKYQDIIIEHQKVVKGNQKRLESLRELAGKENLEYPSVTLPPQPHTKEGVDAYNEVIARVRMWVNLNLWQKLKLSRDDAKPLLRLKGFPSFPLVERQANEVDWWDMVCNVKKLINEKKEDGKVFWQNLAGYKRQEALRPYLSSEEDVRKKGKKFARYQLGDLLLHLEKKHGEDWGKVYDEAWERIDKKVEGLSKHIKLEEERRSEDAQSKAALTDWLRAKASFVIEGSKEADKDEFCRCELKLQKWYGDLRGKPFAIEAENSILDISGFSKQYNCAFIWQKDGVKKLNLYLIINYFKGGKLRFKKIKPEAFEANRFYTVINKKSGEIVPMEVNFNFDDPNLIILPLAFGKRQGREFIWNDLLSLETGSLKLANGRVIEKTLYNRRTRQDEPALFVALTFERREVLDSSNIKPMNLIGVDRGENIPAVIALTDPEGCPLSRFKDSLGNPTHILRIGESYKEKQRTIQAKKEVEQRRAGGYSRKYASKAKNLADDMVRNTARDLLYYAVTQDAMLIFENLSRGFGRQGKRTFMAERQYTRMEDWLTAKLAYEGLPSKTYLSKTLAQYTSKTCSNCGFTITSADYDRVLEKLKKTATGWMTTINGKELKVEGQITYYNRYKRQNVVKDLSVELDRLSEESVNNDISSWTKGRSGEALSLLKKRFSHRPVQEKFVCLNCGFETHADEQAALNIARSWLFLRSQEYKKYQTNKTTGNTDKRAFVETWQSFYRKKLKEVWKPAV

SEQ ID NO: 47184 - protein, 980 aa, synthetic construct
  REGION 1..980: note = engineered CasX variant
QEIKRINKIRRRLVKDSNTKKAGKTGPMKTLLVRVMTPDLRERLENLRKKPENIPQPISNTSRANLNKLLTDYTEMKKAILHVYWEEFQKDPVGLMSRVAQPASKKIDQNKLKPEMDEKGNLTTAGFACSQCGQPLFVYKLEQVSEKGKAYTNYFGRCNVAEHEKLILLAQLKPEKDSDEAVTYSLGKFGQRALDFYSIHVTKESTHPVKPLAQIAGNRYASYPVGKALSDACMGTIASFLSKYQDIIIEHQKVVKGNQKRLESLRELAGKENLEYPSVTLPPQPHTKEGVDAYNEVIARVRMWVNLNLWQKLKLSRDDAKPLLRLKGFPSFPLVERQANEVDWWDMVCNVKKLINEKKEDGKVFWQNLAGYKRQEALRPYLSSEEDVRKKGKKFARYQLGDLLLHLEKKHGEDWGKVYDEAWERIDKKVEGLSKHIKLEEERRSEDAQSKAALTDWLRAKASFVIEGLKEADDKDEFCRCELKLQKWYGDLRGKPFAIEAENSILDISGFSKQYNCAFIWQKDGVKKLNLYLIINYFKGGKLRFKKIKPEAFEANRFYTVINKKSGEIVPMEVNFNFDDPNLIILPLAFGKRQGREFIWNDLLSLETGSLKLANGRVIEKTLYNRRTRQDEPALFVALTFERREVLDSSNIKPMNLIGVDRGENIPAVIALTDPEGCPLSRFKDSLGNPTHILRIGESYKEKQRTIQAKKEVEQRRAGGYSRKYASKAKNLADDMVRNTARDLLYYAVTQDAMLIFENLSRGFGRQGKRTFMAERQYTRMEDWLTAKLAYEGLPSKTYLSKTLAQYTSKTCSNCGFTITSADYDRVLEKLKKTATGWMTTINGKELKVEGQITYYNRYKRQNVVKDLSVELDRLSEESVNNDISSWTKGRSGEALSLLKKRFSHRPVQEKFVCLNCGFETHADEQAALNIARSWLFLRSQEYKKYQTNKTTGNTDKRAFVETWQSFYRKKLKEVWKPAV

SEQ ID NO: 47185 - protein, 980 aa, synthetic construct
  REGION 1..980: note = engineered CasX variant
QEIKRINKIRRRLVKDSNTKKAGKTGPMKTLLVRVMTPDLRERLENLRKKPENIPQPISNTSRANLNKLLTDYTEMKKAILHVYWEEFQKDPVGLMSRVAQPASKKIDQNKLKPEMDEKGNLTTAGFACSQCGQPLFVYKLEQVSEKGKAYTNYFGRCNVAEHEKLILLAQLKPEKDSDEAVTYSLGKFGQRALDFYSIHVTKESTHPVKPLAQIAGNRYASHPVGKALSDACMGTIASFLSKYQDIIIEHQKVVKGNQKRLESLRELAGKENLEYPSVTLPPQPHTKEGVDAYNEVIARVRMWVNLNLWQKLKLSRDDAKPLLRLKGFPSFPLVERQANEVDWWDMVCNVKKLINEKKEDGKVFWQNLAGYKRQEALRPYLSSEEDVRKKGKKFARYQLGDLLLHLEKKHGEDWGKVYDEAWERIDKKVEGLSKHIKLEEERRSEDAQSKAALTDWLRAKASFVIEGLKEADDKDEFCRCELKLQKWYGDLRGKPFAIEAENSILDISGFSKQYNCAFIWQKDGVKKLNLYLIINYFKGGKLRFKKIKPEAFEANRFYTVINKKSGEIVPMEVNFNFDDPNLIILPLAFGKRQGREFIWNDLLSLETGSLKLANGRVIEKTLYNRRTRQDEPALFVALTFERREVLDSSNIKPMNLIGVDRGENIPAVIALTDPEGCPLSRFKDSLGNPTHILRIGESYKEKQRTIQAKKEVEQRRAGGYSRKYASKAKNLADDMVRNTARDLLYYAVTQDAMLIFENLSRGFGRQGKRTFMAERQYTRMEDWLTAKLAYEGLPSKTYLSKTLAQYTSKTCSNCGFTITSADYDRVLEKLKKTATGWMTTINGKELKVEGQITYYNRYKRQNVVKDLSVELDRLSEESVNNDISSWTKGRSGEALSLLKKRFSHRPVQEKFVCLNCGFETHADEQAALNIARSWLFLRSQEYKKYQTNKTTGNTDKRAFVETWQSFYRKKLKEVWKPAV

SEQ ID NO: 47186 - protein, 980 aa, synthetic construct
  REGION 1..980: note = engineered CasX variant
QEIKRINKIRRRLVKDSNTKKAGKTGPMKTLLVRVMTPDLRERLENLRKKPENIPQPISNTSRANLNKLLTDYTEMKKAILHVYWEEFQKDPVGLMSRVAQPASKKIDQNKLKPEMDEKGNLTTAGFACSQCGQPLFVYKLEQVSEKGKAYTNYFGRCNVAEHEKLILLAQLKPEKDSDEAVTYSLGKFGQRALDFYSIHVTKESTHPVKPLAQIAGNRYASSPVGKALSDACMGTIASFLSKYQDIIIEHQKVVKGNQKRLESLRELAGKENLEYPSVTLPPQPHTKEGVDAYNEVIARVRMWVNLNLWQKLKLSRDDAKPLLRLKGFPSFPLVERQANEVDWWDMVCNVKKLINEKKEDGKVFWQNLAGYKRQEALRPYLSSEEDVRKKGKKFARYQLGDLLLHLEKKHGEDWGKVYDEAWERIDKKVEGLSKHIKLEEERRSEDAQSKAALTDWLRAKASFVIEGLKEADDKDEFCRCELKLQKWYGDLRGKPFAIEAENSILDISGFSKQYNCAFIWQKDGVKKLNLYLIINYFKGGKLRFKKIKPEAFEANRFYTVINKKSGEIVPMEVNFNFDDPNLIILPLAFGKRQGREFIWNDLLSLETGSLKLANGRVIEKTLYNRRTRQDEPALFVALTFERREVLDSSNIKPMNLIGVDRGENIPAVIALTDPEGCPLSRFKDSLGNPTHILRIGESYKEKQRTIQAKKEVEQRRAGGYSRKYASKAKNLADDMVRNTARDLLYYAVTQDAMLIFENLSRGFGRQGKRTFMAERQYTRMEDWLTAKLAYEGLPSKTYLSKTLAQYTSKTCSNCGFTITSADYDRVLEKLKKTATGWMTTINGKELKVEGQITYYNRYKRQNVVKDLSVELDRLSEESVNNDISSWTKGRSGEALSLLKKRFSHRPVQEKFVCLNCGFETHADEQAALNIARSWLFLRSQEYKKYQTNKTTGNTDKRAFVETWQSFYRKKLKEVWKPAV

SEQ ID NO: 47187 - protein, 980 aa, synthetic construct
  REGION 1..980: note = engineered CasX variant
QEIKRINKIRRRLVKDSNTKKAGKTGPMKTLLVRVMTPDLRERLENLRKKPENIPQPISNTSRANLNKLLTDYTEMKKAILHVYWEEFQKDPVGLMSRVAQPASKKIDQNKLKPEMDEKGNLTTAGFACSQCGQPLFVYKLEQVSEKGKAYTNYFGRCNVAEHEKLILLAQLKPEKDSDEAVTYSLGKFGQRALDFYSIHVTKESTHPVKPLAQIAGNRYASTPVGKALSDACMGTIASFLSKYQDIIIEHQKVVKGNQKRLESLRELAGKENLEYPSVTLPPQPHTKEGVDAYNEVIARVRMWVNLNLWQKLKLSRDDAKPLLRLKGFPSFPLVERQANEVDWWDMVCNVKKLINEKKEDGKVFWQNLAGYKRQEALRPYLSSEEDVRKKGKKFARYQLGDLLLHLEKKHGEDWGKVYDEAWERIDKKVEGLSKHIKLEEERRSEDAQSKAALTDWLRAKASFVIEGLKEADDKDEFCRCELKLQKWYGDLRGKPFAIEAENSILDISGFSKQYNCAFIWQKDGVKKLNLYLIINYFKGGKLRFKKIKPEAFEANRFYTVINKKSGEIVPMEVNFNFDDPNLIILPLAFGKRQGREFIWNDLLSLETGSLKLANGRVIEKTLYNRRTRQDEPALFVALTFERREVLDSSNIKPMNLIGVDRGENIPAVIALTDPEGCPLSRFKDSLGNPTHILRIGESYKEKQRTIQAKKEVEQRRAGGYSRKYASKAKNLADDMVRNTARDLLYYAVTQDAMLIFENLSRGFGRQGKRTFMAERQYTRMEDWLTAKLAYEGLPSKTYLSKTLAQYTSKTCSNCGFTITSADYDRVLEKLKKTATGWMTTINGKELKVEGQITYYNRYKRQNVVKDLSVELDRLSEESVNNDISSWTKGRSGEALSLLKKRFSHRPVQEKFVCLNCGFETHADEQAALNIARSWLFLRSQEYKKYQTNKTTGNTDKRAFVETWQSFYRKKLKEVWKPAV

SEQ ID NO: 47188 - protein, 980 aa, synthetic construct
  REGION 1..980: note = engineered CasX variant
QEIKRINKIRRRLVKDSNTKKAGKTGPMKTLLVRVMTPDLRERLENLRKKPENIPQPISNTSRANLNKLLTDYTEMKKAILHVYWEEFQKDPVGLMSRVAQPASKKIDQNKLKPEMDEKGNLTTAGFACSQCGQPLFVYKLEQVSEKGKAYTNYFGRCNVAEHEKLILLAQLKPEKDSDEAVTYSLGKFGQRALDFYSIHVTKESTHPVKPLAQIAGNRYASAPVGKALSDACMGTIASFLSKYQDIIIEHQKVVKGNQKRLESLRELAGKENLEYPSVTLPPQPHTKEGVDAYNEVIARVRMWVNLNLWQKLKLSRDDAKPLLRLKGFPSFPLVERQANEVDWWDMVCNVKKLINEKKEDGKVFWQNLAGYKRQEALRPYLSSEEDVRKKGKKFARYQLGDLLLHLEKKHGEDWGKVYDEAWERIDKKVEGLSKHIKLEEERRSEDAQSKAALTDWLRAKASFVIEGLKEADDKDEFCRCELKLQKWYGDLRGKPFAIEAENSILDISGFSKQYNCAFIWQKDGVKKLNLYLIINYFKGGKLRFKKIKPEAFEANRFYTVINKKSGEIVPMEVNFNFDDPNLIILPLAFGKRQGREFIWNDLLSLETGSLKLANGRVIEKTLYNRRTRQDEPALFVALTFERREVLDSSNIKPMNLIGVDRGENIPAVIALTDPEGCPLSRFKDSLGNPTHILRIGESYKEKQRTIQAKKEVEQRRAGGYSRKYASKAKNLADDMVRNTARDLLYYAVTQDAMLIFENLSRGFGRQGKRTFMAERQYTRMEDWLTAKLAYEGLPSKTYLSKTLAQYTSKTCSNCGFTITSADYDRVLEKLKKTATGWMTTINGKELKVEGQITYYNRYKRQNVVKDLSVELDRLSEESVNNDISSWTKGRSGEALSLLKKRFSHRPVQEKFVCLNCGFETHADEQAALNIARSWLFLRSQEYKKYQTNKTTGNTDKRAFVETWQSFYRKKLKEVWKPAV

SEQ ID NO: 47189 - protein, 980 aa, synthetic construct
  REGION 1..980: note = engineered CasX variant
QEIKRINKIRRRLVKDSNTKKAGKTGPMKTLLVRVMTPDLRERLENLRKKPENIPQPISNTSRANLNKLLTDYTEMKKAILHVYWEEFQKDPVGLMSRVAQPASKKIDQNKLKPEMDEKGNLTTAGFACSQCGQPLFVYKLEQVSEKGKAYTNYFGRCNVAEHEKLILLAQLKPEKDSDEAVTYSLGKFGQRALDFYSIHVTKESTHPVKPLAQIAGNRYASVPVGKALSDACMGTIASFLSKYQDIIIEHQKVVKGNQKRLESLRELAGKENLEYPSVTLPPQPHTKEGVDAYNEVIARVRMWVNLNLWQKLKLSRDDAKPLLRLKGFPSFPLVERQANEVDWWDMVCNVKKLINEKKEDGKVFWQNLAGYKRQEALRPYLSSEEDVRKKGKKFARYQLGDLLLHLEKKHGEDWGKVYDEAWERIDKKVEGLSKHIKLEEERRSEDAQSKAALTDWLRAKASFVIEGLKEADDKDEFCRCELKLQKWYGDLRGKPFAIEAENSILDISGFSKQYNCAFIWQKDGVKKLNLYLIINYFKGGKLRFKKIKPEAFEANRFYTVINKKSGEIVPMEVNFNFDDPNLIILPLAFGKRQGREFIWNDLLSLETGSLKLANGRVIEKTLYNRRTRQDEPALFVALTFERREVLDSSNIKPMNLIGVDRGENIPAVIALTDPEGCPLSRFKDSLGNPTHILRIGESYKEKQRTIQAKKEVEQRRAGGYSRKYASKAKNLADDMVRNTARDLLYYAVTQDAMLIFENLSRGFGRQGKRTFMAERQYTRMEDWLTAKLAYEGLPSKTYLSKTLAQYTSKTCSNCGFTITSADYDRVLEKLKKTATGWMTTINGKELKVEGQITYYNRYKRQNVVKDLSVELDRLSEESVNNDISSWTKGRSGEALSLLKKRFSHRPVQEKFVCLNCGFETHADEQAALNIARSWLFLRSQEYKKYQTNKTTGNTDKRAFVETWQSFYRKKLKEVWKPAV

SEQ ID NO: 47190 - protein, 980 aa, synthetic construct
  REGION 1..980: note = engineered CasX variant
QEIKRINKIRRRLVKDSNTKKAGKTGPMKTLLVRVMTPDLRERLENLRKKPENIPQPISNTSRANLNKLLTDYTEMKKAILHVYWEEFQKDPVGLMSRVAQPASKKIDQNKLKPEMDEKGNLTTAGFACSQCGQPLFVYKLEQVSEKGKAYTNYFGRCNVAEHEKLIKLAQLKPEKDSDEAVTYSLGKFGQRALDFYSIHVTKESTHPVKPLAQIAGNRYASGPVGKALSDACMGTIASFLSKYQDIIIEHQKVVKGNQKRLESLRELAGKENLEYPSVTLPPQPHTKEGVDAYNEVIARVRMWVNLNLWQKLKLSRDDAKPLLRLKGFPSFPLVERQANEVDWWDMVCNVKKLINEKKEDGKVFWQNLAGYKRQEALRPYLSSEEDVRKKGKKFARYQLGDLLLHLEKKHGEDWGKVYDEAWERIDKKVEGLSKHIKLEEERRSEDAQSKAALTDWLRAKASFVIEGLKEADDKDEFCRCELKLQKWYGDLRGKPFAIEAENSILDISGFSKQYNCAFIWQKDGVKKLNLYLIINYFKGGKLRFKKIKPEAFEANRFYTVINKKSGEIVPMEVNFNFDDPNLIILPLAFGKRQGREFIWNDLLSLETGSLKLANGRVIEKTLYNRRTRQDEPALFVALTFERREVLDSSNIKPMNLIGVDRGENIPAVIALTDPEGCPLSRFKDSLGNPTHILRIGESYKEKQRTIQAKKEVEQRRAGGYSRKYASKAKNLADDMVRNTARDLLYYAVTQDAMLIFENLSRGFGRQGKRTFMAERQYTRMEDWLTAKLAYEGLPSKTYLSKTLAQYTSKTCSNCGFTITSADYDRVLEKLKKTATGWMTTINGKELKVEGQITYYNRYKRQNVVKDLSVELDRLSEESVNNDISSWTKGRSGEALSLLKKRFSHRPVQEKFVCLNCGFETHADEQAALNIARSWLFLRSQEYKKYQTNKTTGNTDKRAFVETWQSFYRKKLKEVWKPAV

SEQ ID NO: 47191 - protein, 979 aa, synthetic construct
  REGION 1..979: note = engineered CasX variant
QEIKRINKIRRRLVKDSNTKKAGKTGPMKTLLVRVMTPDLRERLENLRKKPENIPQPISNTSRANLNKLLTDYTEMKKAILHVYWEEFQKDPVGLMSRVAQPASKKIDQNKLKPEMDEKGNLTTAGFACSQCGQPLFVYKLEQVSEKGKAYTNYFGRCNVAEHEKLILLAQLKPEKDSDEAVTYSLGKFGQRALDFYSIHVTKESTHPVKPLAQIAGNRYASPVGKALSDACMGTIASFLSKYQDIIIEHQKVVKGNQKRLESLRELAGKENLEYPSVTLPPQPHTKEGVDAYNEVIARVRMWVNLNLWQKLKLSRDDAKPLLRLKGFPSFPLVERQANEVDWWDMVCNVKKLINEKKEDGKVFWQNLAGYKRQEALRPYLSSEEDVRKKGKKFARYQLGDLLLHLEKKHGEDWGKVYDEAWERIDKKVEGLSKHIKLEEERRSEDAQSKAALTDWLRAKASFVIEGLKEADDKDEFCRCELKLQKWYGDLRGKPFAIEAENSILDISGFSKQYNCAFIWQKDGVKKLNLYLIINYFKGGKLRFKKIKPEAFEANRFYTVINKKSGEIVPMEVNFNFDDPNLIILPLAFGKRQGREFIWNDLLSLETGSLKLANGRVIEKTLYNRRTRQDEPALFVALTFERREVLDSSNIKPMNLIGVDRGENIPAVIALTDPEGCPLSRFKDSLGNPTHILRIGESYKEKQRTIQAKKEVEQRRAGGYSRKYASKAKNLADDMVRNTARDLLYYAVTQDAMLIFENLSRGFGRQGKRTFMAERQYTRMEDWLTAKLAYEGLPSKTYLSKTLAQYTSKTCSNCGFTITSADYDRVLEKLKKTATGWMTTINGKELKVEGQITYYNRYKRQNVVKDLSVELDRLSEESVNNDISSWTKGRSGEALSLLKKRFSHRPVQEKFVCLNCGFETHADEQAALNIARSWLFLRSQEYKKYQTNKTTGNTDKRAFVETWQSFYRKKLKEVWKPAV

SEQ ID NO: 47192 - protein, 980 aa, synthetic construct
  REGION 1..980: note = engineered CasX variant
QEIKRINKIRRRLVKDSNTKKAGKTGPMKTLLVRVMTPDLRERLENLRKKPENIPQPISNTSRANLNKLLTDYTEMKKAILHVYWEEFQKDPVGLMSRVAQPASKKIDQNKLKPEMDEKGNLTTAGFACSQCGQPLFVYKLEQVSEKGKAYTNYFGRCNVAEHEKLILLAQLKPEKDSDEAVTYSLGKFGQRALDFYSIHVTKESTHPVKPLAQIAGNRYASYPVGKALSDACMGTIASFLSKYQDIIIEHQKVVKGNQKRLESLRELAGKENLEYPSVTLPPQPHTKEGVDAYNEVIARVRMWVNLNLWQKLKLSRDDAKPLLRLKGFPSFPLVERQANEVDWWDMVCNVKKLINEKKEDGKVFWQNLAGYKRQEALRPYLSSEEDVRKKGKKFARYQLGDLLLHLEKKHGEDWGKVYDEAWERIDKKVEGLSKHIKLEEERRSEDAQSKAALTDWLRAKASFVIEGLKEADKDEFCRCELKLQKWYGDLRGKPFAIEAENSILDISGFSKQYNCAFIWQKDGVKKLNLYLIINYFKGGKLRFKKIKPEAFEANRFYTVINKKSGEIVPMEVNFNFDDPNLIILPLAFGKRQGREFIWNDLLSLETGSLKLANGRVIEKTLYNRRTRQDEPALFVALTFERREVLDSSNIKPMNLIGVDRGENIPAVIALTDPEGCPLSRFKDSLGNPTHILRIGESYKEKQRTIQAKKEVEQRRAGGYSRKYASKAKNLADDMVRNTARDLLYYAVTQDAMLIFENLSRGFGRQGKRTFMAERQYTRMEDWLTAKLAYEGLPSKTYLSKTLAQYTSKTCSNCGFTITSADYDRVLEKLKKTATGWMTTINGKELKVEGQITYYNRYKRQNVVKDLSVELDRLSEESVNNDISSWTKGRSGNEALSLLKKRFSHRPVQEKFVCLNCGFETHADEQAALNIARSWLFLRSQEYKKYQTNKTTGNTDKRAFVETWQSFYRKKLKEVWKPAV

SEQ ID NO: 47193 - protein, 980 aa, synthetic construct
  REGION 1..980: note = engineered CasX variant
QEIKRINKIRRRLVKDSNTKKAGKTGPMKTLLVRVMTPDLRERLENLRKKPENIPQPISNTSRANLNKLLTDYTEMKKAILHVYWEEFQKDPVGLMSRVAQPASKKIDQNKLKPEMDEKGNLTTAGFACSQCGQPLFVYKLEQVSEKGKAYTNYFGRCNVAEHEKLILLAQLKPEKDSDEAVTYSLGKFGQRALDFYSIHVTKESTHPVKPLAQIAGNRYASHPVGKALSDACMGTIASFLSKYQDIIIEHQKVVKGNQKRLESLRELAGKENLEYPSVTLPPQPHTKEGVDAYNEVIARVRMWVNLNLWQKLKLSRDDAKPLLRLKGFPSFPLVERQANEVDWWDMVCNVKKLINEKKEDGKVFWQNLAGYKRQEALRPYLSSEEDVRKKGKKFARYQLGDLLLHLEKKHGEDWGKVYDEAWERIDKKVEGLSKHIKLEEERRSEDAQSKAALTDWLRAKASFVIEGLKEADKDEFCRCELKLQKWYGDLRGKPFAIEAENSILDISGFSKQYNCAFIWQKDGVKKLNLYLIINYFKGGKLRFKKIKPEAFEANRFYTVINKKSGEIVPMEVNFNFDDPNLIILPLAFGKRQGREFIWNDLLSLETGSLKLANGRVIEKTLYNRRTRQDEPALFVALTFERREVLDSSNIKPMNLIGVDRGENIPAVIALTDPEGCPLSRFKDSLGNPTHILRIGESYKEKQRTIQAKKEVEQRRAGGYSRKYASKAKNLADDMVRNTARDLLYYAVTQDAMLIFENLSRGFGRQGKRTFMAERQYTRMEDWLTAKLAYEGLPSKTYLSKTLAQYTSKTCSNCGFTITSADYDRVLEKLKKTATGWMTTINGKELKVEGQITYYNRYKRQNVVKDLSVELDRLSEESVNNDISSWTKGRSGNEALSLLKKRFSHRPVQEKFVCLNCGFETHADEQAALNIARSWLFLRSQEYKKYQTNKTTGNTDKRAFVETWQSFYRKKLKEVWKPAV

SEQ ID NO: 47194 - protein, 980 aa, synthetic construct
  REGION 1..980: note = engineered CasX variant
QEIKRINKIRRRLVKDSNTKKAGKTGPMKTLLVRVMTPDLRERLENLRKKPENIPQPISNTSRANLNKLLTDYTEMKKAILHVYWEEFQKDPVGLMSRVAQPASKKIDQNKLKPEMDEKGNLTTAGFACSQCGQPLFVYKLEQVSEKGKAYTNYFGRCNVAEHEKLILLAQLKPEKDSDEAVTYSLGKFGQRALDFYSIHVTKESTHPVKPLAQIAGNRYASSPVGKALSDACMGTIASFLSKYQDIIIEHQKVVKGNQKRLESLRELAGKENLEYPSVTLPPQPHTKEGVDAYNEVIARVRMWVNLNLWQKLKLSRDDAKPLLRLKGFPSFPLVERQANEVDWWDMVCNVKKLINEKKEDGKVFWQNLAGYKRQEALRPYLSSEEDVRKKGKKFARYQLGDLLLHLEKKHGEDWGKVYDEAWERIDKKVEGLSKHIKLEEERRSEDAQSKAALTDWLRAKASFVIEGLKEADKDEFCRCELKLQKWYGDLRGKPFAIEAENSILDISGFSKQYNCAFIWQKDGVKKLNLYLIINYFKGGKLRFKKIKPEAFEANRFYTVINKKSGEIVPMEVNFNFDDPNLIILPLAFGKRQGREFIWNDLLSLETGSLKLANGRVIEKTLYNRRTRQDEPALFVALTFERREVLDSSNIKPMNLIGVDRGENIPAVIALTDPEGCPLSRFKDSLGNPTHILRIGESYKEKQRTIQAKKEVEQRRAGGYSRKYASKAKNLADDMVRNTARDLLYYAVTQDAMLIFENLSRGFGRQGKRTFMAERQYTRMEDWLTAKLAYEGLPSKTYLSKTLAQYTSKTCSNCGFTITSADYDRVLEKLKKTATGWMTTINGKELKVEGQITYYNRYKRQNVVKDLSVELDRLSEESVNNDISSWTKGRSGNEALSLLKKRFSHRPVQEKFVCLNCGFETHADEQAALNIARSWLFLRSQEYKKYQTNKTTGNTDKRAFVETWQSFYRKKLKEVWKPAV

SEQ ID NO: 47195 - protein, 980 aa, synthetic construct
  REGION 1..980: note = engineered CasX variant
QEIKRINKIRRRLVKDSNTKKAGKTGPMKTLLVRVMTPDLRERLENLRKKPENIPQPISNTSRANLNKLLTDYTEMKKAILHVYWEEFQKDPVGLMSRVAQPASKKIDQNKLKPEMDEKGNLTTAGFACSQCGQPLFVYKLEQVSEKGKAYTNYFGRCNVAEHEKLILLAQLKPEKDSDEAVTYSLGKFGQRALDFYSIHVTKESTHPVKPLAQIAGNRYASTPVGKALSDACMGTIASFLSKYQDIIIEHQKVVKGNQKRLESLRELAGKENLEYPSVTLPPQPHTKEGVDAYNEVIARVRMWVNLNLWQKLKLSRDDAKPLLRLKGFPSFPLVERQANEVDWWDMVCNVKKLINEKKEDGKVFWQNLAGYKRQEALRPYLSSEEDVRKKGKKFARYQLGDLLLHLEKKHGEDWGKVYDEAWERIDKKVEGLSKHIKLEEERRSEDAQSKAALTDWLRAKASFVIEGLKEADKDEFCRCELKLQKWYGDLRGKPFAIEAENSILDISGFSKQYNCAFIWQKDGVKKLNLYLIINYFKGGKLRFKKIKPEAFEANRFYTVINKKSGEIVPMEVNFNFDDPNLIILPLAFGKRQGREFIWNDLLSLETGSLKLANGRVIEKTLYNRRTRQDEPALFVALTFERREVLDSSNIKPMNLIGVDRGENIPAVIALTDPEGCPLSRFKDSLGNPTHILRIGESYKEKQRTIQAKKEVEQRRAGGYSRKYASKAKNLADDMVRNTARDLLYYAVTQDAMLIFENLSRGFGRQGKRTFMAERQYTRMEDWLTAKLAYEGLPSKTYLSKTLAQYTSKTCSNCGFTITSADYDRVLEKLKKTATGWMTTINGKELKVEGQITYYNRYKRQNVVKDLSVELDRLSEESVNNDISSWTKGRSGNEALSLLKKRFSHRPVQEKFVCLNCGFETHADEQAALNIARSWLFLRSQEYKKYQTNKTTGNTDKRAFVETWQSFYRKKLKEVWKPAV

SEQ ID NO: 47196 - protein, 980 aa, synthetic construct
  REGION 1..980: note = engineered CasX variant
QEIKRINKIRRRLVKDSNTKKAGKTGPMKTLLVRVMTPDLRERLENLRKKPENIPQPISNTSRANLNKLLTDYTEMKKAILHVYWEEFQKDPVGLMSRVAQPASKKIDQNKLKPEMDEKGNLTTAGFACSQCGQPLFVYKLEQVSEKGKAYTNYFGRCNVAEHEKLILLAQLKPEKDSDEAVTYSLGKFGQRALDFYSIHVTKESTHPVKPLAQIAGNRYASAPVGKALSDACMGTIASFLSKYQDIIIEHQKVVKGNQKRLESLRELAGKENLEYPSVTLPPQPHTKEGVDAYNEVIARVRMWVNLNLWQKLKLSRDDAKPLLRLKGFPSFPLVERQANEVDWWDMVCNVKKLINEKKEDGKVFWQNLAGYKRQEALRPYLSSEEDVRKKGKKFARYQLGDLLLHLEKKHGEDWGKVYDEAWERIDKKVEGLSKHIKLEEERRSEDAQSKAALTDWLRAKASFVIEGLKEADKDEFCRCELKLQKWYGDLRGKPFAIEAENSILDISGFSKQYNCAFIWQKDGVKKLNLYLIINYFKGGKLRFKKIKPEAFEANRFYTVINKKSGEIVPMEVNFNFDDPNLIILPLAFGKRQGREFIWNDLLSLETGSLKLANGRVIEKTLYNRRTRQDEPALFVALTFERREVLDSSNIKPMNLIGVDRGENIPAVIALTDPEGCPLSRFKDSLGNPTHILRIGESYKEKQRTIQAKKEVEQRRAGGYSRKYASKAKNLADDMVRNTARDLLYYAVTQDAMLIFENLSRGFGRQGKRTFMAERQYTRMEDWLTAKLAYEGLPSKTYLSKTLAQYTSKTCSNCGFTITSADYDRVLEKLKKTATGWMTTINGKELKVEGQITYYNRYKRQNVVKDLSVELDRLSEESVNNDISSWTKGRSGNEALSLLKKRFSHRPVQEKFVCLNCGFETHADEQAALNIARSWLFLRSQEYKKYQTNKTTGNTDKRAFVETWQSFYRKKLKEVWKPAV

SEQ ID NO: 47197 - protein, 980 aa, synthetic construct
  REGION 1..980: note = engineered CasX variant
QEIKRINKIRRRLVKDSNTKKAGKTGPMKTLLVRVMTPDLRERLENLRKKPENIPQPISNTSRANLNKLLTDYTEMKKAILHVYWEEFQKDPVGLMSRVAQPASKKIDQNKLKPEMDEKGNLTTAGFACSQCGQPLFVYKLEQVSEKGKAYTNYFGRCNVAEHEKLILLAQLKPEKDSDEAVTYSLGKFGQRALDFYSIHVTKESTHPVKPLAQIAGNRYASVPVGKALSDACMGTIASFLSKYQDIIIEHQKVVKGNQKRLESLRELAGKENLEYPSVTLPPQPHTKEGVDAYNEVIARVRMWVNLNLWQKLKLSRDDAKPLLRLKGFPSFPLVERQANEVDWWDMVCNVKKLINEKKEDGKVFWQNLAGYKRQEALRPYLSSEEDVRKKGKKFARYQLGDLLLHLEKKHGEDWGKVYDEAWERIDKKVEGLSKHIKLEEERRSEDAQSKAALTDWLRAKASFVIEGLKEADKDEFCRCELKLQKWYGDLRGKPFAIEAENSILDISGFSKQYNCAFIWQKDGVKKLNLYLIINYFKGGKLRFKKIKPEAFEANRFYTVINKKSGEIVPMEVNFNFDDPNLIILPLAFGKRQGREFIWNDLLSLETGSLKLANGRVIEKTLYNRRTRQDEPALFVALTFERREVLDSSNIKPMNLIGVDRGENIPAVIALTDPEGCPLSRFKDSLGNPTHILRIGESYKEKQRTIQAKKEVEQRRAGGYSRKYASKAKNLADDMVRNTARDLLYYAVTQDAMLIFENLSRGFGRQGKRTFMAERQYTRMEDWLTAKLAYEGLPSKTYLSKTLAQYTSKTCSNCGFTITSADYDRVLEKLKKTATGWMTTINGKELKVEGQITYYNRYKRQNVVKDLSVELDRLSEESVNNDISSWTKGRSGNEALSLLKKRFSHRPVQEKFVCLNCGFETHADEQAALNIARSWLFLRSQEYKKYQTNKTTGNTDKRAFVETWQSFYRKKLKEVWKPAV

SEQ ID NO: 47198 - protein, 980 aa, synthetic construct
  REGION 1..980: note = engineered CasX variant
QEIKRINKIRRRLVKDSNTKKAGKTGPMKTLLVRVMTPDLRERLENLRKKPENIPQPISNTSRANLNKLLTDYTEMKKAILHVYWEEFQKDPVGLMSRVAQPASKKIDQNKLKPEMDEKGNLTTAGFACSQCGQPLFVYKLEQVSEKGKAYTNYFGRCNVAEHEKLIKLAQLKPEKDSDEAVTYSLGKFGQRALDFYSIHVTKESTHPVKPLAQIAGNRYASGPVGKALSDACMGTIASFLSKYQDIIIEHQKVVKGNQKRLESLRELAGKENLEYPSVTLPPQPHTKEGVDAYNEVIARVRMWVNLNLWQKLKLSRDDAKPLLRLKGFPSFPLVERQANEVDWWDMVCNVKKLINEKKEDGKVFWQNLAGYKRQEALRPYLSSEEDVRKKGKKFARYQLGDLLLHLEKKHGEDWGKVYDEAWERIDKKVEGLSKHIKLEEERRSEDAQSKAALTDWLRAKASFVIEGLKEADKDEFCRCELKLQKWYGDLRGKPFAIEAENSILDISGFSKQYNCAFIWQKDGVKKLNLYLIINYFKGGKLRFKKIKPEAFEANRFYTVINKKSGEIVPMEVNFNFDDPNLIILPLAFGKRQGREFIWNDLLSLETGSLKLANGRVIEKTLYNRRTRQDEPALFVALTFERREVLDSSNIKPMNLIGVDRGENIPAVIALTDPEGCPLSRFKDSLGNPTHILRIGESYKEKQRTIQAKKEVEQRRAGGYSRKYASKAKNLADDMVRNTARDLLYYAVTQDAMLIFENLSRGFGRQGKRTFMAERQYTRMEDWLTAKLAYEGLPSKTYLSKTLAQYTSKTCSNCGFTITSADYDRVLEKLKKTATGWMTTINGKELKVEGQITYYNRYKRQNVVKDLSVELDRLSEESVNNDISSWTKGRSGNEALSLLKKRFSHRPVQEKFVCLNCGFETHADEQAALNIARSWLFLRSQEYKKYQTNKTTGNTDKRAFVETWQSFYRKKLKEVWKPAV

SEQ ID NO: 47199 - protein, 979 aa, synthetic construct
  REGION 1..979: note = engineered CasX variant
QEIKRINKIRRRLVKDSNTKKAGKTGPMKTLLVRVMTPDLRERLENLRKKPENIPQPISNTSRANLNKLLTDYTEMKKAILHVYWEEFQKDPVGLMSRVAQPASKKIDQNKLKPEMDEKGNLTTAGFACSQCGQPLFVYKLEQVSEKGKAYTNYFGRCNVAEHEKLILLAQLKPEKDSDEAVTYSLGKFGQRALDFYSIHVTKESTHPVKPLAQIAGNRYASPVGKALSDACMGTIASFLSKYQDIIIEHQKVVKGNQKRLESLRELAGKENLEYPSVTLPPQPHTKEGVDAYNEVIARVRMWVNLNLWQKLKLSRDDAKPLLRLKGFPSFPLVERQANEVDWWDMVCNVKKLINEKKEDGKVFWQNLAGYKRQEALRPYLSSEEDVRKKGKKFARYQLGDLLLHLEKKHGEDWGKVYDEAWERIDKKVEGLSKHIKLEEERRSEDAQSKAALTDWLRAKASFVIEGLKEADKDEFCRCELKLQKWYGDLRGKPFAIEAENSILDISGFSKQYNCAFIWQKDGVKKLNLYLIINYFKGGKLRFKKIKPEAFEANRFYTVINKKSGEIVPMEVNFNFDDPNLIILPLAFGKRQGREFIWNDLLSLETGSLKLANGRVIEKTLYNRRTRQDEPALFVALTFERREVLDSSNIKPMNLIGVDRGENIPAVIALTDPEGCPLSRFKDSLGNPTHILRIGESYKEKQRTIQAKKEVEQRRAGGYSRKYASKAKNLADDMVRNTARDLLYYAVTQDAMLIFENLSRGFGRQGKRTFMAERQYTRMEDWLTAKLAYEGLPSKTYLSKTLAQYTSKTCSNCGFTITSADYDRVLEKLKKTATGWMTTINGKELKVEGQITYYNRYKRQNVVKDLSVELDRLSEESVNNDISSWTKGRSGNEALSLLKKRFSHRPVQEKFVCLNCGFETHADEQAALNIARSWLFLRSQEYKKYQTNKTTGNTDKRAFVETWQSFYRKKLKEVWKPAV

SEQ ID NO: 47200 - protein, 979 aa, synthetic construct
  REGION 1..979: note = engineered CasX variant
QEIKRINKIRRRLVKDSNTKKAGKTGPMKTLLVRVMTPDLRERLENLRKKPENIPQPISNTSRANLNKLLTDYTEMKKAILHVYWEEFQKDPVGLMSRVAQPASKKIDQNKLKPEMDEKGNLTTAGFACSQCGQPLFVYKLEQVSEKGKAYTNYFGRCNVAEHEKLILLAQLKPEKDSDEAVTYSLGKFGQRALDFYSIHVTKESTHPVKPLAQIAGNRYASYPVGKALSDACMGTIASFLSKYQDIIIEHQKVVKGNQKRLESLRELAGKENLEYPSVTLPPQPHTKEGVDAYNEVIARVRMWVNLNLWQKLKLSRDDAKPLLRLKGFPSFPLVERQANEVDWWDMVCNVKKLINEKKEDGKVFWQNLAGYKRQEALRPYLSSEEDVRQKGKKFARYQLGDLLLHLEKKHGEDWGKVYDEAWERIDKKVEGLSKHIKLEEERRSEDAQSKAALTDWLRAKASFVIEGLKEADKDEFCRCELKLQKWYGDLRGKPFAIEAENSILDISGFSKQYNCAFIWQKDGVKKLNLYLIINYFKGGKLRFKKIKPEAFEANRFYTVINKKSGEIVPMEVNFNFDDPNLIILPLAFGKRQGREFIWNDLLSLETGSLKLANGRVIEKTLYNRRTRQDEPALFVALTFERREVLDSSNIKPMNLIGVDRGENIPAVIALTDPEGCPLSRFKDSLGNPTHILRIGESYKEKQRTIQAKKEVEQRRAGGYSRKYASKAKNLADDMVRNTARDLLYYAVTQDAMLIFENLSRGFGRQGKRTFMAERQYTRMEDWLTAKLAYEGLPSKTYLSKTLAQYTSKTCSNCGFTITSADYDRVLEKLKKTATGWMTTINGKELKVEGQITYYNRYKRQNVVKDLSVELDRLSEESVNNDISSWTKGRSGEALSLLKKRFSHRPVQEKFVCLNCGFETHADEQAALNIARSWLFLRSQEYKKYQTNKTTGNTDKRAFVETWQSFYRKKLKEVWKPAV

SEQ ID NO: 47201 - protein, 979 aa, synthetic construct
  REGION 1..979: note = engineered CasX variant
QEIKRINKIRRRLVKDSNTKKAGKTGPMKTLLVRVMTPDLRERLENLRKKPENIPQPISNTSRANLNKLLTDYTEMKKAILHVYWEEFQKDPVGLMSRVAQPASKKIDQNKLKPEMDEKGNLTTAGFACSQCGQPLFVYKLEQVSEKGKAYTNYFGRCNVAEHEKLILLAQLKPEKDSDEAVTYSLGKFGQRALDFYSIHVTKESTHPVKPLAQIAGNRYASHPVGKALSDACMGTIASFLSKYQDIIIEHQKVVKGNQKRLESLRELAGKENLEYPSVTLPPQPHTKEGVDAYNEVIARVRMWVNLNLWQKLKLSRDDAKPLLRLKGFPSFPLVERQANEVDWWDMVCNVKKLINEKKEDGKVFWQNLAGYKRQEALRPYLSSEEDVRQKGKKFARYQLGDLLLHLEKKHGEDWGKVYDEAWERIDKKVEGLSKHIKLEEERRSEDAQSKAALTDWLRAKASFVIEGLKEADKDEFCRCELKLQKWYGDLRGKPFAIEAENSILDISGFSKQYNCAFIWQKDGVKKLNLYLIINYFKGGKLRFKKIKPEAFEANRFYTVINKKSGEIVPMEVNFNFDDPNLIILPLAFGKRQGREFIWNDLLSLETGSLKLANGRVIEKTLYNRRTRQDEPALFVALTFERREVLDSSNIKPMNLIGVDRGENIPAVIALTDPEGCPLSRFKDSLGNPTHILRIGESYKEKQRTIQAKKEVEQRRAGGYSRKYASKAKNLADDMVRNTARDLLYYAVTQDAMLIFENLSRGFGRQGKRTFMAERQYTRMEDWLTAKLAYEGLPSKTYLSKTLAQYTSKTCSNCGFTITSADYDRVLEKLKKTATGWMTTINGKELKVEGQITYYNRYKRQNVVKDLSVELDRLSEESVNNDISSWTKGRSGEALSLLKKRFSHRPVQEKFVCLNCGFETHADEQAALNIARSWLFLRSQEYKKYQTNKTTGNTDKRAFVETWQSFYRKKLKEVWKPAV

SEQ ID NO: 47202 - protein, 979 aa, synthetic construct
  REGION 1..979: note = engineered CasX variant
QEIKRINKIRRRLVKDSNTKKAGKTGPMKTLLVRVMTPDLRERLENLRKKPENIPQPISNTSRANLNKLLTDYTEMKKAILHVYWEEFQKDPVGLMSRVAQPASKKIDQNKLKPEMDEKGNLTTAGFACSQCGQPLFVYKLEQVSEKGKAYTNYFGRCNVAEHEKLILLAQLKPEKDSDEAVTYSLGKFGQRALDFYSIHVTKESTHPVKPLAQIAGNRYASSPVGKALSDACMGTIASFLSKYQDIIIEHQKVVKGNQKRLESLRELAGKENLEYPSVTLPPQPHTKEGVDAYNEVIARVRMWVNLNLWQKLKLSRDDAKPLLRLKGFPSFPLVERQANEVDWWDMVCNVKKLINEKKEDGKVFWQNLAGYKRQEALRPYLSSEEDVRQKGKKFARYQLGDLLLHLEKKHGEDWGKVYDEAWERIDKKVEGLSKHIKLEEERRSEDAQSKAALTDWLRAKASFVIEGLKEADKDEFCRCELKLQKWYGDLRGKPFAIEAENSILDISGFSKQYNCAFIWQKDGVKKLNLYLIINYFKGGKLRFKKIKPEAFEANRFYTVINKKSGEIVPMEVNFNFDDPNLIILPLAFGKRQGREFIWNDLLSLETGSLKLANGRVIEKTLYNRRTRQDEPALFVALTFERREVLDSSNIKPMNLIGVDRGENIPAVIALTDPEGCPLSRFKDSLGNPTHILRIGESYKEKQRTIQAKKEVEQRRAGGYSRKYASKAKNLADDMVRNTARDLLYYAVTQDAMLIFENLSRGFGRQGKRTFMAERQYTRMEDWLTAKLAYEGLPSKTYLSKTLAQYTSKTCSNCGFTITSADYDRVLEKLKKTATGWMTTINGKELKVEGQITYYNRYKRQNVVKDLSVELDRLSEESVNNDISSWTKGRSGEALSLLKKRFSHRPVQEKFVCLNCGFETHADEQAALNIARSWLFLRSQEYKKYQTNKTTGNTDKRAFVETWQSFYRKKLKEVWKPAV

SEQ ID NO: 47203 - protein, 979 aa, synthetic construct
  REGION 1..979: note = engineered CasX variant
QEIKRINKIRRRLVKDSNTKKAGKTGPMKTLLVRVMTPDLRERLENLRKKPENIPQPISNTSRANLNKLLTDYTEMKKAILHVYWEEFQKDPVGLMSRVAQPASKKIDQNKLKPEMDEKGNLTTAGFACSQCGQPLFVYKLEQVSEKGKAYTNYFGRCNVAEHEKLILLAQLKPEKDSDEAVTYSLGKFGQRALDFYSIHVTKESTHPVKPLAQIAGNRYASTPVGKALSDACMGTIASFLSKYQDIIIEHQKVVKGNQKRLESLRELAGKENLEYPSVTLPPQPHTKEGVDAYNEVIARVRMWVNLNLWQKLKLSRDDAKPLLRLKGFPSFPLVERQANEVDWWDMVCNVKKLINEKKEDGKVFWQNLAGYKRQEALRPYLSSEEDVRQKGKKFARYQLGDLLLHLEKKHGEDWGKVYDEAWERIDKKVEGLSKHIKLEEERRSEDAQSKAALTDWLRAKASFVIEGLKEADKDEFCRCELKLQKWYGDLRGKPFAIEAENSILDISGFSKQYNCAFIWQKDGVKKLNLYLIINYFKGGKLRFKKIKPEAFEANRFYTVINKKSGEIVPMEVNFNFDDPNLIILPLAFGKRQGREFIWNDLLSLETGSLKLANGRVIEKTLYNRRTRQDEPALFVALTFERREVLDSSNIKPMNLIGVDRGENIPAVIALTDPEGCPLSRFKDSLGNPTHILRIGESYKEKQRTIQAKKEVEQRRAGGYSRKYASKAKNLADDMVRNTARDLLYYAVTQDAMLIFENLSRGFGRQGKRTFMAERQYTRMEDWLTAKLAYEGLPSKTYLSKTLAQYTSKTCSNCGFTITSADYDRVLEKLKKTATGWMTTINGKELKVEGQITYYNRYKRQNVVKDLSVELDRLSEESVNNDISSWTKGRSGEALSLLKKRFSHRPVQEKFVCLNCGFETHADEQAALNIARSWLFLRSQEYKKYQTNKTTGNTDKRAFVETWQSFYRKKLKEVWKPAV

SEQ ID NO: 47204 - protein, 979 aa, synthetic construct
  REGION 1..979: note = engineered CasX variant
QEIKRINKIRRRLVKDSNTKKAGKTGPMKTLLVRVMTPDLRERLENLRKKPENIPQPISNTSRANLNKLLTDYTEMKKAILHVYWEEFQKDPVGLMSRVAQPASKKIDQNKLKPEMDEKGNLTTAGFACSQCGQPLFVYKLEQVSEKGKAYTNYFGRCNVAEHEKLILLAQLKPEKDSDEAVTYSLGKFGQRALDFYSIHVTKESTHPVKPLAQIAGNRYASAPVGKALSDACMGTIASFLSKYQDIIIEHQKVVKGNQKRLESLRELAGKENLEYPSVTLPPQPHTKEGVDAYNEVIARVRMWVNLNLWQKLKLSRDDAKPLLRLKGFPSFPLVERQANEVDWWDMVCNVKKLINEKKEDGKVFWQNLAGYKRQEALRPYLSSEEDVRQKGKKFARYQLGDLLLHLEKKHGEDWGKVYDEAWERIDKKVEGLSKHIKLEEERRSEDAQSKAALTDWLRAKASFVIEGLKEADKDEFCRCELKLQKWYGDLRGKPFAIEAENSILDISGFSKQYNCAFIWQKDGVKKLNLYLIINYFKGGKLRFKKIKPEAFEANRFYTVINKKSGEIVPMEVNFNFDDPNLIILPLAFGKRQGREFIWNDLLSLETGSLKLANGRVIEKTLYNRRTRQDEPALFVALTFERREVLDSSNIKPMNLIGVDRGENIPAVIALTDPEGCPLSRFKDSLGNPTHILRIGESYKEKQRTIQAKKEVEQRRAGGYSRKYASKAKNLADDMVRNTARDLLYYAVTQDAMLIFENLSRGFGRQGKRTFMAERQYTRMEDWLTAKLAYEGLPSKTYLSKTLAQYTSKTCSNCGFTITSADYDRVLEKLKKTATGWMTTINGKELKVEGQITYYNRYKRQNVVKDLSVELDRLSEESVNNDISSWTKGRSGEALSLLKKRFSHRPVQEKFVCLNCGFETHADEQAALNIARSWLFLRSQEYKKYQTNKTTGNTDKRAFVETWQSFYRKKLKEVWKPAV

SEQ ID NO: 47205 - protein, 979 aa, synthetic construct
  REGION 1..979: note = engineered CasX variant
QEIKRINKIRRRLVKDSNTKKAGKTGPMKTLLVRVMTPDLRERLENLRKKPENIPQPISNTSRANLNKLLTDYTEMKKAILHVYWEEFQKDPVGLMSRVAQPASKKIDQNKLKPEMDEKGNLTTAGFACSQCGQPLFVYKLEQVSEKGKAYTNYFGRCNVAEHEKLILLAQLKPEKDSDEAVTYSLGKFGQRALDFYSIHVTKESTHPVKPLAQIAGNRYASVPVGKALSDACMGTIASFLSKYQDIIIEHQKVVKGNQKRLESLRELAGKENLEYPSVTLPPQPHTKEGVDAYNEVIARVRMWVNLNLWQKLKLSRDDAKPLLRLKGFPSFPLVERQANEVDWWDMVCNVKKLINEKKEDGKVFWQNLAGYKRQEALRPYLSSEEDVRQKGKKFARYQLGDLLLHLEKKHGEDWGKVYDEAWERIDKKVEGLSKHIKLEEERRSEDAQSKAALTDWLRAKASFVIEGLKEADKDEFCRCELKLQKWYGDLRGKPFAIEAENSILDISGFSKQYNCAFIWQKDGVKKLNLYLIINYFKGGKLRFKKIKPEAFEANRFYTVINKKSGEIVPMEVNFNFDDPNLIILPLAFGKRQGREFIWNDLLSLETGSLKLANGRVIEKTLYNRRTRQDEPALFVALTFERREVLDSSNIKPMNLIGVDRGENIPAVIALTDPEGCPLSRFKDSLGNPTHILRIGESYKEKQRTIQAKKEVEQRRAGGYSRKYASKAKNLADDMVRNTARDLLYYAVTQDAMLIFENLSRGFGRQGKRTFMAERQYTRMEDWLTAKLAYEGLPSKTYLSKTLAQYTSKTCSNCGFTITSADYDRVLEKLKKTATGWMTTINGKELKVEGQITYYNRYKRQNVVKDLSVELDRLSEESVNNDISSWTKGRSGEALSLLKKRFSHRPVQEKFVCLNCGFETHADEQAALNIARSWLFLRSQEYKKYQTNKTTGNTDKRAFVETWQSFYRKKLKEVWKPAV

SEQ ID NO: 47206 - protein, 979 aa, synthetic construct
  REGION 1..979: note = engineered CasX variant
QEIKRINKIRRRLVKDSNTKKAGKTGPMKTLLVRVMTPDLRERLENLRKKPENIPQPISNTSRANLNKLLTDYTEMKKAILHVYWEEFQKDPVGLMSRVAQPASKKIDQNKLKPEMDEKGNLTTAGFACSQCGQPLFVYKLEQVSEKGKAYTNYFGRCNVAEHEKLIKLAQLKPEKDSDEAVTYSLGKFGQRALDFYSIHVTKESTHPVKPLAQIAGNRYASGPVGKALSDACMGTIASFLSKYQDIIIEHQKVVKGNQKRLESLRELAGKENLEYPSVTLPPQPHTKEGVDAYNEVIARVRMWVNLNLWQKLKLSRDDAKPLLRLKGFPSFPLVERQANEVDWWDMVCNVKKLINEKKEDGKVFWQNLAGYKRQEALRPYLSSEEDVRQKGKKFARYQLGDLLLHLEKKHGEDWGKVYDEAWERIDKKVEGLSKHIKLEEERRSEDAQSKAALTDWLRAKASFVIEGLKEADKDEFCRCELKLQKWYGDLRGKPFAIEAENSILDISGFSKQYNCAFIWQKDGVKKLNLYLIINYFKGGKLRFKKIKPEAFEANRFYTVINKKSGEIVPMEVNFNFDDPNLIILPLAFGKRQGREFIWNDLLSLETGSLKLANGRVIEKTLYNRRTRQDEPALFVALTFERREVLDSSNIKPMNLIGVDRGENIPAVIALTDPEGCPLSRFKDSLGNPTHILRIGESYKEKQRTIQAKKEVEQRRAGGYSRKYASKAKNLADDMVRNTARDLLYYAVTQDAMLIFENLSRGFGRQGKRTFMAERQYTRMEDWLTAKLAYEGLPSKTYLSKTLAQYTSKTCSNCGFTITSADYDRVLEKLKKTATGWMTTINGKELKVEGQITYYNRYKRQNVVKDLSVELDRLSEESVNNDISSWTKGRSGEALSLLKKRFSHRPVQEKFVCLNCGFETHADEQAALNIARSWLFLRSQEYKKYQTNKTTGNTDKRAFVETWQSFYRKKLKEVWKPAV

SEQ ID NO: 47207 - protein, 978 aa, synthetic construct
  REGION 1..978: note = engineered CasX variant
QEIKRINKIRRRLVKDSNTKKAGKTGPMKTLLVRVMTPDLRERLENLRKKPENIPQPISNTSRANLNKLLTDYTEMKKAILHVYWEEFQKDPVGLMSRVAQPASKKIDQNKLKPEMDEKGNLTTAGFACSQCGQPLFVYKLEQVSEKGKAYTNYFGRCNVAEHEKLILLAQLKPEKDSDEAVTYSLGKFGQRALDFYSIHVTKESTHPVKPLAQIAGNRYASPVGKALSDACMGTIASFLSKYQDIIIEHQKVVKGNQKRLESLRELAGKENLEYPSVTLPPQPHTKEGVDAYNEVIARVRMWVNLNLWQKLKLSRDDAKPLLRLKGFPSFPLVERQANEVDWWDMVCNVKKLINEKKEDGKVFWQNLAGYKRQEALRPYLSSEEDVRQKGKKFARYQLGDLLLHLEKKHGEDWGKVYDEAWERIDKKVEGLSKHIKLEEERRSEDAQSKAALTDWLRAKASFVIEGLKEADKDEFCRCELKLQKWYGDLRGKPFAIEAENSILDISGFSKQYNCAFIWQKDGVKKLNLYLIINYFKGGKLRFKKIKPEAFEANRFYTVINKKSGEIVPMEVNFNFDDPNLIILPLAFGKRQGREFIWNDLLSLETGSLKLANGRVIEKTLYNRRTRQDEPALFVALTFERREVLDSSNIKPMNLIGVDRGENIPAVIALTDPEGCPLSRFKDSLGNPTHILRIGESYKEKQRTIQAKKEVEQRRAGGYSRKYASKAKNLADDMVRNTARDLLYYAVTQDAMLIFENLSRGFGRQGKRTFMAERQYTRMEDWLTAKLAYEGLPSKTYLSKTLAQYTSKTCSNCGFTITSADYDRVLEKLKKTATGWMTTINGKELKVEGQITYYNRYKRQNVVKDLSVELDRLSEESVNNDISSWTKGRSGEALSLLKKRFSHRPVQEKFVCLNCGFETHADEQAALNIARSWLFLRSQEYKKYQTNKTTGNTDKRAFVETWQSFYRKKLKEVWKPAV

SEQ ID NO: 47208 - protein, 979 aa, synthetic construct
  REGION 1..979: note = engineered CasX variant
QEIKRINKIRRRLVKDSNTKKAGKTGPMKTLLVRVMTPDLRERLENLRKKPENIPQPISNTSRANLNKLLTDYTEMKKAILHVYWEEFQKDPVGLMSRVAQPASKKIDQNKLKPEMDEKGNLTTAGFACSQCGQPLFVYKLEQVSEKGKAYTNYFGRCNVAEHEKLILLAQLKPEKDSDEAVTYSLGKFGQRALDFYSIHVTKESTHPVKPLAQIAGNRYASYPVGKALSDACMGTIASFLSKYQDIIIEHQKVVKGNQKRLESLRELAGKENLEYPSVTLPPQPHTKEGVDAYNEVIARVRMWVNLNLWQKLKLSRDDAKPLLRLKGFPSFPLVERQANEVDWWDMVCNVKKLINEKKEDGKVFWQNLAGYKRQEALRPYLSSEEDVRKKGKKFARYQLGDLLLHLEKKHGEDWGKVYDEAWERIDKKVEGLSKHIKLEEERRSEDAQSKAALTDWLRAKASFVIEGLKEADKDEFCRCELKLQKWYGDLRGKPFAIEAENSILDISGFSKQYNCAFIWQKDGVKKLNLYLIINYFKGGKLRFKKIKPEAFEANRFYTVINKKSGEIVPMEVNFNFDDPNLIILPLAFGKRQGREFIWNDLLSLETGSLKLANGRVIEKTLYNRRTRQDEPALFVALTFERREVLDSSNIKPMNLIGVDRGENIPAVIALTDPEGCPLSRFKDSLGNPTHILRIGESYKEKQRTIQAKKEVEQRRAGGYSRKYASKAKNLADDMVRNTARDLLYYAVTQDAMLIFENLSRGFGRQGKRTFMAERQYTRMEDWLTAKLAYEGLPSQTYLSKTLAQYTSKTCSNCGFTITSADYDRVLEKLKKTATGWMTTINGKELKVEGQITYYNRYKRQNVVKDLSVELDRLSEESVNNDISSWTKGRSGEALSLLKKRFSHRPVQEKFVCLNCGFETHADEQAALNIARSWLFLRSQEYKKYQTNKTTGNTDKRAFVETWQSFYRKKLKEVWKPAV

SEQ ID NO: 47209 - protein, 979 aa, synthetic construct
  REGION 1..979: note = engineered CasX variant
QEIKRINKIRRRLVKDSNTKKAGKTGPMKTLLVRVMTPDLRERLENLRKKPENIPQPISNTSRANLNKLLTDYTEMKKAILHVYWEEFQKDPVGLMSRVAQPASKKIDQNKLKPEMDEKGNLTTAGFACSQCGQPLFVYKLEQVSEKGKAYTNYFGRCNVAEHEKLILLAQLKPEKDSDEAVTYSLGKFGQRALDFYSIHVTKESTHPVKPLAQIAGNRYASHPVGKALSDACMGTIASFLSKYQDIIIEHQKVVKGNQKRLESLRELAGKENLEYPSVTLPPQPHTKEGVDAYNEVIARVRMWVNLNLWQKLKLSRDDAKPLLRLKGFPSFPLVERQANEVDWWDMVCNVKKLINEKKEDGKVFWQNLAGYKRQEALRPYLSSEEDVRKKGKKFARYQLGDLLLHLEKKHGEDWGKVYDEAWERIDKKVEGLSKHIKLEEERRSEDAQSKAALTDWLRAKASFVIEGLKEADKDEFCRCELKLQKWYGDLRGKPFAIEAENSILDISGFSKQYNCAFIWQKDGVKKLNLYLIINYFKGGKLRFKKIKPEAFEANRFYTVINKKSGEIVPMEVNFNFDDPNLIILPLAFGKRQGREFIWNDLLSLETGSLKLANGRVIEKTLYNRRTRQDEPALFVALTFERREVLDSSNIKPMNLIGVDRGENIPAVIALTDPEGCPLSRFKDSLGNPTHILRIGESYKEKQRTIQAKKEVEQRRAGGYSRKYASKAKNLADDMVRNTARDLLYYAVTQDAMLIFENLSRGFGRQGKRTFMAERQYTRMEDWLTAKLAYEGLPSQTYLSKTLAQYTSKTCSNCGFTITSADYDRVLEKLKKTATGWMTTINGKELKVEGQITYYNRYKRQNVVKDLSVELDRLSEESVNNDISSWTKGRSGEALSLLKKRFSHRPVQEKFVCLNCGFETHADEQAALNIARSWLFLRSQEYKKYQTNKTTGNTDKRAFVETWQSFYRKKLKEVWKPAV

SEQ ID NO: 47210 - protein, 979 aa, synthetic construct
  REGION 1..979: note = engineered CasX variant
QEIKRINKIRRRLVKDSNTKKAGKTGPMKTLLVRVMTPDLRERLENLRKKPENIPQPISNTSRANLNKLLTDYTEMKKAILHVYWEEFQKDPVGLMSRVAQPASKKIDQNKLKPEMDEKGNLTTAGFACSQCGQPLFVYKLEQVSEKGKAYTNYFGRCNVAEHEKLILLAQLKPEKDSDEAVTYSLGKFGQRALDFYSIHVTKESTHPVKPLAQIAGNRYASSPVGKALSDACMGTIASFLSKYQDIIIEHQKVVKGNQKRLESLRELAGKENLEYPSVTLPPQPHTKEGVDAYNEVIARVRMWVNLNLWQKLKLSRDDAKPLLRLKGFPSFPLVERQANEVDWWDMVCNVKKLINEKKEDGKVFWQNLAGYKRQEALRPYLSSEEDVRKKGKKFARYQLGDLLLHLEKKHGEDWGKVYDEAWERIDKKVEGLSKHIKLEEERRSEDAQSKAALTDWLRAKASFVIEGLKEADKDEFCRCELKLQKWYGDLRGKPFAIEAENSILDISGFSKQYNCAFIWQKDGVKKLNLYLIINYFKGGKLRFKKIKPEAFEANRFYTVINKKSGEIVPMEVNFNFDDPNLIILPLAFGKRQGREFIWNDLLSLETGSLKLANGRVIEKTLYNRRTRQDEPALFVALTFERREVLDSSNIKPMNLIGVDRGENIPAVIALTDPEGCPLSRFKDSLGNPTHILRIGESYKEKQRTIQAKKEVEQRRAGGYSRKYASKAKNLADDMVRNTARDLLYYAVTQDAMLIFENLSRGFGRQGKRTFMAERQYTRMEDWLTAKLAYEGLPSQTYLSKTLAQYTSKTCSNCGFTITSADYDRVLEKLKKTATGWMTTINGKELKVEGQITYYNRYKRQNVVKDLSVELDRLSEESVNNDISSWTKGRSGEALSLLKKRFSHRPVQEKFVCLNCGFETHADEQAALNIARSWLFLRSQEYKKYQTNKTTGNTDKRAFVETWQSFYRKKLKEVWKPAV

SEQ ID NO: 47211 - protein, 979 aa, synthetic construct
  REGION 1..979: note = engineered CasX variant
QEIKRINKIRRRLVKDSNTKKAGKTGPMKTLLVRVMTPDLRERLENLRKKPENIPQPISNTSRANLNKLLTDYTEMKKAILHVYWEEFQKDPVGLMSRVAQPASKKIDQNKLKPEMDEKGNLTTAGFACSQCGQPLFVYKLEQVSEKGKAYTNYFGRCNVAEHEKLILLAQLKPEKDSDEAVTYSLGKFGQRALDFYSIHVTKESTHPVKPLAQIAGNRYASTPVGKALSDACMGTIASFLSKYQDIIIEHQKVVKGNQKRLESLRELAGKENLEYPSVTLPPQPHTKEGVDAYNEVIARVRMWVNLNLWQKLKLSRDDAKPLLRLKGFPSFPLVERQANEVDWWDMVCNVKKLINEKKEDGKVFWQNLAGYKRQEALRPYLSSEEDVRKKGKKFARYQLGDLLLHLEKKHGEDWGKVYDEAWERIDKKVEGLSKHIKLEEERRSEDAQSKAALTDWLRAKASFVIEGLKEADKDEFCRCELKLQKWYGDLRGKPFAIEAENSILDISGFSKQYNCAFIWQKDGVKKLNLYLIINYFKGGKLRFKKIKPEAFEANRFYTVINKKSGEIVPMEVNFNFDDPNLIILPLAFGKRQGREFIWNDLLSLETGSLKLANGRVIEKTLYNRRTRQDEPALFVALTFERREVLDSSNIKPMNLIGVDRGENIPAVIALTDPEGCPLSRFKDSLGNPTHILRIGESYKEKQRTIQAKKEVEQRRAGGYSRKYASKAKNLADDMVRNTARDLLYYAVTQDAMLIFENLSRGFGRQGKRTFMAERQYTRMEDWLTAKLAYEGLPSQTYLSKTLAQYTSKTCSNCGFTITSADYDRVLEKLKKTATGWMTTINGKELKVEGQITYYNRYKRQNVVKDLSVELDRLSEESVNNDISSWTKGRSGEALSLLKKRFSHRPVQEKFVCLNCGFETHADEQAALNIARSWLFLRSQEYKKYQTNKTTGNTDKRAFVETWQSFYRKKLKEVWKPAV

SEQ ID NO: 47212 - protein, 979 aa, synthetic construct
  REGION 1..979: note = engineered CasX variant
QEIKRINKIRRRLVKDSNTKKAGKTGPMKTLLVRVMTPDLRERLENLRKKPENIPQPISNTSRANLNKLLTDYTEMKKAILHVYWEEFQKDPVGLMSRVAQPASKKIDQNKLKPEMDEKGNLTTAGFACSQCGQPLFVYKLEQVSEKGKAYTNYFGRCNVAEHEKLILLAQLKPEKDSDEAVTYSLGKFGQRALDFYSIHVTKESTHPVKPLAQIAGNRYASAPVGKALSDACMGTIASFLSKYQDIIIEHQKVVKGNQKRLESLRELAGKENLEYPSVTLPPQPHTKEGVDAYNEVIARVRMWVNLNLWQKLKLSRDDAKPLLRLKGFPSFPLVERQANEVDWWDMVCNVKKLINEKKEDGKVFWQNLAGYKRQEALRPYLSSEEDVRKKGKKFARYQLGDLLLHLEKKHGEDWGKVYDEAWERIDKKVEGLSKHIKLEEERRSEDAQSKAALTDWLRAKASFVIEGLKEADKDEFCRCELKLQKWYGDLRGKPFAIEAENSILDISGFSKQYNCAFIWQKDGVKKLNLYLIINYFKGGKLRFKKIKPEAFEANRFYTVINKKSGEIVPMEVNFNFDDPNLIILPLAFGKRQGREFIWNDLLSLETGSLKLANGRVIEKTLYNRRTRQDEPALFVALTFERREVLDSSNIKPMNLIGVDRGENIPAVIALTDPEGCPLSRFKDSLGNPTHILRIGESYKEKQRTIQAKKEVEQRRAGGYSRKYASKAKNLADDMVRNTARDLLYYAVTQDAMLIFENLSRGFGRQGKRTFMAERQYTRMEDWLTAKLAYEGLPSQTYLSKTLAQYTSKTCSNCGFTITSADYDRVLEKLKKTATGWMTTINGKELKVEGQITYYNRYKRQNVVKDLSVELDRLSEESVNNDISSWTKGRSGEALSLLKKRFSHRPVQEKFVCLNCGFETHADEQAALNIARSWLFLRSQEYKKYQTNKTTGNTDKRAFVETWQSFYRKKLKEVWKPAV

SEQ ID NO: 47213 - protein, 979 aa, synthetic construct
  REGION 1..979: note = engineered CasX variant
QEIKRINKIRRRLVKDSNTKKAGKTGPMKTLLVRVMTPDLRERLENLRKKPENIPQPISNTSRANLNKLLTDYTEMKKAILHVYWEEFQKDPVGLMSRVAQPASKKIDQNKLKPEMDEKGNLTTAGFACSQCGQPLFVYKLEQVSEKGKAYTNYFGRCNVAEHEKLILLAQLKPEKDSDEAVTYSLGKFGQRALDFYSIHVTKESTHPVKPLAQIAGNRYASVPVGKALSDACMGTIASFLSKYQDIIIEHQKVVKGNQKRLESLRELAGKENLEYPSVTLPPQPHTKEGVDAYNEVIARVRMWVNLNLWQKLKLSRDDAKPLLRLKGFPSFPLVERQANEVDWWDMVCNVKKLINEKKEDGKVFWQNLAGYKRQEALRPYLSSEEDVRKKGKKFARYQLGDLLLHLEKKHGEDWGKVYDEAWERIDKKVEGLSKHIKLEEERRSEDAQSKAALTDWLRAKASFVIEGLKEADKDEFCRCELKLQKWYGDLRGKPFAIEAENSILDISGFSKQYNCAFIWQKDGVKKLNLYLIINYFKGGKLRFKKIKPEAFEANRFYTVINKKSGEIVPMEVNFNFDDPNLIILPLAFGKRQGREFIWNDLLSLETGSLKLANGRVIEKTLYNRRTRQDEPALFVALTFERREVLDSSNIKPMNLIGVDRGENIPAVIALTDPEGCPLSRFKDSLGNPTHILRIGESYKEKQRTIQAKKEVEQRRAGGYSRKYASKAKNLADDMVRNTARDLLYYAVTQDAMLIFENLSRGFGRQGKRTFMAERQYTRMEDWLTAKLAYEGLPSQTYLSKTLAQYTSKTCSNCGFTITSADYDRVLEKLKKTATGWMTTINGKELKVEGQITYYNRYKRQNVVKDLSVELDRLSEESVNNDISSWTKGRSGEALSLLKKRFSHRPVQEKFVCLNCGFETHADEQAALNIARSWLFLRSQEYKKYQTNKTTGNTDKRAFVETWQSFYRKKLKEVWKPAV

SEQ ID NO: 47214 - protein, 979 aa, synthetic construct
  REGION 1..979: note = engineered CasX variant
QEIKRINKIRRRLVKDSNTKKAGKTGPMKTLLVRVMTPDLRERLENLRKKPENIPQPISNTSRANLNKLLTDYTEMKKAILHVYWEEFQKDPVGLMSRVAQPASKKIDQNKLKPEMDEKGNLTTAGFACSQCGQPLFVYKLEQVSEKGKAYTNYFGRCNVAEHEKLIKLAQLKPEKDSDEAVTYSLGKFGQRALDFYSIHVTKESTHPVKPLAQIAGNRYASGPVGKALSDACMGTIASFLSKYQDIIIEHQKVVKGNQKRLESLRELAGKENLEYPSVTLPPQPHTKEGVDAYNEVIARVRMWVNLNLWQKLKLSRDDAKPLLRLKGFPSFPLVERQANEVDWWDMVCNVKKLINEKKEDGKVFWQNLAGYKRQEALRPYLSSEEDVRKKGKKFARYQLGDLLLHLEKKHGEDWGKVYDEAWERIDKKVEGLSKHIKLEEERRSEDAQSKAALTDWLRAKASFVIEGLKEADKDEFCRCELKLQKWYGDLRGKPFAIEAENSILDISGFSKQYNCAFIWQKDGVKKLNLYLIINYFKGGKLRFKKIKPEAFEANRFYTVINKKSGEIVPMEVNFNFDDPNLIILPLAFGKRQGREFIWNDLLSLETGSLKLANGRVIEKTLYNRRTRQDEPALFVALTFERREVLDSSNIKPMNLIGVDRGENIPAVIALTDPEGCPLSRFKDSLGNPTHILRIGESYKEKQRTIQAKKEVEQRRAGGYSRKYASKAKNLADDMVRNTARDLLYYAVTQDAMLIFENLSRGFGRQGKRTFMAERQYTRMEDWLTAKLAYEGLPSQTYLSKTLAQYTSKTCSNCGFTITSADYDRVLEKLKKTATGWMTTINGKELKVEGQITYYNRYKRQNVVKDLSVELDRLSEESVNNDISSWTKGRSGEALSLLKKRFSHRPVQEKFVCLNCGFETHADEQAALNIARSWLFLRSQEYKKYQTNKTTGNTDKRAFVETWQSFYRKKLKEVWKPAV

SEQ ID NO: 47215 - protein, 978 aa, synthetic construct
  REGION 1..978: note = engineered CasX variant
QEIKRINKIRRRLVKDSNTKKAGKTGPMKTLLVRVMTPDLRERLENLRKKPENIPQPISNTSRANLNKLLTDYTEMKKAILHVYWEEFQKDPVGLMSRVAQPASKKIDQNKLKPEMDEKGNLTTAGFACSQCGQPLFVYKLEQVSEKGKAYTNYFGRCNVAEHEKLILLAQLKPEKDSDEAVTYSLGKFGQRALDFYSIHVTKESTHPVKPLAQIAGNRYASPVGKALSDACMGTIASFLSKYQDIIIEHQKVVKGNQKRLESLRELAGKENLEYPSVTLPPQPHTKEGVDAYNEVIARVRMWVNLNLWQKLKLSRDDAKPLLRLKGFPSFPLVERQANEVDWWDMVCNVKKLINEKKEDGKVFWQNLAGYKRQEALRPYLSSEEDVRKKGKKFARYQLGDLLLHLEKKHGEDWGKVYDEAWERIDKKVEGLSKHIKLEEERRSEDAQSKAALTDWLRAKASFVIEGLKEADKDEFCRCELKLQKWYGDLRGKPFAIEAENSILDISGFSKQYNCAFIWQKDGVKKLNLYLIINYFKGGKLRFKKIKPEAFEANRFYTVINKKSGEIVPMEVNFNFDDPNLIILPLAFGKRQGREFIWNDLLSLETGSLKLANGRVIEKTLYNRRTRQDEPALFVALTFERREVLDSSNIKPMNLIGVDRGENIPAVIALTDPEGCPLSRFKDSLGNPTHILRIGESYKEKQRTIQAKKEVEQRRAGGYSRKYASKAKNLADDMVRNTARDLLYYAVTQDAMLIFENLSRGFGRQGKRTFMAERQYTRMEDWLTAKLAYEGLPSQTYLSKTLAQYTSKTCSNCGFTITSADYDRVLEKLKKTATGWMTTINGKELKVEGQITYYNRYKRQNVVKDLSVELDRLSEESVNNDISSWTKGRSGEALSLLKKRFSHRPVQEKFVCLNCGFETHADEQAALNIARSWLFLRSQEYKKYQTNKTTGNTDKRAFVETWQSFYRKKLKEVWKPAV

SEQ ID NO: 47216 - protein, 979 aa, synthetic construct
  REGION 1..979: note = engineered CasX variant
QEIKRINKIRRRLVKDSNTKKAGKTGPMKTLLVRVMTPDLRERLENLRKKPENIPQPISNTSRANLNKLLTDYTEMKKAILHVYWEEFQKDPVGLMSRVAQPASKKIDQNKLKPEMDEKGNLTTAGFACSQCGQPLFVYKLEQVSEKGKAYTNYFGRCNVAEHEKLILLAQLKPEKDSDEAVTYSLGKFGQRALDFYSIHVTKESTHPVKPLAQIAGNRYASYPVGKALSDACMGTIASFLSKYQDIIIEHQKVVKGNQKRLESLRELAGKENLEYPSVTLPPQPHTKEGVDAYNEVIARVRMWVNLNLWQKLKLSRDDAKPLLRLKGFPSFPLVERQANEVDWWDMVCNVKKLINEKKEDGKVFWQNLAGYKRQEALRPYLSSEEDVRKKGKKFARYQLGDLLLHLEKKHGEDWGKVYDEAWERIDKKVEGLSKHIKLEEERRSEDAQSKAALTDWLRAKASFVIEGLKEADKDEFCRCELKLQKWYGDLRGKPFAIEAENSILDISGFSKQYNCAFIWQKDGVKKLNLYLIINYFKGGKLRFKKIKPEAFEANRFYTVINKKSGEIVPMEVNFNFDDPNLIILPLAFGKRQGREFIWNDLLSLETGSLKLANGRVIEKTLYNRRTRQDEPALFVALTFERREVLDSSNIKPMNLIGVDRGENIPAVIALTDPEGCPLSRFKDSLGNPTHILRIGESYKEKQRTIQAKKEVEQRRAGGYSRKYASKAKNLADDMVRNTARDLLYYAVTQDAMLIFENLSRGFGRQGKRTFMAERQYTRMEDWLTAKLAYNGLPSKTYLSKTLAQYTSKTCSNCGFTITSADYDRVLEKLKKTATGWMTTINGKELKVEGQITYYNRYKRQNVVKDLSVELDRLSEESVNNDISSWTKGRSGEALSLLKKRFSHRPVQEKFVCLNCGFETHADEQAALNIARSWLFLRSQEYKKYQTNKTTGNTDKRAFVETWQSFYRKKLKEVWKPAV

SEQ ID NO: 47217 - protein, 979 aa, synthetic construct
  REGION 1..979: note = engineered CasX variant
QEIKRINKIRRRLVKDSNTKKAGKTGPMKTLLVRVMTPDLRERLENLRKKPENIPQPISNTSRANLNKLLTDYTEMKKAILHVYWEEFQKDPVGLMSRVAQPASKKIDQNKLKPEMDEKGNLTTAGFACSQCGQPLFVYKLEQVSEKGKAYTNYFGRCNVAEHEKLILLAQLKPEKDSDEAVTYSLGKFGQRALDFYSIHVTKESTHPVKPLAQIAGNRYASHPVGKALSDACMGTIASFLSKYQDIIIEHQKVVKGNQKRLESLRELAGKENLEYPSVTLPPQPHTKEGVDAYNEVIARVRMWVNLNLWQKLKLSRDDAKPLLRLKGFPSFPLVERQANEVDWWDMVCNVKKLINEKKEDGKVFWQNLAGYKRQEALRPYLSSEEDVRKKGKKFARYQLGDLLLHLEKKHGEDWGKVYDEAWERIDKKVEGLSKHIKLEEERRSEDAQSKAALTDWLRAKASFVIEGLKEADKDEFCRCELKLQKWYGDLRGKPFAIEAENSILDISGFSKQYNCAFIWQKDGVKKLNLYLIINYFKGGKLRFKKIKPEAFEANRFYTVINKKSGEIVPMEVNFNFDDPNLIILPLAFGKRQGREFIWNDLLSLETGSLKLANGRVIEKTLYNRRTRQDEPALFVALTFERREVLDSSNIKPMNLIGVDRGENIPAVIALTDPEGCPLSRFKDSLGNPTHILRIGESYKEKQRTIQAKKEVEQRRAGGYSRKYASKAKNLADDMVRNTARDLLYYAVTQDAMLIFENLSRGFGRQGKRTFMAERQYTRMEDWLTAKLAYNGLPSKTYLSKTLAQYTSKTCSNCGFTITSADYDRVLEKLKKTATGWMTTINGKELKVEGQITYYNRYKRQNVVKDLSVELDRLSEESVNNDISSWTKGRSGEALSLLKKRFSHRPVQEKFVCLNCGFETHADEQAALNIARSWLFLRSQEYKKYQTNKTTGNTDKRAFVETWQSFYRKKLKEVWKPAV

SEQ ID NO: 47218 - protein, 979 aa, synthetic construct
  REGION 1..979: note = engineered CasX variant
QEIKRINKIRRRLVKDSNTKKAGKTGPMKTLLVRVMTPDLRERLENLRKKPENIPQPISNTSRANLNKLLTDYTEMKKAILHVYWEEFQKDPVGLMSRVAQPASKKIDQNKLKPEMDEKGNLTTAGFACSQCGQPLFVYKLEQVSEKGKAYTNYFGRCNVAEHEKLILLAQLKPEKDSDEAVTYSLGKFGQRALDFYSIHVTKESTHPVKPLAQIAGNRYASSPVGKALSDACMGTIASFLSKYQDIIIEHQKVVKGNQKRLESLRELAGKENLEYPSVTLPPQPHTKEGVDAYNEVIARVRMWVNLNLWQKLKLSRDDAKPLLRLKGFPSFPLVERQANEVDWWDMVCNVKKLINEKKEDGKVFWQNLAGYKRQEALRPYLSSEEDVRKKGKKFARYQLGDLLLHLEKKHGEDWGKVYDEAWERIDKKVEGLSKHIKLEEERRSEDAQSKAALTDWLRAKASFVIEGLKEADKDEFCRCELKLQKWYGDLRGKPFAIEAENSILDISGFSKQYNCAFIWQKDGVKKLNLYLIINYFKGGKLRFKKIKPEAFEANRFYTVINKKSGEIVPMEVNFNFDDPNLIILPLAFGKRQGREFIWNDLLSLETGSLKLANGRVIEKTLYNRRTRQDEPALFVALTFERREVLDSSNIKPMNLIGVDRGENIPAVIALTDPEGCPLSRFKDSLGNPTHILRIGESYKEKQRTIQAKKEVEQRRAGGYSRKYASKAKNLADDMVRNTARDLLYYAVTQDAMLIFENLSRGFGRQGKRTFMAERQYTRMEDWLTAKLAYNGLPSKTYLSKTLAQYTSKTCSNCGFTITSADYDRVLEKLKKTATGWMTTINGKELKVEGQITYYNRYKRQNVVKDLSVELDRLSEESVNNDISSWTKGRSGEALSLLKKRFSHRPVQEKFVCLNCGFETHADEQAALNIARSWLFLRSQEYKKYQTNKTTGNTDKRAFVETWQSFYRKKLKEVWKPAV

SEQ ID NO: 47219 - protein, 979 aa, synthetic construct
  REGION 1..979: note = engineered CasX variant
QEIKRINKIRRRLVKDSNTKKAGKTGPMKTLLVRVMTPDLRERLENLRKKPENIPQPISNTSRANLNKLLTDYTEMKKAILHVYWEEFQKDPVGLMSRVAQPASKKIDQNKLKPEMDEKGNLTTAGFACSQCGQPLFVYKLEQVSEKGKAYTNYFGRCNVAEHEKLILLAQLKPEKDSDEAVTYSLGKFGQRALDFYSIHVTKESTHPVKPLAQIAGNRYASTPVGKALSDACMGTIASFLSKYQDIIIEHQKVVKGNQKRLESLRELAGKENLEYPSVTLPPQPHTKEGVDAYNEVIARVRMWVNLNLWQKLKLSRDDAKPLLRLKGFPSFPLVERQANEVDWWDMVCNVKKLINEKKEDGKVFWQNLAGYKRQEALRPYLSSEEDVRKKGKKFARYQLGDLLLHLEKKHGEDWGKVYDEAWERIDKKVEGLSKHIKLEEERRSEDAQSKAALTDWLRAKASFVIEGLKEADKDEFCRCELKLQKWYGDLRGKPFAIEAENSILDISGFSKQYNCAFIWQKDGVKKLNLYLIINYFKGGKLRFKKIKPEAFEANRFYTVINKKSGEIVPMEVNFNFDDPNLIILPLAFGKRQGREFIWNDLLSLETGSLKLANGRVIEKTLYNRRTRQDEPALFVALTFERREVLDSSNIKPMNLIGVDRGENIPAVIALTDPEGCPLSRFKDSLGNPTHILRIGESYKEKQRTIQAKKEVEQRRAGGYSRKYASKAKNLADDMVRNTARDLLYYAVTQDAMLIFENLSRGFGRQGKRTFMAERQYTRMEDWLTAKLAYNGLPSKTYLSKTLAQYTSKTCSNCGFTITSADYDRVLEKLKKTATGWMTTINGKELKVEGQITYYNRYKRQNVVKDLSVELDRLSEESVNNDISSWTKGRSGEALSLLKKRFSHRPVQEKFVCLNCGFETHADEQAALNIARSWLFLRSQEYKKYQTNKTTGNTDKRAFVETWQSFYRKKLKEVWKPAV

SEQ ID NO: 47220 - protein, 979 aa, synthetic construct
  REGION 1..979: note = engineered CasX variant
QEIKRINKIRRRLVKDSNTKKAGKTGPMKTLLVRVMTPDLRERLENLRKKPENIPQPISNTSRANLNKLLTDYTEMKKAILHVYWEEFQKDPVGLMSRVAQPASKKIDQNKLKPEMDEKGNLTTAGFACSQCGQPLFVYKLEQVSEKGKAYTNYFGRCNVAEHEKLILLAQLKPEKDSDEAVTYSLGKFGQRALDFYSIHVTKESTHPVKPLAQIAGNRYASAPVGKALSDACMGTIASFLSKYQDIIIEHQKVVKGNQKRLESLRELAGKENLEYPSVTLPPQPHTKEGVDAYNEVIARVRMWVNLNLWQKLKLSRDDAKPLLRLKGFPSFPLVERQANEVDWWDMVCNVKKLINEKKEDGKVFWQNLAGYKRQEALRPYLSSEEDVRKKGKKFARYQLGDLLLHLEKKHGEDWGKVYDEAWERIDKKVEGLSKHIKLEEERRSEDAQSKAALTDWLRAKASFVIEGLKEADKDEFCRCELKLQKWYGDLRGKPFAIEAENSILDISGFSKQYNCAFIWQKDGVKKLNLYLIINYFKGGKLRFKKIKPEAFEANRFYTVINKKSGEIVPMEVNFNFDDPNLIILPLAFGKRQGREFIWNDLLSLETGSLKLANGRVIEKTLYNRRTRQDEPALFVALTFERREVLDSSNIKPMNLIGVDRGENIPAVIALTDPEGCPLSRFKDSLGNPTHILRIGESYKEKQRTIQAKKEVEQRRAGGYSRKYASKAKNLADDMVRNTARDLLYYAVTQDAMLIFENLSRGFGRQGKRTFMAERQYTRMEDWLTAKLAYNGLPSKTYLSKTLAQYTSKTCSNCGFTITSADYDRVLEKLKKTATGWMTTINGKELKVEGQITYYNRYKRQNVVKDLSVELDRLSEESVNNDISSWTKGRSGEALSLLKKRFSHRPVQEKFVCLNCGFETHADEQAALNIARSWLFLRSQEYKKYQTNKTTGNTDKRAFVETWQSFYRKKLKEVWKPAV

SEQ ID NO: 47221 - protein, 979 aa, synthetic construct
  REGION 1..979: note = engineered CasX variant
QEIKRINKIRRRLVKDSNTKKAGKTGPMKTLLVRVMTPDLRERLENLRKKPENIPQPISNTSRANLNKLLTDYTEMKKAILHVYWEEFQKDPVGLMSRVAQPASKKIDQNKLKPEMDEKGNLTTAGFACSQCGQPLFVYKLEQVSEKGKAYTNYFGRCNVAEHEKLILLAQLKPEKDSDEAVTYSLGKFGQRALDFYSIHVTKESTHPVKPLAQIAGNRYASVPVGKALSDACMGTIASFLSKYQDIIIEHQKVVKGNQKRLESLRELAGKENLEYPSVTLPPQPHTKEGVDAYNEVIARVRMWVNLNLWQKLKLSRDDAKPLLRLKGFPSFPLVERQANEVDWWDMVCNVKKLINEKKEDGKVFWQNLAGYKRQEALRPYLSSEEDVRKKGKKFARYQLGDLLLHLEKKHGEDWGKVYDEAWERIDKKVEGLSKHIKLEEERRSEDAQSKAALTDWLRAKASFVIEGLKEADKDEFCRCELKLQKWYGDLRGKPFAIEAENSILDISGFSKQYNCAFIWQKDGVKKLNLYLIINYFKGGKLRFKKIKPEAFEANRFYTVINKKSGEIVPMEVNFNFDDPNLIILPLAFGKRQGREFIWNDLLSLETGSLKLANGRVIEKTLYNRRTRQDEPALFVALTFERREVLDSSNIKPMNLIGVDRGENIPAVIALTDPEGCPLSRFKDSLGNPTHILRIGESYKEKQRTIQAKKEVEQRRAGGYSRKYASKAKNLADDMVRNTARDLLYYAVTQDAMLIFENLSRGFGRQGKRTFMAERQYTRMEDWLTAKLAYNGLPSKTYLSKTLAQYTSKTCSNCGFTITSADYDRVLEKLKKTATGWMTTINGKELKVEGQITYYNRYKRQNVVKDLSVELDRLSEESVNNDISSWTKGRSGEALSLLKKRFSHRPVQEKFVCLNCGFETHADEQAALNIARSWLFLRSQEYKKYQTNKTTGNTDKRAFVETWQSFYRKKLKEVWKPAV

SEQ ID NO: 47222 - protein, 979 aa, synthetic construct
  REGION 1..979: note = engineered CasX variant
QEIKRINKIRRRLVKDSNTKKAGKTGPMKTLLVRVMTPDLRERLENLRKKPENIPQPISNTSRANLNKLLTDYTEMKKAILHVYWEEFQKDPVGLMSRVAQPASKKIDQNKLKPEMDEKGNLTTAGFACSQCGQPLFVYKLEQVSEKGKAYTNYFGRCNVAEHEKLIKLAQLKPEKDSDEAVTYSLGKFGQRALDFYSIHVTKESTHPVKPLAQIAGNRYASGPVGKALSDACMGTIASFLSKYQDIIIEHQKVVKGNQKRLESLRELAGKENLEYPSVTLPPQPHTKEGVDAYNEVIARVRMWVNLNLWQKLKLSRDDAKPLLRLKGFPSFPLVERQANEVDWWDMVCNVKKLINEKKEDGKVFWQNLAGYKRQEALRPYLSSEEDVRKKGKKFARYQLGDLLLHLEKKHGEDWGKVYDEAWERIDKKVEGLSKHIKLEEERRSEDAQSKAALTDWLRAKASFVIEGLKEADKDEFCRCELKLQKWYGDLRGKPFAIEAENSILDISGFSKQYNCAFIWQKDGVKKLNLYLIINYFKGGKLRFKKIKPEAFEANRFYTVINKKSGEIVPMEVNFNFDDPNLIILPLAFGKRQGREFIWNDLLSLETGSLKLANGRVIEKTLYNRRTRQDEPALFVALTFERREVLDSSNIKPMNLIGVDRGENIPAVIALTDPEGCPLSRFKDSLGNPTHILRIGESYKEKQRTIQAKKEVEQRRAGGYSRKYASKAKNLADDMVRNTARDLLYYAVTQDAMLIFENLSRGFGRQGKRTFMAERQYTRMEDWLTAKLAYNGLPSKTYLSKTLAQYTSKTCSNCGFTITSADYDRVLEKLKKTATGWMTTINGKELKVEGQITYYNRYKRQNVVKDLSVELDRLSEESVNNDISSWTKGRSGEALSLLKKRFSHRPVQEKFVCLNCGFETHADEQAALNIARSWLFLRSQEYKKYQTNKTTGNTDKRAFVETWQSFYRKKLKEVWKPAV

SEQ ID NO: 47223 - protein, 978 aa, synthetic construct
  REGION 1..978: note = engineered CasX variant
QEIKRINKIRRRLVKDSNTKKAGKTGPMKTLLVRVMTPDLRERLENLRKKPENIPQPISNTSRANLNKLLTDYTEMKKAILHVYWEEFQKDPVGLMSRVAQPASKKIDQNKLKPEMDEKGNLTTAGFACSQCGQPLFVYKLEQVSEKGKAYTNYFGRCNVAEHEKLILLAQLKPEKDSDEAVTYSLGKFGQRALDFYSIHVTKESTHPVKPLAQIAGNRYASPVGKALSDACMGTIASFLSKYQDIIIEHQKVVKGNQKRLESLRELAGKENLEYPSVTLPPQPHTKEGVDAYNEVIARVRMWVNLNLWQKLKLSRDDAKPLLRLKGFPSFPLVERQANEVDWWDMVCNVKKLINEKKEDGKVFWQNLAGYKRQEALRPYLSSEEDVRKKGKKFARYQLGDLLLHLEKKHGEDWGKVYDEAWERIDKKVEGLSKHIKLEEERRSEDAQSKAALTDWLRAKASFVIEGLKEADKDEFCRCELKLQKWYGDLRGKPFAIEAENSILDISGFSKQYNCAFIWQKDGVKKLNLYLIINYFKGGKLRFKKIKPEAFEANRFYTVINKKSGEIVPMEVNFNFDDPNLIILPLAFGKRQGREFIWNDLLSLETGSLKLANGRVIEKTLYNRRTRQDEPALFVALTFERREVLDSSNIKPMNLIGVDRGENIPAVIALTDPEGCPLSRFKDSLGNPTHILRIGESYKEKQRTIQAKKEVEQRRAGGYSRKYASKAKNLADDMVRNTARDLLYYAVTQDAMLIFENLSRGFGRQGKRTFMAERQYTRMEDWLTAKLAYNGLPSKTYLSKTLAQYTSKTCSNCGFTITSADYDRVLEKLKKTATGWMTTINGKELKVEGQITYYNRYKRQNVVKDLSVELDRLSEESVNNDISSWTKGRSGEALSLLKKRFSHRPVQEKFVCLNCGFETHADEQAALNIARSWLFLRSQEYKKYQTNKTTGNTDKRAFVETWQSFYRKKLKEVWKPAV

SEQ ID NO: 47224 - protein, 979 aa, synthetic construct
  REGION 1..979: note = engineered CasX variant
QEIKRINKIRRRLVKDSNTKKAGKTGPMKTLLVRVMTPDLRERLENLRKKPENIPQPISNTSRANLNKLLTDYTEMKKAILHVYWEEFQKDPVGLMSRVAQPASKKIDQNKLKPEMDEKGNLTTAGFACSQCGQPLFVYKLEQVSEKGKAYTNYFGRCNVAEHEKLIQLAQLKPEKDSDEAVTYSLGKFGQRALDFYSIHVTKESTHPVKPLAQIAGNRYASYPVGKALSDACMGTIASFLSKYQDIIIEHQKVVKGNQKRLESLRELAGKENLEYPSVTLPPQPHTKEGVDAYNEVIARVRMWVNLNLWQKLKLSRDDAKPLLRLKGFPSFPLVERQANEVDWWDMVCNVKKLINEKKEDGKVFWQNLAGYKRQEALRPYLSSEEDVRKKGKKFARYQLGDLLLHLEKKHGEDWGKVYDEAWERIDKKVEGLSKHIKLEEERRSEDAQSKAALTDWLRAKASFVIEGLKEADKDEFCRCELKLQKWYGDLRGKPFAIEAENSILDISGFSKQYNCAFIWQKDGVKKLNLYLIINYFKGGKLRFKKIKPEAFEANRFYTVINKKSGEIVPMEVNFNFDDPNLIILPLAFGKRQGREFIWNDLLSLETGSLKLANGRVIEKTLYNRRTRQDEPALFVALTFERREVLDSSNIKPMNLIGVDRGENIPAVIALTDPEGCPLSRFKDSLGNPTHILRIGESYKEKQRTIQAKKEVEQRRAGGYSRKYASKAKNLADDMVRNTARDLLYYAVTQDAMLIFENLSRGFGRQGKRTFMAERQYTRMEDWLTAKLAYEGLPSKTYLSKTLAQYTSKTCSNCGFTITSADYDRVLEKLKKTATGWMTTINGKELKVEGQITYYNRYKRQNVVKDLSVELDRLSEESVNNDISSWTKGRSGEALSLLKKRFSHRPVQEKFVCLNCGFETHADEQAALNIARSWLFLRSQEYKKYQTNKTTGNTDKRAFVETWQSFYRKKLKEVWKPAV

SEQ ID NO: 47225 - protein, 979 aa, synthetic construct
  REGION 1..979: note = engineered CasX variant
QEIKRINKIRRRLVKDSNTKKAGKTGPMKTLLVRVMTPDLRERLENLRKKPENIPQPISNTSRANLNKLLTDYTEMKKAILHVYWEEFQKDPVGLMSRVAQPASKKIDQNKLKPEMDEKGNLTTAGFACSQCGQPLFVYKLEQVSEKGKAYTNYFGRCNVAEHEKLIQLAQLKPEKDSDEAVTYSLGKFGQRALDFYSIHVTKESTHPVKPLAQIAGNRYASHPVGKALSDACMGTIASFLSKYQDIIIEHQKVVKGNQKRLESLRELAGKENLEYPSVTLPPQPHTKEGVDAYNEVIARVRMWVNLNLWQKLKLSRDDAKPLLRLKGFPSFPLVERQANEVDWWDMVCNVKKLINEKKEDGKVFWQNLAGYKRQEALRPYLSSEEDVRKKGKKFARYQLGDLLLHLEKKHGEDWGKVYDEAWERIDKKVEGLSKHIKLEEERRSEDAQSKAALTDWLRAKASFVIEGLKEADKDEFCRCELKLQKWYGDLRGKPFAIEAENSILDISGFSKQYNCAFIWQKDGVKKLNLYLIINYFKGGKLRFKKIKPEAFEANRFYTVINKKSGEIVPMEVNFNFDDPNLIILPLAFGKRQGREFIWNDLLSLETGSLKLANGRVIEKTLYNRRTRQDEPALFVALTFERREVLDSSNIKPMNLIGVDRGENIPAVIALTDPEGCPLSRFKDSLGNPTHILRIGESYKEKQRTIQAKKEVEQRRAGGYSRKYASKAKNLADDMVRNTARDLLYYAVTQDAMLIFENLSRGFGRQGKRTFMAERQYTRMEDWLTAKLAYEGLPSKTYLSKTLAQYTSKTCSNCGFTITSADYDRVLEKLKKTATGWMTTINGKELKVEGQITYYNRYKRQNVVKDLSVELDRLSEESVNNDISSWTKGRSGEALSLLKKRFSHRPVQEKFVCLNCGFETHADEQAALNIARSWLFLRSQEYKKYQTNKTTGNTDKRAFVETWQSFYRKKLKEVWKPAV

SEQ ID NO: 47226 - protein, 979 aa, synthetic construct
  REGION 1..979: note = engineered CasX variant
QEIKRINKIRRRLVKDSNTKKAGKTGPMKTLLVRVMTPDLRERLENLRKKPENIPQPISNTSRANLNKLLTDYTEMKKAILHVYWEEFQKDPVGLMSRVAQPASKKIDQNKLKPEMDEKGNLTTAGFACSQCGQPLFVYKLEQVSEKGKAYTNYFGRCNVAEHEKLIQLAQLKPEKDSDEAVTYSLGKFGQRALDFYSIHVTKESTHPVKPLAQIAGNRYASSPVGKALSDACMGTIASFLSKYQDIIIEHQKVVKGNQKRLESLRELAGKENLEYPSVTLPPQPHTKEGVDAYNEVIARVRMWVNLNLWQKLKLSRDDAKPLLRLKGFPSFPLVERQANEVDWWDMVCNVKKLINEKKEDGKVFWQNLAGYKRQEALRPYLSSEEDVRKKGKKFARYQLGDLLLHLEKKHGEDWGKVYDEAWERIDKKVEGLSKHIKLEEERRSEDAQSKAALTDWLRAKASFVIEGLKEADKDEFCRCELKLQKWYGDLRGKPFAIEAENSILDISGFSKQYNCAFIWQKDGVKKLNLYLIINYFKGGKLRFKKIKPEAFEANRFYTVINKKSGEIVPMEVNFNFDDPNLIILPLAFGKRQGREFIWNDLLSLETGSLKLANGRVIEKTLYNRRTRQDEPALFVALTFERREVLDSSNIKPMNLIGVDRGENIPAVIALTDPEGCPLSRFKDSLGNPTHILRIGESYKEKQRTIQAKKEVEQRRAGGYSRKYASKAKNLADDMVRNTARDLLYYAVTQDAMLIFENLSRGFGRQGKRTFMAERQYTRMEDWLTAKLAYEGLPSKTYLSKTLAQYTSKTCSNCGFTITSADYDRVLEKLKKTATGWMTTINGKELKVEGQITYYNRYKRQNVVKDLSVELDRLSEESVNNDISSWTKGRSGEALSLLKKRFSHRPVQEKFVCLNCGFETHADEQAALNIARSWLFLRSQEYKKYQTNKTTGNTDKRAFVETWQSFYRKKLKEVWKPAV

SEQ ID NO: 47227 - protein, 979 aa, synthetic construct
  REGION 1..979: note = engineered CasX variant
QEIKRINKIRRRLVKDSNTKKAGKTGPMKTLLVRVMTPDLRERLENLRKKPENIPQPISNTSRANLNKLLTDYTEMKKAILHVYWEEFQKDPVGLMSRVAQPASKKIDQNKLKPEMDEKGNLTTAGFACSQCGQPLFVYKLEQVSEKGKAYTNYFGRCNVAEHEKLIQLAQLKPEKDSDEAVTYSLGKFGQRALDFYSIHVTKESTHPVKPLAQIAGNRYASTPVGKALSDACMGTIASFLSKYQDIIIEHQKVVKGNQKRLESLRELAGKENLEYPSVTLPPQPHTKEGVDAYNEVIARVRMWVNLNLWQKLKLSRDDAKPLLRLKGFPSFPLVERQANEVDWWDMVCNVKKLINEKKEDGKVFWQNLAGYKRQEALRPYLSSEEDVRKKGKKFARYQLGDLLLHLEKKHGEDWGKVYDEAWERIDKKVEGLSKHIKLEEERRSEDAQSKAALTDWLRAKASFVIEGLKEADKDEFCRCELKLQKWYGDLRGKPFAIEAENSILDISGFSKQYNCAFIWQKDGVKKLNLYLIINYFKGGKLRFKKIKPEAFEANRFYTVINKKSGEIVPMEVNFNFDDPNLIILPLAFGKRQGREFIWNDLLSLETGSLKLANGRVIEKTLYNRRTRQDEPALFVALTFERREVLDSSNIKPMNLIGVDRGENIPAVIALTDPEGCPLSRFKDSLGNPTHILRIGESYKEKQRTIQAKKEVEQRRAGGYSRKYASKAKNLADDMVRNTARDLLYYAVTQDAMLIFENLSRGFGRQGKRTFMAERQYTRMEDWLTAKLAYEGLPSKTYLSKTLAQYTSKTCSNCGFTITSADYDRVLEKLKKTATGWMTTINGKELKVEGQITYYNRYKRQNVVKDLSVELDRLSEESVNNDISSWTKGRSGEALSLLKKRFSHRPVQEKFVCLNCGFETHADEQAALNIARSWLFLRSQEYKKYQTNKTTGNTDKRAFVETWQSFYRKKLKEVWKPAV

SEQ ID NO: 47228 - protein, 979 aa, synthetic construct
  REGION 1..979: note = engineered CasX variant
QEIKRINKIRRRLVKDSNTKKAGKTGPMKTLLVRVMTPDLRERLENLRKKPENIPQPISNTSRANLNKLLTDYTEMKKAILHVYWEEFQKDPVGLMSRVAQPASKKIDQNKLKPEMDEKGNLTTAGFACSQCGQPLFVYKLEQVSEKGKAYTNYFGRCNVAEHEKLIQLAQLKPEKDSDEAVTYSLGKFGQRALDFYSIHVTKESTHPVKPLAQIAGNRYASAPVGKALSDACMGTIASFLSKYQDIIIEHQKVVKGNQKRLESLRELAGKENLEYPSVTLPPQPHTKEGVDAYNEVIARVRMWVNLNLWQKLKLSRDDAKPLLRLKGFPSFPLVERQANEVDWWDMVCNVKKLINEKKEDGKVFWQNLAGYKRQEALRPYLSSEEDVRKKGKKFARYQLGDLLLHLEKKHGEDWGKVYDEAWERIDKKVEGLSKHIKLEEERRSEDAQSKAALTDWLRAKASFVIEGLKEADKDEFCRCELKLQKWYGDLRGKPFAIEAENSILDISGFSKQYNCAFIWQKDGVKKLNLYLIINYFKGGKLRFKKIKPEAFEANRFYTVINKKSGEIVPMEVNFNFDDPNLIILPLAFGKRQGREFIWNDLLSLETGSLKLANGRVIEKTLYNRRTRQDEPALFVALTFERREVLDSSNIKPMNLIGVDRGENIPAVIALTDPEGCPLSRFKDSLGNPTHILRIGESYKEKQRTIQAKKEVEQRRAGGYSRKYASKAKNLADDMVRNTARDLLYYAVTQDAMLIFENLSRGFGRQGKRTFMAERQYTRMEDWLTAKLAYEGLPSKTYLSKTLAQYTSKTCSNCGFTITSADYDRVLEKLKKTATGWMTTINGKELKVEGQITYYNRYKRQNVVKDLSVELDRLSEESVNNDISSWTKGRSGEALSLLKKRFSHRPVQEKFVCLNCGFETHADEQAALNIARSWLFLRSQEYKKYQTNKTTGNTDKRAFVETWQSFYRKKLKEVWKPAV

SEQ ID NO: 47229 - protein, 979 aa, synthetic construct
  REGION 1..979: note = engineered CasX variant
QEIKRINKIRRRLVKDSNTKKAGKTGPMKTLLVRVMTPDLRERLENLRKKPENIPQPISNTSRANLNKLLTDYTEMKKAILHVYWEEFQKDPVGLMSRVAQPASKKIDQNKLKPEMDEKGNLTTAGFACSQCGQPLFVYKLEQVSEKGKAYTNYFGRCNVAEHEKLIQLAQLKPEKDSDEAVTYSLGKFGQRALDFYSIHVTKESTHPVKPLAQIAGNRYASVPVGKALSDACMGTIASFLSKYQDIIIEHQKVVKGNQKRLESLRELAGKENLEYPSVTLPPQPHTKEGVDAYNEVIARVRMWVNLNLWQKLKLSRDDAKPLLRLKGFPSFPLVERQANEVDWWDMVCNVKKLINEKKEDGKVFWQNLAGYKRQEALRPYLSSEEDVRKKGKKFARYQLGDLLLHLEKKHGEDWGKVYDEAWERIDKKVEGLSKHIKLEEERRSEDAQSKAALTDWLRAKASFVIEGLKEADKDEFCRCELKLQKWYGDLRGKPFAIEAENSILDISGFSKQYNCAFIWQKDGVKKLNLYLIINYFKGGKLRFKKIKPEAFEANRFYTVINKKSGEIVPMEVNFNFDDPNLIILPLAFGKRQGREFIWNDLLSLETGSLKLANGRVIEKTLYNRRTRQDEPALFVALTFERREVLDSSNIKPMNLIGVDRGENIPAVIALTDPEGCPLSRFKDSLGNPTHILRIGESYKEKQRTIQAKKEVEQRRAGGYSRKYASKAKNLADDMVRNTARDLLYYAVTQDAMLIFENLSRGFGRQGKRTFMAERQYTRMEDWLTAKLAYEGLPSKTYLSKTLAQYTSKTCSNCGFTITSADYDRVLEKLKKTATGWMTTINGKELKVEGQITYYNRYKRQNVVKDLSVELDRLSEESVNNDISSWTKGRSGEALSLLKKRFSHRPVQEKFVCLNCGFETHADEQAALNIARSWLFLRSQEYKKYQTNKTTGNTDKRAFVETWQSFYRKKLKEVWKPAV

SEQ ID NO: 47230 - protein, 980 aa, synthetic construct
  REGION 1..980: note = engineered CasX variant
QEIKRINKIRRRLVKDSNTKKAGKTGPMKTLLVRVMTPDLRERLENLRKKPENIPQPISNTSRANLNKLLTDYTEMKKAILHVYWEEFQKDPVGLMSRVAQPASKKIDQNKLKPEMDEKGNLTTAGFACSQCGQPLFVYKLEQVSEKGKAYTNYFGRCNVAEHEKLIQKLAQLKPEKDSDEAVTYSLGKFGQRALDFYSIHVTKESTHPVKPLAQIAGNRYASGPVGKALSDACMGTIASFLSKYQDIIIEHQKVVKGNQKRLESLRELAGKENLEYPSVTLPPQPHTKEGVDAYNEVIARVRMWVNLNLWQKLKLSRDDAKPLLRLKGFPSFPLVERQANEVDWWDMVCNVKKLINEKKEDGKVFWQNLAGYKRQEALRPYLSSEEDVRKKGKKFARYQLGDLLLHLEKKHGEDWGKVYDEAWERIDKKVEGLSKHIKLEEERRSEDAQSKAALTDWLRAKASFVIEGLKEADKDEFCRCELKLQKWYGDLRGKPFAIEAENSILDISGFSKQYNCAFIWQKDGVKKLNLYLIINYFKGGKLRFKKIKPEAFEANRFYTVINKKSGEIVPMEVNFNFDDPNLIILPLAFGKRQGREFIWNDLLSLETGSLKLANGRVIEKTLYNRRTRQDEPALFVALTFERREVLDSSNIKPMNLIGVDRGENIPAVIALTDPEGCPLSRFKDSLGNPTHILRIGESYKEKQRTIQAKKEVEQRRAGGYSRKYASKAKNLADDMVRNTARDLLYYAVTQDAMLIFENLSRGFGRQGKRTFMAERQYTRMEDWLTAKLAYEGLPSKTYLSKTLAQYTSKTCSNCGFTITSADYDRVLEKLKKTATGWMTTINGKELKVEGQITYYNRYKRQNVVKDLSVELDRLSEESVNNDISSWTKGRSGEALSLLKKRFSHRPVQEKFVCLNCGFETHADEQAALNIARSWLFLRSQEYKKYQTNKTTGNTDKRAFVETWQSFYRKKLKEVWKPAV

SEQ ID NO: 47231 - protein, 978 aa, synthetic construct
  REGION 1..978: note = engineered CasX variant
QEIKRINKIRRRLVKDSNTKKAGKTGPMKTLLVRVMTPDLRERLENLRKKPENIPQPISNTSRANLNKLLTDYTEMKKAILHVYWEEFQKDPVGLMSRVAQPASKKIDQNKLKPEMDEKGNLTTAGFACSQCGQPLFVYKLEQVSEKGKAYTNYFGRCNVAEHEKLIQLAQLKPEKDSDEAVTYSLGKFGQRALDFYSIHVTKESTHPVKPLAQIAGNRYASPVGKALSDACMGTIASFLSKYQDIIIEHQKVVKGNQKRLESLRELAGKENLEYPSVTLPPQPHTKEGVDAYNEVIARVRMWVNLNLWQKLKLSRDDAKPLLRLKGFPSFPLVERQANEVDWWDMVCNVKKLINEKKEDGKVFWQNLAGYKRQEALRPYLSSEEDVRKKGKKFARYQLGDLLLHLEKKHGEDWGKVYDEAWERIDKKVEGLSKHIKLEEERRSEDAQSKAALTDWLRAKASFVIEGLKEADKDEFCRCELKLQKWYGDLRGKPFAIEAENSILDISGFSKQYNCAFIWQKDGVKKLNLYLIINYFKGGKLRFKKIKPEAFEANRFYTVINKKSGEIVPMEVNFNFDDPNLIILPLAFGKRQGREFIWNDLLSLETGSLKLANGRVIEKTLYNRRTRQDEPALFVALTFERREVLDSSNIKPMNLIGVDRGENIPAVIALTDPEGCPLSRFKDSLGNPTHILRIGESYKEKQRTIQAKKEVEQRRAGGYSRKYASKAKNLADDMVRNTARDLLYYAVTQDAMLIFENLSRGFGRQGKRTFMAERQYTRMEDWLTAKLAYEGLPSKTYLSKTLAQYTSKTCSNCGFTITSADYDRVLEKLKKTATGWMTTINGKELKVEGQITYYNRYKRQNVVKDLSVELDRLSEESVNNDISSWTKGRSGEALSLLKKRFSHRPVQEKFVCLNCGFETHADEQAALNIARSWLFLRSQEYKKYQTNKTTGNTDKRAFVETWQSFYRKKLKEVWKPAV

SEQ ID NO: 47232 - protein, 979 aa, synthetic construct
  REGION 1..979: note = engineered CasX variant
QEIKRINKIRRRLVKDSNTKKAGKTGPMKTLLVRVMTPDLRERLENLRKKPENIPQPISNTSRANLNKLLTDYTEMKKAILHVYWEEFQKDPVGLMSRVAQPASKKIDQNKLKPEMDEKGNLTTAGFACSQCGQPLFVYKLEQVSEKGKAYTNYFGRCNVAEHEKLILLAQLKPEKDSDEAVTYSLGKFGQRALDFYSIHVTKESTHPVKPLAQIAGNRYASYPVGKALSDACMGTIASFLSKYQDIIIEHQKVVKGNQKRLESLRELAGKENLEYPSVTLPPQPHTKEGVDAYNEVIARVRMWVNLNLWQKLKLSRDDAKPLLRLKGFPSFPLVERQANEVDWWDMVCNVKKLINEKKEDGKVFWQNLAIYKRQEALRPYLSSEEDVRKKGKKFARYQLGDLLLHLEKKHGEDWGKVYDEAWERIDKKVEGLSKHIKLEEERRSEDAQSKAALTDWLRAKASFVIEGLKEADKDEFCRCELKLQKWYGDLRGKPFAIEAENSILDISGFSKQYNCAFIWQKDGVKKLNLYLIINYFKGGKLRFKKIKPEAFEANRFYTVINKKSGEIVPMEVNFNFDDPNLIILPLAFGKRQGREFIWNDLLSLETGSLKLANGRVIEKTLYNRRTRQDEPALFVALTFERREVLDSSNIKPMNLIGVDRGENIPAVIALTDPEGCPLSRFKDSLGNPTHILRIGESYKEKQRTIQAKKEVEQRRAGGYSRKYASKAKNLADDMVRNTARDLLYYAVTQDAMLIFENLSRGFGRQGKRTFMAERQYTRMEDWLTAKLAYEGLPSKTYLSKTLAQYTSKTCSNCGFTITSADYDRVLEKLKKTATGWMTTINGKELKVEGQITYYNRYKRQNVVKDLSVELDRLSEESVNNDISSWTKGRSGEALSLLKKRFSHRPVQEKFVCLNCGFETHADEQAALNIARSWLFLRSQEYKKYQTNKTTGNTDKRAFVETWQSFYRKKLKEVWKPAV

SEQ ID NO: 47233 - protein, 979 aa, synthetic construct
  REGION 1..979: note = engineered CasX variant
QEIKRINKIRRRLVKDSNTKKAGKTGPMKTLLVRVMTPDLRERLENLRKKPENIPQPISNTSRANLNKLLTDYTEMKKAILHVYWEEFQKDPVGLMSRVAQPASKKIDQNKLKPEMDEKGNLTTAGFACSQCGQPLFVYKLEQVSEKGKAYTNYFGRCNVAEHEKLILLAQLKPEKDSDEAVTYSLGKFGQRALDFYSIHVTKESTHPVKPLAQIAGNRYASHPVGKALSDACMGTIASFLSKYQDIIIEHQKVVKGNQKRLESLRELAGKENLEYPSVTLPPQPHTKEGVDAYNEVIARVRMWVNLNLWQKLKLSRDDAKPLLRLKGFPSFPLVERQANEVDWWDMVCNVKKLINEKKEDGKVFWQNLAIYKRQEALRPYLSSEEDVRKKGKKFARYQLGDLLLHLEKKHGEDWGKVYDEAWERIDKKVEGLSKHIKLEEERRSEDAQSKAALTDWLRAKASFVIEGLKEADKDEFCRCELKLQKWYGDLRGKPFAIEAENSILDISGFSKQYNCAFIWQKDGVKKLNLYLIINYFKGGKLRFKKIKPEAFEANRFYTVINKKSGEIVPMEVNFNFDDPNLIILPLAFGKRQGREFIWNDLLSLETGSLKLANGRVIEKTLYNRRTRQDEPALFVALTFERREVLDSSNIKPMNLIGVDRGENIPAVIALTDPEGCPLSRFKDSLGNPTHILRIGESYKEKQRTIQAKKEVEQRRAGGYSRKYASKAKNLADDMVRNTARDLLYYAVTQDAMLIFENLSRGFGRQGKRTFMAERQYTRMEDWLTAKLAYEGLPSKTYLSKTLAQYTSKTCSNCGFTITSADYDRVLEKLKKTATGWMTTINGKELKVEGQITYYNRYKRQNVVKDLSVELDRLSEESVNNDISSWTKGRSGEALSLLKKRFSHRPVQEKFVCLNCGFETHADEQAALNIARSWLFLRSQEYKKYQTNKTTGNTDKRAFVETWQSFYRKKLKEVWKPAV

SEQ ID NO: 47234 - protein, 979 aa, synthetic construct
  REGION 1..979: note = engineered CasX variant
QEIKRINKIRRRLVKDSNTKKAGKTGPMKTLLVRVMTPDLRERLENLRKKPENIPQPISNTSRANLNKLLTDYTEMKKAILHVYWEEFQKDPVGLMSRVAQPASKKIDQNKLKPEMDEKGNLTTAGFACSQCGQPLFVYKLEQVSEKGKAYTNYFGRCNVAEHEKLILLAQLKPEKDSDEAVTYSLGKFGQRALDFYSIHVTKESTHPVKPLAQIAGNRYASSPVGKALSDACMGTIASFLSKYQDIIIEHQKVVKGNQKRLESLRELAGKENLEYPSVTLPPQPHTKEGVDAYNEVIARVRMWVNLNLWQKLKLSRDDAKPLLRLKGFPSFPLVERQANEVDWWDMVCNVKKLINEKKEDGKVFWQNLAIYKRQEALRPYLSSEEDVRKKGKKFARYQLGDLLLHLEKKHGEDWGKVYDEAWERIDKKVEGLSKHIKLEEERRSEDAQSKAALTDWLRAKASFVIEGLKEADKDEFCRCELKLQKWYGDLRGKPFAIEAENSILDISGFSKQYNCAFIWQKDGVKKLNLYLIINYFKGGKLRFKKIKPEAFEANRFYTVINKKSGEIVPMEVNFNFDDPNLIILPLAFGKRQGREFIWNDLLSLETGSLKLANGRVIEKTLYNRRTRQDEPALFVALTFERREVLDSSNIKPMNLIGVDRGENIPAVIALTDPEGCPLSRFKDSLGNPTHILRIGESYKEKQRTIQAKKEVEQRRAGGYSRKYASKAKNLADDMVRNTARDLLYYAVTQDAMLIFENLSRGFGRQGKRTFMAERQYTRMEDWLTAKLAYEGLPSKTYLSKTLAQYTSKTCSNCGFTITSADYDRVLEKLKKTATGWMTTINGKELKVEGQITYYNRYKRQNVVKDLSVELDRLSEESVNNDISSWTKGRSGEALSLLKKRFSHRPVQEKFVCLNCGFETHADEQAALNIARSWLFLRSQEYKKYQTNKTTGNTDKRAFVETWQSFYRKKLKEVWKPAV

SEQ ID NO: 47235 - protein, 979 aa, synthetic construct
  REGION 1..979: note = engineered CasX variant
QEIKRINKIRRRLVKDSNTKKAGKTGPMKTLLVRVMTPDLRERLENLRKKPENIPQPISNTSRANLNKLLTDYTEMKKAILHVYWEEFQKDPVGLMSRVAQPASKKIDQNKLKPEMDEKGNLTTAGFACSQCGQPLFVYKLEQVSEKGKAYTNYFGRCNVAEHEKLILLAQLKPEKDSDEAVTYSLGKFGQRALDFYSIHVTKESTHPVKPLAQIAGNRYASTPVGKALSDACMGTIASFLSKYQDIIIEHQKVVKGNQKRLESLRELAGKENLEYPSVTLPPQPHTKEGVDAYNEVIARVRMWVNLNLWQKLKLSRDDAKPLLRLKGFPSFPLVERQANEVDWWDMVCNVKKLINEKKEDGKVFWQNLAIYKRQEALRPYLSSEEDVRKKGKKFARYQLGDLLLHLEKKHGEDWGKVYDEAWERIDKKVEGLSKHIKLEEERRSEDAQSKAALTDWLRAKASFVIEGLKEADKDEFCRCELKLQKWYGDLRGKPFAIEAENSILDISGFSKQYNCAFIWQKDGVKKLNLYLIINYFKGGKLRFKKIKPEAFEANRFYTVINKKSGEIVPMEVNFNFDDPNLIILPLAFGKRQGREFIWNDLLSLETGSLKLANGRVIEKTLYNRRTRQDEPALFVALTFERREVLDSSNIKPMNLIGVDRGENIPAVIALTDPEGCPLSRFKDSLGNPTHILRIGESYKEKQRTIQAKKEVEQRRAGGYSRKYASKAKNLADDMVRNTARDLLYYAVTQDAMLIFENLSRGFGRQGKRTFMAERQYTRMEDWLTAKLAYEGLPSKTYLSKTLAQYTSKTCSNCGFTITSADYDRVLEKLKKTATGWMTTINGKELKVEGQITYYNRYKRQNVVKDLSVELDRLSEESVNNDISSWTKGRSGEALSLLKKRFSHRPVQEKFVCLNCGFETHADEQAALNIARSWLFLRSQEYKKYQTNKTTGNTDKRAFVETWQSFYRKKLKEVWKPAV

SEQ ID NO: 47236 - protein, 979 aa, synthetic construct
  REGION 1..979: note = engineered CasX variant
QEIKRINKIRRRLVKDSNTKKAGKTGPMKTLLVRVMTPDLRERLENLRKKPENIPQPISNTSRANLNKLLTDYTEMKKAILHVYWEEFQKDPVGLMSRVAQPASKKIDQNKLKPEMDEKGNLTTAGFACSQCGQPLFVYKLEQVSEKGKAYTNYFGRCNVAEHEKLILLAQLKPEKDSDEAVTYSLGKFGQRALDFYSIHVTKESTHPVKPLAQIAGNRYASAPVGKALSDACMGTIASFLSKYQDIIIEHQKVVKGNQKRLESLRELAGKENLEYPSVTLPPQPHTKEGVDAYNEVIARVRMWVNLNLWQKLKLSRDDAKPLLRLKGFPSFPLVERQANEVDWWDMVCNVKKLINEKKEDGKVFWQNLAIYKRQEALRPYLSSEEDVRKKGKKFARYQLGDLLLHLEKKHGEDWGKVYDEAWERIDKKVEGLSKHIKLEEERRSEDAQSKAALTDWLRAKASFVIEGLKEADKDEFCRCELKLQKWYGDLRGKPFAIEAENSILDISGFSKQYNCAFIWQKDGVKKLNLYLIINYFKGGKLRFKKIKPEAFEANRFYTVINKKSGEIVPMEVNFNFDDPNLIILPLAFGKRQGREFIWNDLLSLETGSLKLANGRVIEKTLYNRRTRQDEPALFVALTFERREVLDSSNIKPMNLIGVDRGENIPAVIALTDPEGCPLSRFKDSLGNPTHILRIGESYKEKQRTIQAKKEVEQRRAGGYSRKYASKAKNLADDMVRNTARDLLYYAVTQDAMLIFENLSRGFGRQGKRTFMAERQYTRMEDWLTAKLAYEGLPSKTYLSKTLAQYTSKTCSNCGFTITSADYDRVLEKLKKTATGWMTTINGKELKVEGQITYYNRYKRQNVVKDLSVELDRLSEESVNNDISSWTKGRSGEALSLLKKRFSHRPVQEKFVCLNCGFETHADEQAALNIARSWLFLRSQEYKKYQTNKTTGNTDKRAFVETWQSFYRKKLKEVWKPAV

SEQ ID NO: 47237 - protein, 979 aa, synthetic construct
  REGION 1..979: note = engineered CasX variant
QEIKRINKIRRRLVKDSNTKKAGKTGPMKTLLVRVMTPDLRERLENLRKKPENIPQPISNTSRANLNKLLTDYTEMKKAILHVYWEEFQKDPVGLMSRVAQPASKKIDQNKLKPEMDEKGNLTTAGFACSQCGQPLFVYKLEQVSEKGKAYTNYFGRCNVAEHEKLILLAQLKPEKDSDEAVTYSLGKFGQRALDFYSIHVTKESTHPVKPLAQIAGNRYASVPVGKALSDACMGTIASFLSKYQDIIIEHQKVVKGNQKRLESLRELAGKENLEYPSVTLPPQPHTKEGVDAYNEVIARVRMWVNLNLWQKLKLSRDDAKPLLRLKGFPSFPLVERQANEVDWWDMVCNVKKLINEKKEDGKVFWQNLAIYKRQEALRPYLSSEEDVRKKGKKFARYQLGDLLLHLEKKHGEDWGKVYDEAWERIDKKVEGLSKHIKLEEERRSEDAQSKAALTDWLRAKASFVIEGLKEADKDEFCRCELKLQKWYGDLRGKPFAIEAENSILDISGFSKQYNCAFIWQKDGVKKLNLYLIINYFKGGKLRFKKIKPEAFEANRFYTVINKKSGEIVPMEVNFNFDDPNLIILPLAFGKRQGREFIWNDLLSLETGSLKLANGRVIEKTLYNRRTRQDEPALFVALTFERREVLDSSNIKPMNLIGVDRGENIPAVIALTDPEGCPLSRFKDSLGNPTHILRIGESYKEKQRTIQAKKEVEQRRAGGYSRKYASKAKNLADDMVRNTARDLLYYAVTQDAMLIFENLSRGFGRQGKRTFMAERQYTRMEDWLTAKLAYEGLPSKTYLSKTLAQYTSKTCSNCGFTITSADYDRVLEKLKKTATGWMTTINGKELKVEGQITYYNRYKRQNVVKDLSVELDRLSEESVNNDISSWTKGRSGEALSLLKKRFSHRPVQEKFVCLNCGFETHADEQAALNIARSWLFLRSQEYKKYQTNKTTGNTDKRAFVETWQSFYRKKLKEVWKPAV

SEQ ID NO: 47238 - protein, 979 aa, synthetic construct
  REGION 1..979: note = engineered CasX variant
QEIKRINKIRRRLVKDSNTKKAGKTGPMKTLLVRVMTPDLRERLENLRKKPENIPQPISNTSRANLNKLLTDYTEMKKAILHVYWEEFQKDPVGLMSRVAQPASKKIDQNKLKPEMDEKGNLTTAGFACSQCGQPLFVYKLEQVSEKGKAYTNYFGRCNVAEHEKLIKLAQLKPEKDSDEAVTYSLGKFGQRALDFYSIHVTKESTHPVKPLAQIAGNRYASGPVGKALSDACMGTIASFLSKYQDIIIEHQKVVKGNQKRLESLRELAGKENLEYPSVTLPPQPHTKEGVDAYNEVIARVRMWVNLNLWQKLKLSRDDAKPLLRLKGFPSFPLVERQANEVDWWDMVCNVKKLINEKKEDGKVFWQNLAIYKRQEALRPYLSSEEDVRKKGKKFARYQLGDLLLHLEKKHGEDWGKVYDEAWERIDKKVEGLSKHIKLEEERRSEDAQSKAALTDWLRAKASFVIEGLKEADKDEFCRCELKLQKWYGDLRGKPFAIEAENSILDISGFSKQYNCAFIWQKDGVKKLNLYLIINYFKGGKLRFKKIKPEAFEANRFYTVINKKSGEIVPMEVNFNFDDPNLIILPLAFGKRQGREFIWNDLLSLETGSLKLANGRVIEKTLYNRRTRQDEPALFVALTFERREVLDSSNIKPMNLIGVDRGENIPAVIALTDPEGCPLSRFKDSLGNPTHILRIGESYKEKQRTIQAKKEVEQRRAGGYSRKYASKAKNLADDMVRNTARDLLYYAVTQDAMLIFENLSRGFGRQGKRTFMAERQYTRMEDWLTAKLAYEGLPSKTYLSKTLAQYTSKTCSNCGFTITSADYDRVLEKLKKTATGWMTTINGKELKVEGQITYYNRYKRQNVVKDLSVELDRLSEESVNNDISSWTKGRSGEALSLLKKRFSHRPVQEKFVCLNCGFETHADEQAALNIARSWLFLRSQEYKKYQTNKTTGNTDKRAFVETWQSFYRKKLKEVWKPAV

SEQ ID NO: 47239 - protein, 978 aa, synthetic construct
  REGION 1..978: note = engineered CasX variant
QEIKRINKIRRRLVKDSNTKKAGKTGPMKTLLVRVMTPDLRERLENLRKKPENIPQPISNTSRANLNKLLTDYTEMKKAILHVYWEEFQKDPVGLMSRVAQPASKKIDQNKLKPEMDEKGNLTTAGFACSQCGQPLFVYKLEQVSEKGKAYTNYFGRCNVAEHEKLILLAQLKPEKDSDEAVTYSLGKFGQRALDFYSIHVTKESTHPVKPLAQIAGNRYASPVGKALSDACMGTIASFLSKYQDIIIEHQKVVKGNQKRLESLRELAGKENLEYPSVTLPPQPHTKEGVDAYNEVIARVRMWVNLNLWQKLKLSRDDAKPLLRLKGFPSFPLVERQANEVDWWDMVCNVKKLINEKKEDGKVFWQNLAIYKRQEALRPYLSSEEDVRKKGKKFARYQLGDLLLHLEKKHGEDWGKVYDEAWERIDKKVEGLSKHIKLEEERRSEDAQSKAALTDWLRAKASFVIEGLKEADKDEFCRCELKLQKWYGDLRGKPFAIEAENSILDISGFSKQYNCAFIWQKDGVKKLNLYLIINYFKGGKLRFKKIKPEAFEANRFYTVINKKSGEIVPMEVNFNFDDPNLIILPLAFGKRQGREFIWNDLLSLETGSLKLANGRVIEKTLYNRRTRQDEPALFVALTFERREVLDSSNIKPMNLIGVDRGENIPAVIALTDPEGCPLSRFKDSLGNPTHILRIGESYKEKQRTIQAKKEVEQRRAGGYSRKYASKAKNLADDMVRNTARDLLYYAVTQDAMLIFENLSRGFGRQGKRTFMAERQYTRMEDWLTAKLAYEGLPSKTYLSKTLAQYTSKTCSNCGFTITSADYDRVLEKLKKTATGWMTTINGKELKVEGQITYYNRYKRQNVVKDLSVELDRLSEESVNNDISSWTKGRSGEALSLLKKRFSHRPVQEKFVCLNCGFETHADEQAALNIARSWLFLRSQEYKKYQTNKTTGNTDKRAFVETWQSFYRKKLKEVWKPAV

SEQ ID NO: 47240 - protein, 979 aa, synthetic construct
  REGION 1..979: note = engineered CasX variant
QEIKRINKIRRRLVKDSNTKKAGKTGPMKTLLVRVMTPDLRERLENLRKKPENIPQPISNTSRANLNKLLTDYTEMKKAILHVYWEEFQKDPVGLMSRVAQPASKKIDQNKLKPEMDEKGNLTTAGFACSQCGQPLFVYKLEQVSEKGKAYTNYFGRCNVAEHEKLILLAQLKPEKDSDEAVTYSLGKFGQRALDFYSIHVTKESTHPVKPLAQIAGNRYASYPVGKALSDACMGTIASFLSKYQDIIIEHQKVVKGNQKRLESLRELAGKENLEYPSVTLPPQPHTKEGVDAYNEVIARVRMWVNLNLWQKLKLSRDDAKPLLRLKGFPSFPLVERQANEVDWWDMVCNVKKLINEKKEDGKVFWQNLAGYKRQEALRPYLSSEEDVREKGKKFARYQLGDLLLHLEKKHGEDWGKVYDEAWERIDKKVEGLSKHIKLEEERRSEDAQSKAALTDWLRAKASFVIEGLKEADKDEFCRCELKLQKWYGDLRGKPFAIEAENSILDISGFSKQYNCAFIWQKDGVKKLNLYLIINYFKGGKLRFKKIKPEAFEANRFYTVINKKSGEIVPMEVNFNFDDPNLIILPLAFGKRQGREFIWNDLLSLETGSLKLANGRVIEKTLYNRRTRQDEPALFVALTFERREVLDSSNIKPMNLIGVDRGENIPAVIALTDPEGCPLSRFKDSLGNPTHILRIGESYKEKQRTIQAKKEVEQRRAGGYSRKYASKAKNLADDMVRNTARDLLYYAVTQDAMLIFENLSRGFGRQGKRTFMAERQYTRMEDWLTAKLAYEGLPSKTYLSKTLAQYTSKTCSNCGFTITSADYDRVLEKLKKTATGWMTTINGKELKVEGQITYYNRYKRQNVVKDLSVELDRLSEESVNNDISSWTKGRSGEALSLLKKRFSHRPVQEKFVCLNCGFETHADEQAALNIARSWLFLRSQEYKKYQTNKTTGNTDKRAFVETWQSFYRKKLKEVWKPAV

SEQ ID NO: 47241 - protein, 979 aa, synthetic construct
  REGION 1..979: note = engineered CasX variant
QEIKRINKIRRRLVKDSNTKKAGKTGPMKTLLVRVMTPDLRERLENLRKKPENIPQPISNTSRANLNKLLTDYTEMKKAILHVYWEEFQKDPVGLMSRVAQPASKKIDQNKLKPEMDEKGNLTTAGFACSQCGQPLFVYKLEQVSEKGKAYTNYFGRCNVAEHEKLILLAQLKPEKDSDEAVTYSLGKFGQRALDFYSIHVTKESTHPVKPLAQIAGNRYASHPVGKALSDACMGTIASFLSKYQDIIIEHQKVVKGNQKRLESLRELAGKENLEYPSVTLPPQPHTKEGVDAYNEVIARVRMWVNLNLWQKLKLSRDDAKPLLRLKGFPSFPLVERQANEVDWWDMVCNVKKLINEKKEDGKVFWQNLAGYKRQEALRPYLSSEEDVREKGKKFARYQLGDLLLHLEKKHGEDWGKVYDEAWERIDKKVEGLSKHIKLEEERRSEDAQSKAALTDWLRAKASFVIEGLKEADKDEFCRCELKLQKWYGDLRGKPFAIEAENSILDISGFSKQYNCAFIWQKDGVKKLNLYLIINYFKGGKLRFKKIKPEAFEANRFYTVINKKSGEIVPMEVNFNFDDPNLIILPLAFGKRQGREFIWNDLLSLETGSLKLANGRVIEKTLYNRRTRQDEPALFVALTFERREVLDSSNIKPMNLIGVDRGENIPAVIALTDPEGCPLSRFKDSLGNPTHILRIGESYKEKQRTIQAKKEVEQRRAGGYSRKYASKAKNLADDMVRNTARDLLYYAVTQDAMLIFENLSRGFGRQGKRTFMAERQYTRMEDWLTAKLAYEGLPSKTYLSKTLAQYTSKTCSNCGFTITSADYDRVLEKLKKTATGWMTTINGKELKVEGQITYYNRYKRQNVVKDLSVELDRLSEESVNNDISSWTKGRSGEALSLLKKRFSHRPVQEKFVCLNCGFETHADEQAALNIARSWLFLRSQEYKKYQTNKTTGNTDKRAFVETWQSFYRKKLKEVWKPAV

SEQ ID NO: 47242 - protein, 979 aa, synthetic construct
  REGION 1..979: note = engineered CasX variant
QEIKRINKIRRRLVKDSNTKKAGKTGPMKTLLVRVMTPDLRERLENLRKKPENIPQPISNTSRANLNKLLTDYTEMKKAILHVYWEEFQKDPVGLMSRVAQPASKKIDQNKLKPEMDEKGNLTTAGFACSQCGQPLFVYKLEQVSEKGKAYTNYFGRCNVAEHEKLILLAQLKPEKDSDEAVTYSLGKFGQRALDFYSIHVTKESTHPVKPLAQIAGNRYASSPVGKALSDACMGTIASFLSKYQDIIIEHQKVVKGNQKRLESLRELAGKENLEYPSVTLPPQPHTKEGVDAYNEVIARVRMWVNLNLWQKLKLSRDDAKPLLRLKGFPSFPLVERQANEVDWWDMVCNVKKLINEKKEDGKVFWQNLAGYKRQEALRPYLSSEEDVREKGKKFARYQLGDLLLHLEKKHGEDWGKVYDEAWERIDKKVEGLSKHIKLEEERRSEDAQSKAALTDWLRAKASFVIEGLKEADKDEFCRCELKLQKWYGDLRGKPFAIEAENSILDISGFSKQYNCAFIWQKDGVKKLNLYLIINYFKGGKLRFKKIKPEAFEANRFYTVINKKSGEIVPMEVNFNFDDPNLIILPLAFGKRQGREFIWNDLLSLETGSLKLANGRVIEKTLYNRRTRQDEPALFVALTFERREVLDSSNIKPMNLIGVDRGENIPAVIALTDPEGCPLSRFKDSLGNPTHILRIGESYKEKQRTIQAKKEVEQRRAGGYSRKYASKAKNLADDMVRNTARDLLYYAVTQDAMLIFENLSRGFGRQGKRTFMAERQYTRMEDWLTAKLAYEGLPSKTYLSKTLAQYTSKTCSNCGFTITSADYDRVLEKLKKTATGWMTTINGKELKVEGQITYYNRYKRQNVVKDLSVELDRLSEESVNNDISSWTKGRSGEALSLLKKRFSHRPVQEKFVCLNCGFETHADEQAALNIARSWLFLRSQEYKKYQTNKTTGNTDKRAFVETWQSFYRKKLKEVWKPAV

SEQ ID NO: 47243 - protein, 979 aa, synthetic construct
  REGION 1..979: note = engineered CasX variant
QEIKRINKIRRRLVKDSNTKKAGKTGPMKTLLVRVMTPDLRERLENLRKKPENIPQPISNTSRANLNKLLTDYTEMKKAILHVYWEEFQKDPVGLMSRVAQPASKKIDQNKLKPEMDEKGNLTTAGFACSQCGQPLFVYKLEQVSEKGKAYTNYFGRCNVAEHEKLILLAQLKPEKDSDEAVTYSLGKFGQRALDFYSIHVTKESTHPVKPLAQIAGNRYASTPVGKALSDACMGTIASFLSKYQDIIIEHQKVVKGNQKRLESLRELAGKENLEYPSVTLPPQPHTKEGVDAYNEVIARVRMWVNLNLWQKLKLSRDDAKPLLRLKGFPSFPLVERQANEVDWWDMVCNVKKLINEKKEDGKVFWQNLAGYKRQEALRPYLSSEEDVREKGKKFARYQLGDLLLHLEKKHGEDWGKVYDEAWERIDKKVEGLSKHIKLEEERRSEDAQSKAALTDWLRAKASFVIEGLKEADKDEFCRCELKLQKWYGDLRGKPFAIEAENSILDISGFSKQYNCAFIWQKDGVKKLNLYLIINYFKGGKLRFKKIKPEAFEANRFYTVINKKSGEIVPMEVNFNFDDPNLIILPLAFGKRQGREFIWNDLLSLETGSLKLANGRVIEKTLYNRRTRQDEPALFVALTFERREVLDSSNIKPMNLIGVDRGENIPAVIALTDPEGCPLSRFKDSLGNPTHILRIGESYKEKQRTIQAKKEVEQRRAGGYSRKYASKAKNLADDMVRNTARDLLYYAVTQDAMLIFENLSRGFGRQGKRTFMAERQYTRMEDWLTAKLAYEGLPSKTYLSKTLAQYTSKTCSNCGFTITSADYDRVLEKLKKTATGWMTTINGKELKVEGQITYYNRYKRQNVVKDLSVELDRLSEESVNNDISSWTKGRSGEALSLLKKRFSHRPVQEKFVCLNCGFETHADEQAALNIARSWLFLRSQEYKKYQTNKTTGNTDKRAFVETWQSFYRKKLKEVWKPAV

SEQ ID NO: 47244 - protein, 979 aa, synthetic construct
  REGION 1..979: note = engineered CasX variant
QEIKRINKIRRRLVKDSNTKKAGKTGPMKTLLVRVMTPDLRERLENLRKKPENIPQPISNTSRANLNKLLTDYTEMKKAILHVYWEEFQKDPVGLMSRVAQPASKKIDQNKLKPEMDEKGNLTTAGFACSQCGQPLFVYKLEQVSEKGKAYTNYFGRCNVAEHEKLILLAQLKPEKDSDEAVTYSLGKFGQRALDFYSIHVTKESTHPVKPLAQIAGNRYASAPVGKALSDACMGTIASFLSKYQDIIIEHQKVVKGNQKRLESLRELAGKENLEYPSVTLPPQPHTKEGVDAYNEVIARVRMWVNLNLWQKLKLSRDDAKPLLRLKGFPSFPLVERQANEVDWWDMVCNVKKLINEKKEDGKVFWQNLAGYKRQEALRPYLSSEEDVREKGKKFARYQLGDLLLHLEKKHGEDWGKVYDEAWERIDKKVEGLSKHIKLEEERRSEDAQSKAALTDWLRAKASFVIEGLKEADKDEFCRCELKLQKWYGDLRGKPFAIEAENSILDISGFSKQYNCAFIWQKDGVKKLNLYLIINYFKGGKLRFKKIKPEAFEANRFYTVINKKSGEIVPMEVNFNFDDPNLIILPLAFGKRQGREFIWNDLLSLETGSLKLANGRVIEKTLYNRRTRQDEPALFVALTFERREVLDSSNIKPMNLIGVDRGENIPAVIALTDPEGCPLSRFKDSLGNPTHILRIGESYKEKQRTIQAKKEVEQRRAGGYSRKYASKAKNLADDMVRNTARDLLYYAVTQDAMLIFENLSRGFGRQGKRTFMAERQYTRMEDWLTAKLAYEGLPSKTYLSKTLAQYTSKTCSNCGFTITSADYDRVLEKLKKTATGWMTTINGKELKVEGQITYYNRYKRQNVVKDLSVELDRLSEESVNNDISSWTKGRSGEALSLLKKRFSHRPVQEKFVCLNCGFETHADEQAALNIARSWLFLRSQEYKKYQTNKTTGNTDKRAFVETWQSFYRKKLKEVWKPAV

SEQ ID NO: 47245 - protein, 979 aa, synthetic construct
  REGION 1..979: note = engineered CasX variant
QEIKRINKIRRRLVKDSNTKKAGKTGPMKTLLVRVMTPDLRERLENLRKKPENIPQPISNTSRANLNKLLTDYTEMKKAILHVYWEEFQKDPVGLMSRVAQPASKKIDQNKLKPEMDEKGNLTTAGFACSQCGQPLFVYKLEQVSEKGKAYTNYFGRCNVAEHEKLILLAQLKPEKDSDEAVTYSLGKFGQRALDFYSIHVTKESTHPVKPLAQIAGNRYASVPVGKALSDACMGTIASFLSKYQDIIIEHQKVVKGNQKRLESLRELAGKENLEYPSVTLPPQPHTKEGVDAYNEVIARVRMWVNLNLWQKLKLSRDDAKPLLRLKGFPSFPLVERQANEVDWWDMVCNVKKLINEKKEDGKVFWQNLAGYKRQEALRPYLSSEEDVREKGKKFARYQLGDLLLHLEKKHGEDWGKVYDEAWERIDKKVEGLSKHIKLEEERRSEDAQSKAALTDWLRAKASFVIEGLKEADKDEFCRCELKLQKWYGDLRGKPFAIEAENSILDISGFSKQYNCAFIWQKDGVKKLNLYLIINYFKGGKLRFKKIKPEAFEANRFYTVINKKSGEIVPMEVNFNFDDPNLIILPLAFGKRQGREFIWNDLLSLETGSLKLANGRVIEKTLYNRRTRQDEPALFVALTFERREVLDSSNIKPMNLIGVDRGENIPAVIALTDPEGCPLSRFKDSLGNPTHILRIGESYKEKQRTIQAKKEVEQRRAGGYSRKYASKAKNLADDMVRNTARDLLYYAVTQDAMLIFENLSRGFGRQGKRTFMAERQYTRMEDWLTAKLAYEGLPSKTYLSKTLAQYTSKTCSNCGFTITSADYDRVLEKLKKTATGWMTTINGKELKVEGQITYYNRYKRQNVVKDLSVELDRLSEESVNNDISSWTKGRSGEALSLLKKRFSHRPVQEKFVCLNCGFETHADEQAALNIARSWLFLRSQEYKKYQTNKTTGNTDKRAFVETWQSFYRKKLKEVWKPAV

SEQ ID NO: 47246 - protein, 979 aa, synthetic construct
  REGION 1..979: note = engineered CasX variant
QEIKRINKIRRRLVKDSNTKKAGKTGPMKTLLVRVMTPDLRERLENLRKKPENIPQPISNTSRANLNKLLTDYTEMKKAILHVYWEEFQKDPVGLMSRVAQPASKKIDQNKLKPEMDEKGNLTTAGFACSQCGQPLFVYKLEQVSEKGKAYTNYFGRCNVAEHEKLIKLAQLKPEKDSDEAVTYSLGKFGQRALDFYSIHVTKESTHPVKPLAQIAGNRYASGPVGKALSDACMGTIASFLSKYQDIIIEHQKVVKGNQKRLESLRELAGKENLEYPSVTLPPQPHTKEGVDAYNEVIARVRMWVNLNLWQKLKLSRDDAKPLLRLKGFPSFPLVERQANEVDWWDMVCNVKKLINEKKEDGKVFWQNLAGYKRQEALRPYLSSEEDVREKGKKFARYQLGDLLLHLEKKHGEDWGKVYDEAWERIDKKVEGLSKHIKLEEERRSEDAQSKAALTDWLRAKASFVIEGLKEADKDEFCRCELKLQKWYGDLRGKPFAIEAENSILDISGFSKQYNCAFIWQKDGVKKLNLYLIINYFKGGKLRFKKIKPEAFEANRFYTVINKKSGEIVPMEVNFNFDDPNLIILPLAFGKRQGREFIWNDLLSLETGSLKLANGRVIEKTLYNRRTRQDEPALFVALTFERREVLDSSNIKPMNLIGVDRGENIPAVIALTDPEGCPLSRFKDSLGNPTHILRIGESYKEKQRTIQAKKEVEQRRAGGYSRKYASKAKNLADDMVRNTARDLLYYAVTQDAMLIFENLSRGFGRQGKRTFMAERQYTRMEDWLTAKLAYEGLPSKTYLSKTLAQYTSKTCSNCGFTITSADYDRVLEKLKKTATGWMTTINGKELKVEGQITYYNRYKRQNVVKDLSVELDRLSEESVNNDISSWTKGRSGEALSLLKKRFSHRPVQEKFVCLNCGFETHADEQAALNIARSWLFLRSQEYKKYQTNKTTGNTDKRAFVETWQSFYRKKLKEVWKPAV

SEQ ID NO: 47247 - protein, 978 aa, synthetic construct
  REGION 1..978: note = engineered CasX variant
QEIKRINKIRRRLVKDSNTKKAGKTGPMKTLLVRVMTPDLRERLENLRKKPENIPQPISNTSRANLNKLLTDYTEMKKAILHVYWEEFQKDPVGLMSRVAQPASKKIDQNKLKPEMDEKGNLTTAGFACSQCGQPLFVYKLEQVSEKGKAYTNYFGRCNVAEHEKLILLAQLKPEKDSDEAVTYSLGKFGQRALDFYSIHVTKESTHPVKPLAQIAGNRYASPVGKALSDACMGTIASFLSKYQDIIIEHQKVVKGNQKRLESLRELAGKENLEYPSVTLPPQPHTKEGVDAYNEVIARVRMWVNLNLWQKLKLSRDDAKPLLRLKGFPSFPLVERQANEVDWWDMVCNVKKLINEKKEDGKVFWQNLAGYKRQEALRPYLSSEEDVREKGKKFARYQLGDLLLHLEKKHGEDWGKVYDEAWERIDKKVEGLSKHIKLEEERRSEDAQSKAALTDWLRAKASFVIEGLKEADKDEFCRCELKLQKWYGDLRGKPFAIEAENSILDISGFSKQYNCAFIWQKDGVKKLNLYLIINYFKGGKLRFKKIKPEAFEANRFYTVINKKSGEIVPMEVNFNFDDPNLIILPLAFGKRQGREFIWNDLLSLETGSLKLANGRVIEKTLYNRRTRQDEPALFVALTFERREVLDSSNIKPMNLIGVDRGENIPAVIALTDPEGCPLSRFKDSLGNPTHILRIGESYKEKQRTIQAKKEVEQRRAGGYSRKYASKAKNLADDMVRNTARDLLYYAVTQDAMLIFENLSRGFGRQGKRTFMAERQYTRMEDWLTAKLAYEGLPSKTYLSKTLAQYTSKTCSNCGFTITSADYDRVLEKLKKTATGWMTTINGKELKVEGQITYYNRYKRQNVVKDLSVELDRLSEESVNNDISSWTKGRSGEALSLLKKRFSHRPVQEKFVCLNCGFETHADEQAALNIARSWLFLRSQEYKKYQTNKTTGNTDKRAFVETWQSFYRKKLKEVWKPAV

SEQ ID NO: 47248 - protein, 979 aa, synthetic construct
  REGION 1..979: note = engineered CasX variant
QEIKRINKIRRRLVKDSNTKKAGKTGPMKTLLVRVMTPDLRERLENLRKKPENIPQPISNTSRANLNKLLTDYTEMKKAILHVYWEEFQKDPVGLMSRVAQPASKKIDQNKLKPEMDEKGNLTTAGFACSQCGQPLFVYKLEQVSEKGKAYTNYFGRCNVAEHEKLILLAQLKPEKDSDEAVTYSLGKFGQRALDFYSIHVTKESTHPVKPLAQIAGNRYASYPVGKALSDACMGTIASFLSKYQDIIIEHQKVVKGNQKRLESLRELAGKENLEYPSVTLPPQPHTKEGVDAYNEVIARVRMWVNLNLWQKLKLSRDDAKPLLRLKGFPSFPLVERQANEVDWWDMVCNVKKLINEKKEDGKVFWQNLAGYKRQEALRPYLSSEEDVRKKGKKFARYQLGDLLLHLEKKHGEDWGKVYDEAWERIDKKVEGLSKHIKLEEERRSEDAQSKAALTDWLRAKASFVIEGLKEADKDEFCRCELKLQKWYGDLRGKPFAIEAENSILDISGFSKQYNCAFIWQKDGVKKLNLYLIINYFKGGKLRFKKIKPEAFEANRFYTVINKKSGEIVIMEVNFNFDDPNLIILPLAFGKRQGREFIWNDLLSLETGSLKLANGRVIEKTLYNRRTRQDEPALFVALTFERREVLDSSNIKPMNLIGVDRGENIPAVIALTDPEGCPLSRFKDSLGNPTHILRIGESYKEKQRTIQAKKEVEQRRAGGYSRKYASKAKNLADDMVRNTARDLLYYAVTQDAMLIFENLSRGFGRQGKRTFMAERQYTRMEDWLTAKLAYEGLPSKTYLSKTLAQYTSKTCSNCGFTITSADYDRVLEKLKKTATGWMTTINGKELKVEGQITYYNRYKRQNVVKDLSVELDRLSEESVNNDISSWTKGRSGEALSLLKKRFSHRPVQEKFVCLNCGFETHADEQAALNIARSWLFLRSQEYKKYQTNKTTGNTDKRAFVETWQSFYRKKLKEVWKPAV

SEQ ID NO: 47249 - protein, 979 aa, synthetic construct
  REGION 1..979: note = engineered CasX variant
QEIKRINKIRRRLVKDSNTKKAGKTGPMKTLLVRVMTPDLRERLENLRKKPENIPQPISNTSRANLNKLLTDYTEMKKAILHVYWEEFQKDPVGLMSRVAQPASKKIDQNKLKPEMDEKGNLTTAGFACSQCGQPLFVYKLEQVSEKGKAYTNYFGRCNVAEHEKLILLAQLKPEKDSDEAVTYSLGKFGQRALDFYSIHVTKESTHPVKPLAQIAGNRYASHPVGKALSDACMGTIASFLSKYQDIIIEHQKVVKGNQKRLESLRELAGKENLEYPSVTLPPQPHTKEGVDAYNEVIARVRMWVNLNLWQKLKLSRDDAKPLLRLKGFPSFPLVERQANEVDWWDMVCNVKKLINEKKEDGKVFWQNLAGYKRQEALRPYLSSEEDVRKKGKKFARYQLGDLLLHLEKKHGEDWGKVYDEAWERIDKKVEGLSKHIKLEEERRSEDAQSKAALTDWLRAKASFVIEGLKEADKDEFCRCELKLQKWYGDLRGKPFAIEAENSILDISGFSKQYNCAFIWQKDGVKKLNLYLIINYFKGGKLRFKKIKPEAFEANRFYTVINKKSGEIVIMEVNFNFDDPNLIILPLAFGKRQGREFIWNDLLSLETGSLKLANGRVIEKTLYNRRTRQDEPALFVALTFERREVLDSSNIKPMNLIGVDRGENIPAVIALTDPEGCPLSRFKDSLGNPTHILRIGESYKEKQRTIQAKKEVEQRRAGGYSRKYASKAKNLADDMVRNTARDLLYYAVTQDAMLIFENLSRGFGRQGKRTFMAERQYTRMEDWLTAKLAYEGLPSKTYLSKTLAQYTSKTCSNCGFTITSADYDRVLEKLKKTATGWMTTINGKELKVEGQITYYNRYKRQNVVKDLSVELDRLSEESVNNDISSWTKGRSGEALSLLKKRFSHRPVQEKFVCLNCGFETHADEQAALNIARSWLFLRSQEYKKYQTNKTTGNTDKRAFVETWQSFYRKKLKEVWKPAV

SEQ ID NO: 47250 - protein, 979 aa, synthetic construct
  REGION 1..979: note = engineered CasX variant
QEIKRINKIRRRLVKDSNTKKAGKTGPMKTLLVRVMTPDLRERLENLRKKPENIPQPISNTSRANLNKLLTDYTEMKKAILHVYWEEFQKDPVGLMSRVAQPASKKIDQNKLKPEMDEKGNLTTAGFACSQCGQPLFVYKLEQVSEKGKAYTNYFGRCNVAEHEKLILLAQLKPEKDSDEAVTYSLGKFGQRALDFYSIHVTKESTHPVKPLAQIAGNRYASSPVGKALSDACMGTIASFLSKYQDIIIEHQKVVKGNQKRLESLRELAGKENLEYPSVTLPPQPHTKEGVDAYNEVIARVRMWVNLNLWQKLKLSRDDAKPLLRLKGFPSFPLVERQANEVDWWDMVCNVKKLINEKKEDGKVFWQNLAGYKRQEALRPYLSSEEDVRKKGKKFARYQLGDLLLHLEKKHGEDWGKVYDEAWERIDKKVEGLSKHIKLEEERRSEDAQSKAALTDWLRAKASFVIEGLKEADKDEFCRCELKLQKWYGDLRGKPFAIEAENSILDISGFSKQYNCAFIWQKDGVKKLNLYLIINYFKGGKLRFKKIKPEAFEANRFYTVINKKSGEIVIMEVNFNFDDPNLIILPLAFGKRQGREFIWNDLLSLETGSLKLANGRVIEKTLYNRRTRQDEPALFVALTFERREVLDSSNIKPMNLIGVDRGENIPAVIALTDPEGCPLSRFKDSLGNPTHILRIGESYKEKQRTIQAKKEVEQRRAGGYSRKYASKAKNLADDMVRNTARDLLYYAVTQDAMLIFENLSRGFGRQGKRTFMAERQYTRMEDWLTAKLAYEGLPSKTYLSKTLAQYTSKTCSNCGFTITSADYDRVLEKLKKTATGWMTTINGKELKVEGQITYYNRYKRQNVVKDLSVELDRLSEESVNNDISSWTKGRSGEALSLLKKRFSHRPVQEKFVCLNCGFETHADEQAALNIARSWLFLRSQEYKKYQTNKTTGNTDKRAFVETWQSFYRKKLKEVWKPAV

SEQ ID NO: 47251 - protein, 979 aa, synthetic construct
  REGION 1..979: note = engineered CasX variant
QEIKRINKIRRRLVKDSNTKKAGKTGPMKTLLVRVMTPDLRERLENLRKKPENIPQPISNTSRANLNKLLTDYTEMKKAILHVYWEEFQKDPVGLMSRVAQPASKKIDQNKLKPEMDEKGNLTTAGFACSQCGQPLFVYKLEQVSEKGKAYTNYFGRCNVAEHEKLILLAQLKPEKDSDEAVTYSLGKFGQRALDFYSIHVTKESTHPVKPLAQIAGNRYASTPVGKALSDACMGTIASFLSKYQDIIIEHQKVVKGNQKRLESLRELAGKENLEYPSVTLPPQPHTKEGVDAYNEVIARVRMWVNLNLWQKLKLSRDDAKPLLRLKGFPSFPLVERQANEVDWWDMVCNVKKLINEKKEDGKVFWQNLAGYKRQEALRPYLSSEEDVRKKGKKFARYQLGDLLLHLEKKHGEDWGKVYDEAWERIDKKVEGLSKHIKLEEERRSEDAQSKAALTDWLRAKASFVIEGLKEADKDEFCRCELKLQKWYGDLRGKPFAIEAENSILDISGFSKQYNCAFIWQKDGVKKLNLYLIINYFKGGKLRFKKIKPEAFEANRFYTVINKKSGEIVIMEVNFNFDDPNLIILPLAFGKRQGREFIWNDLLSLETGSLKLANGRVIEKTLYNRRTRQDEPALFVALTFERREVLDSSNIKPMNLIGVDRGENIPAVIALTDPEGCPLSRFKDSLGNPTHILRIGESYKEKQRTIQAKKEVEQRRAGGYSRKYASKAKNLADDMVRNTARDLLYYAVTQDAMLIFENLSRGFGRQGKRTFMAERQYTRMEDWLTAKLAYEGLPSKTYLSKTLAQYTSKTCSNCGFTITSADYDRVLEKLKKTATGWMTTINGKELKVEGQITYYNRYKRQNVVKDLSVELDRLSEESVNNDISSWTKGRSGEALSLLKKRFSHRPVQEKFVCLNCGFETHADEQAALNIARSWLFLRSQEYKKYQTNKTTGNTDKRAFVETWQSFYRKKLKEVWKPAV

SEQ ID NO: 47252 - protein, 979 aa, synthetic construct
  REGION 1..979: note = engineered CasX variant
QEIKRINKIRRRLVKDSNTKKAGKTGPMKTLLVRVMTPDLRERLENLRKKPENIPQPISNTSRANLNKLLTDYTEMKKAILHVYWEEFQKDPVGLMSRVAQPASKKIDQNKLKPEMDEKGNLTTAGFACSQCGQPLFVYKLEQVSEKGKAYTNYFGRCNVAEHEKLILLAQLKPEKDSDEAVTYSLGKFGQRALDFYSIHVTKESTHPVKPLAQIAGNRYASAPVGKALSDACMGTIASFLSKYQDIIIEHQKVVKGNQKRLESLRELAGKENLEYPSVTLPPQPHTKEGVDAYNEVIARVRMWVNLNLWQKLKLSRDDAKPLLRLKGFPSFPLVERQANEVDWWDMVCNVKKLINEKKEDGKVFWQNLAGYKRQEALRPYLSSEEDVRKKGKKFARYQLGDLLLHLEKKHGEDWGKVYDEAWERIDKKVEGLSKHIKLEEERRSEDAQSKAALTDWLRAKASFVIEGLKEADKDEFCRCELKLQKWYGDLRGKPFAIEAENSILDISGFSKQYNCAFIWQKDGVKKLNLYLIINYFKGGKLRFKKIKPEAFEANRFYTVINKKSGEIVIMEVNFNFDDPNLIILPLAFGKRQGREFIWNDLLSLETGSLKLANGRVIEKTLYNRRTRQDEPALFVALTFERREVLDSSNIKPMNLIGVDRGENIPAVIALTDPEGCPLSRFKDSLGNPTHILRIGESYKEKQRTIQAKKEVEQRRAGGYSRKYASKAKNLADDMVRNTARDLLYYAVTQDAMLIFENLSRGFGRQGKRTFMAERQYTRMEDWLTAKLAYEGLPSKTYLSKTLAQYTSKTCSNCGFTITSADYDRVLEKLKKTATGWMTTINGKELKVEGQITYYNRYKRQNVVKDLSVELDRLSEESVNNDISSWTKGRSGEALSLLKKRFSHRPVQEKFVCLNCGFETHADEQAALNIARSWLFLRSQEYKKYQTNKTTGNTDKRAFVETWQSFYRKKLKEVWKPAV

SEQ ID NO: 47253 - protein, 979 aa, synthetic construct
  REGION 1..979: note = engineered CasX variant
QEIKRINKIRRRLVKDSNTKKAGKTGPMKTLLVRVMTPDLRERLENLRKKPENIPQPISNTSRANLNKLLTDYTEMKKAILHVYWEEFQKDPVGLMSRVAQPASKKIDQNKLKPEMDEKGNLTTAGFACSQCGQPLFVYKLEQVSEKGKAYTNYFGRCNVAEHEKLILLAQLKPEKDSDEAVTYSLGKFGQRALDFYSIHVTKESTHPVKPLAQIAGNRYASVPVGKALSDACMGTIASFLSKYQDIIIEHQKVVKGNQKRLESLRELAGKENLEYPSVTLPPQPHTKEGVDAYNEVIARVRMWVNLNLWQKLKLSRDDAKPLLRLKGFPSFPLVERQANEVDWWDMVCNVKKLINEKKEDGKVFWQNLAGYKRQEALRPYLSSEEDVRKKGKKFARYQLGDLLLHLEKKHGEDWGKVYDEAWERIDKKVEGLSKHIKLEEERRSEDAQSKAALTDWLRAKASFVIEGLKEADKDEFCRCELKLQKWYGDLRGKPFAIEAENSILDISGFSKQYNCAFIWQKDGVKKLNLYLIINYFKGGKLRFKKIKPEAFEANRFYTVINKKSGEIVIMEVNFNFDDPNLIILPLAFGKRQGREFIWNDLLSLETGSLKLANGRVIEKTLYNRRTRQDEPALFVALTFERREVLDSSNIKPMNLIGVDRGENIPAVIALTDPEGCPLSRFKDSLGNPTHILRIGESYKEKQRTIQAKKEVEQRRAGGYSRKYASKAKNLADDMVRNTARDLLYYAVTQDAMLIFENLSRGFGRQGKRTFMAERQYTRMEDWLTAKLAYEGLPSKTYLSKTLAQYTSKTCSNCGFTITSADYDRVLEKLKKTATGWMTTINGKELKVEGQITYYNRYKRQNVVKDLSVELDRLSEESVNNDISSWTKGRSGEALSLLKKRFSHRPVQEKFVCLNCGFETHADEQAALNIARSWLFLRSQEYKKYQTNKTTGNTDKRAFVETWQSFYRKKLKEVWKPAV

SEQ ID NO: 47254 - protein, 979 aa, synthetic construct
  REGION 1..979: note = engineered CasX variant
QEIKRINKIRRRLVKDSNTKKAGKTGPMKTLLVRVMTPDLRERLENLRKKPENIPQPISNTSRANLNKLLTDYTEMKKAILHVYWEEFQKDPVGLMSRVAQPASKKIDQNKLKPEMDEKGNLTTAGFACSQCGQPLFVYKLEQVSEKGKAYTNYFGRCNVAEHEKLIKLAQLKPEKDSDEAVTYSLGKFGQRALDFYSIHVTKESTHPVKPLAQIAGNRYASGPVGKALSDACMGTIASFLSKYQDIIIEHQKVVKGNQKRLESLRELAGKENLEYPSVTLPPQPHTKEGVDAYNEVIARVRMWVNLNLWQKLKLSRDDAKPLLRLKGFPSFPLVERQANEVDWWDMVCNVKKLINEKKEDGKVFWQNLAGYKRQEALRPYLSSEEDVRKKGKKFARYQLGDLLLHLEKKHGEDWGKVYDEAWERIDKKVEGLSKHIKLEEERRSEDAQSKAALTDWLRAKASFVIEGLKEADKDEFCRCELKLQKWYGDLRGKPFAIEAENSILDISGFSKQYNCAFIWQKDGVKKLNLYLIINYFKGGKLRFKKIKPEAFEANRFYTVINKKSGEIVIMEVNFNFDDPNLIILPLAFGKRQGREFIWNDLLSLETGSLKLANGRVIEKTLYNRRTRQDEPALFVALTFERREVLDSSNIKPMNLIGVDRGENIPAVIALTDPEGCPLSRFKDSLGNPTHILRIGESYKEKQRTIQAKKEVEQRRAGGYSRKYASKAKNLADDMVRNTARDLLYYAVTQDAMLIFENLSRGFGRQGKRTFMAERQYTRMEDWLTAKLAYEGLPSKTYLSKTLAQYTSKTCSNCGFTITSADYDRVLEKLKKTATGWMTTINGKELKVEGQITYYNRYKRQNVVKDLSVELDRLSEESVNNDISSWTKGRSGEALSLLKKRFSHRPVQEKFVCLNCGFETHADEQAALNIARSWLFLRSQEYKKYQTNKTTGNTDKRAFVETWQSFYRKKLKEVWKPAV

SEQ ID NO: 47255 - protein, 978 aa, synthetic construct
  REGION 1..978: note = engineered CasX variant
QEIKRINKIRRRLVKDSNTKKAGKTGPMKTLLVRVMTPDLRERLENLRKKPENIPQPISNTSRANLNKLLTDYTEMKKAILHVYWEEFQKDPVGLMSRVAQPASKKIDQNKLKPEMDEKGNLTTAGFACSQCGQPLFVYKLEQVSEKGKAYTNYFGRCNVAEHEKLILLAQLKPEKDSDEAVTYSLGKFGQRALDFYSIHVTKESTHPVKPLAQIAGNRYASPVGKALSDACMGTIASFLSKYQDIIIEHQKVVKGNQKRLESLRELAGKENLEYPSVTLPPQPHTKEGVDAYNEVIARVRMWVNLNLWQKLKLSRDDAKPLLRLKGFPSFPLVERQANEVDWWDMVCNVKKLINEKKEDGKVFWQNLAGYKRQEALRPYLSSEEDVRKKGKKFARYQLGDLLLHLEKKHGEDWGKVYDEAWERIDKKVEGLSKHIKLEEERRSEDAQSKAALTDWLRAKASFVIEGLKEADKDEFCRCELKLQKWYGDLRGKPFAIEAENSILDISGFSKQYNCAFIWQKDGVKKLNLYLIINYFKGGKLRFKKIKPEAFEANRFYTVINKKSGEIVIMEVNFNFDDPNLIILPLAFGKRQGREFIWNDLLSLETGSLKLANGRVIEKTLYNRRTRQDEPALFVALTFERREVLDSSNIKPMNLIGVDRGENIPAVIALTDPEGCPLSRFKDSLGNPTHILRIGESYKEKQRTIQAKKEVEQRRAGGYSRKYASKAKNLADDMVRNTARDLLYYAVTQDAMLIFENLSRGFGRQGKRTFMAERQYTRMEDWLTAKLAYEGLPSKTYLSKTLAQYTSKTCSNCGFTITSADYDRVLEKLKKTATGWMTTINGKELKVEGQITYYNRYKRQNVVKDLSVELDRLSEESVNNDISSWTKGRSGEALSLLKKRFSHRPVQEKFVCLNCGFETHADEQAALNIARSWLFLRSQEYKKYQTNKTTGNTDKRAFVETWQSFYRKKLKEVWKPAV

SEQ ID NO: 47256 - protein, 978 aa, synthetic construct
  REGION 1..978: note = engineered CasX variant
QEIKRINKIRRRLVKDSNTKKAGKTGPMKTLLVRVMTPDLRERLENLRKKPENIPQPISNTSRANLNKLLTDYTEMKKAILHVYWEEFQKDPVGLMSRVAQPASKKIDQNKLKPEMDEKGNLTTAGFACSQCGQPLFVYKLEQVSEKGKAYTNYFGRCNVAEHEKLILLAQLKPEKDSDEAVTYSLGKFGQRALDFYSIHVTKESTHPVKPLAQIAGNRYASYPVGKALSGACMGTIASFLSKYQDIIIEHQKVVKGNQKRLESLRELAGKENLEYPSVTLPPQPHTKEGVDAYNEVIARVRMWVNLNLWQKLKLSRDDAKPLLRLKGFPSFPLVERQANEVDWWDMVCNVKKLINEKKEDGKVFWQNLAGYKRQEALRPYLSSEEDRKKGKKFARYQLGDLLLHLEKKHGEDWGKVYDEAWERIDKKVEGLSKHIKLEEERRSEDAQSKAALTDWLRAKASFVIEGLKEADKDEFCRCELKLQKWYGDLRGKPFAIEAENSILDISGFSKQYNCAFIWQKDGVKKLNLYLIINYFKGGKLRFKKIKPEAFEANRFYTVINKKSGEIVPMEVNFNFDDPNLIILPLAFGKRQGREFIWNDLLSLETGSLKLANGRVIEKTLYNRRTRQDEPALFVALTFERREVLDSSNIKPMNLIGVDRGENIPAVIALTDPEGCPLSRFKDSLGNPTHILRIGESYKEKQRTIQAKKEVEQRRAGGYSRKYASKAKNLADDMVRNTARDLLYYAVTQDAMLIFENLSRGFGRQGKRTFMAERQYTRMEDWLTAKLAYEGLPSKTYLSKTLAQYTSKTCSNCGFTITSADYDRMLEKLKKTATGWMTTINGKELKVEGQITYYNRYKRQNVVKDLSVELDRLSEESVNNDISSWTKGRSGEALSLLKKRFSHRPVQEKFVCLNCGFETHADEQAALNIARSWLFLRSQEYKKYQTNKTTGNTDKRAFVETWQSFYRKKLKEVWKPAV

SEQ ID NO: 47257 - protein, 978 aa, synthetic construct
  REGION 1..978: note = engineered CasX variant
QEIKRINKIRRRLVKDSNTKKAGKTGPMKTLLVRVMTPDLRERLENLRKKPENIPQPISNTSRANLNKLLTDYTEMKKAILHVYWEEFQKDPVGLMSRVAQPASKKIDQNKLKPEMDEKGNLTTAGFACSQCGQPLFVYKLEQVSEKGKAYTNYFGRCNVAEHEKLILLAQLKPEKDSDEAVTYSLGKFGQRALDFYSIHVTKESTHPVKPLAQIAGNRYASHPVGKALSGACMGTIASFLSKYQDIIIEHQKVVKGNQKRLESLRELAGKENLEYPSVTLPPQPHTKEGVDAYNEVIARVRMWVNLNLWQKLKLSRDDAKPLLRLKGFPSFPLVERQANEVDWWDMVCNVKKLINEKKEDGKVFWQNLAGYKRQEALRPYLSSEEDRKKGKKFARYQLGDLLLHLEKKHGEDWGKVYDEAWERIDKKVEGLSKHIKLEEERRSEDAQSKAALTDWLRAKASFVIEGLKEADKDEFCRCELKLQKWYGDLRGKPFAIEAENSILDISGFSKQYNCAFIWQKDGVKKLNLYLIINYFKGGKLRFKKIKPEAFEANRFYTVINKKSGEIVPMEVNFNFDDPNLIILPLAFGKRQGREFIWNDLLSLETGSLKLANGRVIEKTLYNRRTRQDEPALFVALTFERREVLDSSNIKPMNLIGVDRGENIPAVIALTDPEGCPLSRFKDSLGNPTHILRIGESYKEKQRTIQAKKEVEQRRAGGYSRKYASKAKNLADDMVRNTARDLLYYAVTQDAMLIFENLSRGFGRQGKRTFMAERQYTRMEDWLTAKLAYEGLPSKTYLSKTLAQYTSKTCSNCGFTITSADYDRMLEKLKKTATGWMTTINGKELKVEGQITYYNRYKRQNVVKDLSVELDRLSEESVNNDISSWTKGRSGEALSLLKKRFSHRPVQEKFVCLNCGFETHADEQAALNIARSWLFLRSQEYKKYQTNKTTGNTDKRAFVETWQSFYRKKLKEVWKPAV

SEQ ID NO: 47258 - protein, 978 aa, synthetic construct
  REGION 1..978: note = engineered CasX variant
QEIKRINKIRRRLVKDSNTKKAGKTGPMKTLLVRVMTPDLRERLENLRKKPENIPQPISNTSRANLNKLLTDYTEMKKAILHVYWEEFQKDPVGLMSRVAQPASKKIDQNKLKPEMDEKGNLTTAGFACSQCGQPLFVYKLEQVSEKGKAYTNYFGRCNVAEHEKLILLAQLKPEKDSDEAVTYSLGKFGQRALDFYSIHVTKESTHPVKPLAQIAGNRYASSPVGKALSGACMGTIASFLSKYQDIIIEHQKVVKGNQKRLESLRELAGKENLEYPSVTLPPQPHTKEGVDAYNEVIARVRMWVNLNLWQKLKLSRDDAKPLLRLKGFPSFPLVERQANEVDWWDMVCNVKKLINEKKEDGKVFWQNLAGYKRQEALRPYLSSEEDRKKGKKFARYQLGDLLLHLEKKHGEDWGKVYDEAWERIDKKVEGLSKHIKLEEERRSEDAQSKAALTDWLRAKASFVIEGLKEADKDEFCRCELKLQKWYGDLRGKPFAIEAENSILDISGFSKQYNCAFIWQKDGVKKLNLYLIINYFKGGKLRFKKIKPEAFEANRFYTVINKKSGEIVPMEVNFNFDDPNLIILPLAFGKRQGREFIWNDLLSLETGSLKLANGRVIEKTLYNRRTRQDEPALFVALTFERREVLDSSNIKPMNLIGVDRGENIPAVIALTDPEGCPLSRFKDSLGNPTHILRIGESYKEKQRTIQAKKEVEQRRAGGYSRKYASKAKNLADDMVRNTARDLLYYAVTQDAMLIFENLSRGFGRQGKRTFMAERQYTRMEDWLTAKLAYEGLPSKTYLSKTLAQYTSKTCSNCGFTITSADYDRMLEKLKKTATGWMTTINGKELKVEGQITYYNRYKRQNVVKDLSVELDRLSEESVNNDISSWTKGRSGEALSLLKKRFSHRPVQEKFVCLNCGFETHADEQAALNIARSWLFLRSQEYKKYQTNKTTGNTDKRAFVETWQSFYRKKLKEVWKPAV

SEQ ID NO: 47259 - protein, 978 aa, synthetic construct
  REGION 1..978: note = engineered CasX variant
QEIKRINKIRRRLVKDSNTKKAGKTGPMKTLLVRVMTPDLRERLENLRKKPENIPQPISNTSRANLNKLLTDYTEMKKAILHVYWEEFQKDPVGLMSRVAQPASKKIDQNKLKPEMDEKGNLTTAGFACSQCGQPLFVYKLEQVSEKGKAYTNYFGRCNVAEHEKLILLAQLKPEKDSDEAVTYSLGKFGQRALDFYSIHVTKESTHPVKPLAQIAGNRYASTPVGKALSGACMGTIASFLSKYQDIIIEHQKVVKGNQKRLESLRELAGKENLEYPSVTLPPQPHTKEGVDAYNEVIARVRMWVNLNLWQKLKLSRDDAKPLLRLKGFPSFPLVERQANEVDWWDMVCNVKKLINEKKEDGKVFWQNLAGYKRQEALRPYLSSEEDRKKGKKFARYQLGDLLLHLEKKHGEDWGKVYDEAWERIDKKVEGLSKHIKLEEERRSEDAQSKAALTDWLRAKASFVIEGLKEADKDEFCRCELKLQKWYGDLRGKPFAIEAENSILDISGFSKQYNCAFIWQKDGVKKLNLYLIINYFKGGKLRFKKIKPEAFEANRFYTVINKKSGEIVPMEVNFNFDDPNLIILPLAFGKRQGREFIWNDLLSLETGSLKLANGRVIEKTLYNRRTRQDEPALFVALTFERREVLDSSNIKPMNLIGVDRGENIPAVIALTDPEGCPLSRFKDSLGNPTHILRIGESYKEKQRTIQAKKEVEQRRAGGYSRKYASKAKNLADDMVRNTARDLLYYAVTQDAMLIFENLSRGFGRQGKRTFMAERQYTRMEDWLTAKLAYEGLPSKTYLSKTLAQYTSKTCSNCGFTITSADYDRMLEKLKKTATGWMTTINGKELKVEGQITYYNRYKRQNVVKDLSVELDRLSEESVNNDISSWTKGRSGEALSLLKKRFSHRPVQEKFVCLNCGFETHADEQAALNIARSWLFLRSQEYKKYQTNKTTGNTDKRAFVETWQSFYRKKLKEVWKPAV

SEQ ID NO: 47260 - protein, 978 aa, synthetic construct
  REGION 1..978: note = engineered CasX variant
QEIKRINKIRRRLVKDSNTKKAGKTGPMKTLLVRVMTPDLRERLENLRKKPENIPQPISNTSRANLNKLLTDYTEMKKAILHVYWEEFQKDPVGLMSRVAQPASKKIDQNKLKPEMDEKGNLTTAGFACSQCGQPLFVYKLEQVSEKGKAYTNYFGRCNVAEHEKLILLAQLKPEKDSDEAVTYSLGKFGQRALDFYSIHVTKESTHPVKPLAQIAGNRYASAPVGKALSGACMGTIASFLSKYQDIIIEHQKVVKGNQKRLESLRELAGKENLEYPSVTLPPQPHTKEGVDAYNEVIARVRMWVNLNLWQKLKLSRDDAKPLLRLKGFPSFPLVERQANEVDWWDMVCNVKKLINEKKEDGKVFWQNLAGYKRQEALRPYLSSEEDRKKGKKFARYQLGDLLLHLEKKHGEDWGKVYDEAWERIDKKVEGLSKHIKLEEERRSEDAQSKAALTDWLRAKASFVIEGLKEADKDEFCRCELKLQKWYGDLRGKPFAIEAENSILDISGFSKQYNCAFIWQKDGVKKLNLYLIINYFKGGKLRFKKIKPEAFEANRFYTVINKKSGEIVPMEVNFNFDDPNLIILPLAFGKRQGREFIWNDLLSLETGSLKLANGRVIEKTLYNRRTRQDEPALFVALTFERREVLDSSNIKPMNLIGVDRGENIPAVIALTDPEGCPLSRFKDSLGNPTHILRIGESYKEKQRTIQAKKEVEQRRAGGYSRKYASKAKNLADDMVRNTARDLLYYAVTQDAMLIFENLSRGFGRQGKRTFMAERQYTRMEDWLTAKLAYEGLPSKTYLSKTLAQYTSKTCSNCGFTITSADYDRMLEKLKKTATGWMTTINGKELKVEGQITYYNRYKRQNVVKDLSVELDRLSEESVNNDISSWTKGRSGEALSLLKKRFSHRPVQEKFVCLNCGFETHADEQAALNIARSWLFLRSQEYKKYQTNKTTGNTDKRAFVETWQSFYRKKLKEVWKPAV

SEQ ID NO: 47261 - protein, 978 aa, synthetic construct
  REGION 1..978: note = engineered CasX variant
QEIKRINKIRRRLVKDSNTKKAGKTGPMKTLLVRVMTPDLRERLENLRKKPENIPQPISNTSRANLNKLLTDYTEMKKAILHVYWEEFQKDPVGLMSRVAQPASKKIDQNKLKPEMDEKGNLTTAGFACSQCGQPLFVYKLEQVSEKGKAYTNYFGRCNVAEHEKLILLAQLKPEKDSDEAVTYSLGKFGQRALDFYSIHVTKESTHPVKPLAQIAGNRYASVPVGKALSGACMGTIASFLSKYQDIIIEHQKVVKGNQKRLESLRELAGKENLEYPSVTLPPQPHTKEGVDAYNEVIARVRMWVNLNLWQKLKLSRDDAKPLLRLKGFPSFPLVERQANEVDWWDMVCNVKKLINEKKEDGKVFWQNLAGYKRQEALRPYLSSEEDRKKGKKFARYQLGDLLLHLEKKHGEDWGKVYDEAWERIDKKVEGLSKHIKLEEERRSEDAQSKAALTDWLRAKASFVIEGLKEADKDEFCRCELKLQKWYGDLRGKPFAIEAENSILDISGFSKQYNCAFIWQKDGVKKLNLYLIINYFKGGKLRFKKIKPEAFEANRFYTVINKKSGEIVPMEVNFNFDDPNLIILPLAFGKRQGREFIWNDLLSLETGSLKLANGRVIEKTLYNRRTRQDEPALFVALTFERREVLDSSNIKPMNLIGVDRGENIPAVIALTDPEGCPLSRFKDSLGNPTHILRIGESYKEKQRTIQAKKEVEQRRAGGYSRKYASKAKNLADDMVRNTARDLLYYAVTQDAMLIFENLSRGFGRQGKRTFMAERQYTRMEDWLTAKLAYEGLPSKTYLSKTLAQYTSKTCSNCGFTITSADYDRMLEKLKKTATGWMTTINGKELKVEGQITYYNRYKRQNVVKDLSVELDRLSEESVNNDISSWTKGRSGEALSLLKKRFSHRPVQEKFVCLNCGFETHADEQAALNIARSWLFLRSQEYKKYQTNKTTGNTDKRAFVETWQSFYRKKLKEVWKPAV

SEQ ID NO: 47262 - protein, 978 aa, synthetic construct
  REGION 1..978: note = engineered CasX variant
QEIKRINKIRRRLVKDSNTKKAGKTGPMKTLLVRVMTPDLRERLENLRKKPENIPQPISNTSRANLNKLLTDYTEMKKAILHVYWEEFQKDPVGLMSRVAQPASKKIDQNKLKPEMDEKGNLTTAGFACSQCGQPLFVYKLEQVSEKGKAYTNYFGRCNVAEHEKLIKLAQLKPEKDSDEAVTYSLGKFGQRALDFYSIHVTKESTHPVKPLAQIAGNRYASGPVGKALSGACMGTIASFLSKYQDIIIEHQKVVKGNQKRLESLRELAGKENLEYPSVTLPPQPHTKEGVDAYNEVIARVRMWVNLNLWQKLKLSRDDAKPLLRLKGFPSFPLVERQANEVDWWDMVCNVKKLINEKKEDGKVFWQNLAGYKRQEALRPYLSSEEDRKKGKKFARYQLGDLLLHLEKKHGEDWGKVYDEAWERIDKKVEGLSKHIKLEEERRSEDAQSKAALTDWLRAKASFVIEGLKEADKDEFCRCELKLQKWYGDLRGKPFAIEAENSILDISGFSKQYNCAFIWQKDGVKKLNLYLIINYFKGGKLRFKKIKPEAFEANRFYTVINKKSGEIVPMEVNFNFDDPNLIILPLAFGKRQGREFIWNDLLSLETGSLKLANGRVIEKTLYNRRTRQDEPALFVALTFERREVLDSSNIKPMNLIGVDRGENIPAVIALTDPEGCPLSRFKDSLGNPTHILRIGESYKEKQRTIQAKKEVEQRRAGGYSRKYASKAKNLADDMVRNTARDLLYYAVTQDAMLIFENLSRGFGRQGKRTFMAERQYTRMEDWLTAKLAYEGLPSKTYLSKTLAQYTSKTCSNCGFTITSADYDRMLEKLKKTATGWMTTINGKELKVEGQITYYNRYKRQNVVKDLSVELDRLSEESVNNDISSWTKGRSGEALSLLKKRFSHRPVQEKFVCLNCGFETHADEQAALNIARSWLFLRSQEYKKYQTNKTTGNTDKRAFVETWQSFYRKKLKEVWKPAV

SEQ ID NO: 47263 - protein, 977 aa, synthetic construct
  REGION 1..977: note = engineered CasX variant
QEIKRINKIRRRLVKDSNTKKAGKTGPMKTLLVRVMTPDLRERLENLRKKPENIPQPISNTSRANLNKLLTDYTEMKKAILHVYWEEFQKDPVGLMSRVAQPASKKIDQNKLKPEMDEKGNLTTAGFACSQCGQPLFVYKLEQVSEKGKAYTNYFGRCNVAEHEKLILLAQLKPEKDSDEAVTYSLGKFGQRALDFYSIHVTKESTHPVKPLAQIAGNRYASPVGKALSGACMGTIASFLSKYQDIIIEHQKVVKGNQKRLESLRELAGKENLEYPSVTLPPQPHTKEGVDAYNEVIARVRMWVNLNLWQKLKLSRDDAKPLLRLKGFPSFPLVERQANEVDWWDMVCNVKKLINEKKEDGKVFWQNLAGYKRQEALRPYLSSEEDRKKGKKFARYQLGDLLLHLEKKHGEDWGKVYDEAWERIDKKVEGLSKHIKLEEERRSEDAQSKAALTDWLRAKASFVIEGLKEADKDEFCRCELKLQKWYGDLRGKPFAIEAENSILDISGFSKQYNCAFIWQKDGVKKLNLYLIINYFKGGKLRFKKIKPEAFEANRFYTVINKKSGEIVPMEVNFNFDDPNLIILPLAFGKRQGREFIWNDLLSLETGSLKLANGRVIEKTLYNRRTRQDEPALFVALTFERREVLDSSNIKPMNLIGVDRGENIPAVIALTDPEGCPLSRFKDSLGNPTHILRIGESYKEKQRTIQAKKEVEQRRAGGYSRKYASKAKNLADDMVRNTARDLLYYAVTQDAMLIFENLSRGFGRQGKRTFMAERQYTRMEDWLTAKLAYEGLPSKTYLSKTLAQYTSKTCSNCGFTITSADYDRMLEKLKKTATGWMTTINGKELKVEGQITYYNRYKRQNVVKDLSVELDRLSEESVNNDISSWTKGRSGEALSLLKKRFSHRPVQEKFVCLNCGFETHADEQAALNIARSWLFLRSQEYKKYQTNKTTGNTDKRAFVETWQSFYRKKLKEVWKPAV

SEQ ID NO: 47264 - protein, 978 aa, synthetic construct
  REGION 1..978: note = engineered CasX variant
QEIKRINKIRRRLVKDSNTKKAGKTGPMKTLLVRVMTPDLRERLENLRKKPENIPQPISNTSRANLNKLLTDYTEMKKAILHVYWEEFQKDPVGLMSRVAQPASKKIDQNKLKPEMDEKGNLTTAGFACSQCGQPLFVYKLEQVSEKGKAYTNYFGRCNVAEHEKLILLAQLKPEKDSDEAVTYSLGKFGQRALDFYSIHVTKESTHPVKPLAQIAGNRYASYPVGKALSDACMGTIASFLSKYQDIIIEHQKVVKGNQKRLESLRELAGKENLEYPSVTLPPQPHTKEGVDAYNEVIARVRMWVNLNLWQKLKLSRDDAKPLLRLKNFPSFPLVERQANEVDWWDMVCNVKKLINEKKEDGKVFWQNLAGYKRQEALRPYLSSEEDRKKGKKFARYQLGDLLLHLEKKHGEDWGKVYDEAWERIDKKVEGLSKHIKLEEERRSEDAQSKAALTDWLRAKASFVIEGLKEADKDEFCRCELKLQKWYGDLRGKPFAIEAENSILDISGFSKQYNCAFIWQKDGVKKLNLYLIINYFKGGKLRFKKIKPEAFEANRFYTVINKKSGEIVPMEVNFNFDDPNLIILPLAFGKRQGREFIWNDLLSLETGSLKLANGRVIEKTLYNRRTRQDEPALFVALTFERREVLDSSNIKPMNLIGVDRGENIPAVIALTDPEGCPLSRFKDSLGNPTHILRIGESYKEKQRTIQAKKEVEQRRAGGYSRKYASKAKNLADDMVRNTARDLLYYAVTQDAMLIFENLSRGFGRQGKRTFMAERQYTRMEDWLTAKLAYEGLPSKTYLSKTLAQYTSKTCSNCGFTITSADYDRMLEKLKKTATGWMTTINGKELKVEGQITYYNRYKRQNVVKDLSVELDRLSEESVNNDISSWTKGRSGEALSLLKKRFSHRPVQEKFVCLNCGFETHADEQAALNIARSWLFLRSQEYKKYQTNKTTGNTDKRAFVETWQSFYRKKLKEVWKPAV

SEQ ID NO: 47265 - protein, 978 aa, synthetic construct
  REGION 1..978: note = engineered CasX variant
QEIKRINKIRRRLVKDSNTKKAGKTGPMKTLLVRVMTPDLRERLENLRKKPENIPQPISNTSRANLNKLLTDYTEMKKAILHVYWEEFQKDPVGLMSRVAQPASKKIDQNKLKPEMDEKGNLTTAGFACSQCGQPLFVYKLEQVSEKGKAYTNYFGRCNVAEHEKLILLAQLKPEKDSDEAVTYSLGKFGQRALDFYSIHVTKESTHPVKPLAQIAGNRYASHPVGKALSDACMGTIASFLSKYQDIIIEHQKVVKGNQKRLESLRELAGKENLEYPSVTLPPQPHTKEGVDAYNEVIARVRMWVNLNLWQKLKLSRDDAKPLLRLKNFPSFPLVERQANEVDWWDMVCNVKKLINEKKEDGKVFWQNLAGYKRQEALRPYLSSEEDRKKGKKFARYQLGDLLLHLEKKHGEDWGKVYDEAWERIDKKVEGLSKHIKLEEERRSEDAQSKAALTDWLRAKASFVIEGLKEADKDEFCRCELKLQKWYGDLRGKPFAIEAENSILDISGFSKQYNCAFIWQKDGVKKLNLYLIINYFKGGKLRFKKIKPEAFEANRFYTVINKKSGEIVPMEVNFNFDDPNLIILPLAFGKRQGREFIWNDLLSLETGSLKLANGRVIEKTLYNRRTRQDEPALFVALTFERREVLDSSNIKPMNLIGVDRGENIPAVIALTDPEGCPLSRFKDSLGNPTHILRIGESYKEKQRTIQAKKEVEQRRAGGYSRKYASKAKNLADDMVRNTARDLLYYAVTQDAMLIFENLSRGFGRQGKRTFMAERQYTRMEDWLTAKLAYEGLPSKTYLSKTLAQYTSKTCSNCGFTITSADYDRMLEKLKKTATGWMTTINGKELKVEGQITYYNRYKRQNVVKDLSVELDRLSEESVNNDISSWTKGRSGEALSLLKKRFSHRPVQEKFVCLNCGFETHADEQAALNIARSWLFLRSQEYKKYQTNKTTGNTDKRAFVETWQSFYRKKLKEVWKPAV

SEQ ID NO: 47266 - protein, 978 aa, synthetic construct
  REGION 1..978: note = engineered CasX variant
QEIKRINKIRRRLVKDSNTKKAGKTGPMKTLLVRVMTPDLRERLENLRKKPENIPQPISNTSRANLNKLLTDYTEMKKAILHVYWEEFQKDPVGLMSRVAQPASKKIDQNKLKPEMDEKGNLTTAGFACSQCGQPLFVYKLEQVSEKGKAYTNYFGRCNVAEHEKLILLAQLKPEKDSDEAVTYSLGKFGQRALDFYSIHVTKESTHPVKPLAQIAGNRYASSPVGKALSDACMGTIASFLSKYQDIIIEHQKVVKGNQKRLESLRELAGKENLEYPSVTLPPQPHTKEGVDAYNEVIARVRMWVNLNLWQKLKLSRDDAKPLLRLKNFPSFPLVERQANEVDWWDMVCNVKKLINEKKEDGKVFWQNLAGYKRQEALRPYLSSEEDRKKGKKFARYQLGDLLLHLEKKHGEDWGKVYDEAWERIDKKVEGLSKHIKLEEERRSEDAQSKAALTDWLRAKASFVIEGLKEADKDEFCRCELKLQKWYGDLRGKPFAIEAENSILDISGFSKQYNCAFIWQKDGVKKLNLYLIINYFKGGKLRFKKIKPEAFEANRFYTVINKKSGEIVPMEVNFNFDDPNLIILPLAFGKRQGREFIWNDLLSLETGSLKLANGRVIEKTLYNRRTRQDEPALFVALTFERREVLDSSNIKPMNLIGVDRGENIPAVIALTDPEGCPLSRFKDSLGNPTHILRIGESYKEKQRTIQAKKEVEQRRAGGYSRKYASKAKNLADDMVRNTARDLLYYAVTQDAMLIFENLSRGFGRQGKRTFMAERQYTRMEDWLTAKLAYEGLPSKTYLSKTLAQYTSKTCSNCGFTITSADYDRMLEKLKKTATGWMTTINGKELKVEGQITYYNRYKRQNVVKDLSVELDRLSEESVNNDISSWTKGRSGEALSLLKKRFSHRPVQEKFVCLNCGFETHADEQAALNIARSWLFLRSQEYKKYQTNKTTGNTDKRAFVETWQSFYRKKLKEVWKPAV

SEQ ID NO: 47267 - protein, 978 aa, synthetic construct
  REGION 1..978: note = engineered CasX variant
QEIKRINKIRRRLVKDSNTKKAGKTGPMKTLLVRVMTPDLRERLENLRKKPENIPQPISNTSRANLNKLLTDYTEMKKAILHVYWEEFQKDPVGLMSRVAQPASKKIDQNKLKPEMDEKGNLTTAGFACSQCGQPLFVYKLEQVSEKGKAYTNYFGRCNVAEHEKLILLAQLKPEKDSDEAVTYSLGKFGQRALDFYSIHVTKESTHPVKPLAQIAGNRYASTPVGKALSDACMGTIASFLSKYQDIIIEHQKVVKGNQKRLESLRELAGKENLEYPSVTLPPQPHTKEGVDAYNEVIARVRMWVNLNLWQKLKLSRDDAKPLLRLKNFPSFPLVERQANEVDWWDMVCNVKKLINEKKEDGKVFWQNLAGYKRQEALRPYLSSEEDRKKGKKFARYQLGDLLLHLEKKHGEDWGKVYDEAWERIDKKVEGLSKHIKLEEERRSEDAQSKAALTDWLRAKASFVIEGLKEADKDEFCRCELKLQKWYGDLRGKPFAIEAENSILDISGFSKQYNCAFIWQKDGVKKLNLYLIINYFKGGKLRFKKIKPEAFEANRFYTVINKKSGEIVPMEVNFNFDDPNLIILPLAFGKRQGREFIWNDLLSLETGSLKLANGRVIEKTLYNRRTRQDEPALFVALTFERREVLDSSNIKPMNLIGVDRGENIPAVIALTDPEGCPLSRFKDSLGNPTHILRIGESYKEKQRTIQAKKEVEQRRAGGYSRKYASKAKNLADDMVRNTARDLLYYAVTQDAMLIFENLSRGFGRQGKRTFMAERQYTRMEDWLTAKLAYEGLPSKTYLSKTLAQYTSKTCSNCGFTITSADYDRMLEKLKKTATGWMTTINGKELKVEGQITYYNRYKRQNVVKDLSVELDRLSEESVNNDISSWTKGRSGEALSLLKKRFSHRPVQEKFVCLNCGFETHADEQAALNIARSWLFLRSQEYKKYQTNKTTGNTDKRAFVETWQSFYRKKLKEVWKPAV

SEQ ID NO: 47268 - protein, 978 aa, synthetic construct
  REGION 1..978: note = engineered CasX variant
QEIKRINKIRRRLVKDSNTKKAGKTGPMKTLLVRVMTPDLRERLENLRKKPENIPQPISNTSRANLNKLLTDYTEMKKAILHVYWEEFQKDPVGLMSRVAQPASKKIDQNKLKPEMDEKGNLTTAGFACSQCGQPLFVYKLEQVSEKGKAYTNYFGRCNVAEHEKLILLAQLKPEKDSDEAVTYSLGKFGQRALDFYSIHVTKESTHPVKPLAQIAGNRYASAPVGKALSDACMGTIASFLSKYQDIIIEHQKVVKGNQKRLESLRELAGKENLEYPSVTLPPQPHTKEGVDAYNEVIARVRMWVNLNLWQKLKLSRDDAKPLLRLKNFPSFPLVERQANEVDWWDMVCNVKKLINEKKEDGKVFWQNLAGYKRQEALRPYLSSEEDRKKGKKFARYQLGDLLLHLEKKHGEDWGKVYDEAWERIDKKVEGLSKHIKLEEERRSEDAQSKAALTDWLRAKASFVIEGLKEADKDEFCRCELKLQKWYGDLRGKPFAIEAENSILDISGFSKQYNCAFIWQKDGVKKLNLYLIINYFKGGKLRFKKIKPEAFEANRFYTVINKKSGEIVPMEVNFNFDDPNLIILPLAFGKRQGREFIWNDLLSLETGSLKLANGRVIEKTLYNRRTRQDEPALFVALTFERREVLDSSNIKPMNLIGVDRGENIPAVIALTDPEGCPLSRFKDSLGNPTHILRIGESYKEKQRTIQAKKEVEQRRAGGYSRKYASKAKNLADDMVRNTARDLLYYAVTQDAMLIFENLSRGFGRQGKRTFMAERQYTRMEDWLTAKLAYEGLPSKTYLSKTLAQYTSKTCSNCGFTITSADYDRMLEKLKKTATGWMTTINGKELKVEGQITYYNRYKRQNVVKDLSVELDRLSEESVNNDISSWTKGRSGEALSLLKKRFSHRPVQEKFVCLNCGFETHADEQAALNIARSWLFLRSQEYKKYQTNKTTGNTDKRAFVETWQSFYRKKLKEVWKPAV

SEQ ID NO: 47269 - protein, 978 aa, synthetic construct
  REGION 1..978: note = engineered CasX variant
QEIKRINKIRRRLVKDSNTKKAGKTGPMKTLLVRVMTPDLRERLENLRKKPENIPQPISNTSRANLNKLLTDYTEMKKAILHVYWEEFQKDPVGLMSRVAQPASKKIDQNKLKPEMDEKGNLTTAGFACSQCGQPLFVYKLEQVSEKGKAYTNYFGRCNVAEHEKLILLAQLKPEKDSDEAVTYSLGKFGQRALDFYSIHVTKESTHPVKPLAQIAGNRYASVPVGKALSDACMGTIASFLSKYQDIIIEHQKVVKGNQKRLESLRELAGKENLEYPSVTLPPQPHTKEGVDAYNEVIARVRMWVNLNLWQKLKLSRDDAKPLLRLKNFPSFPLVERQANEVDWWDMVCNVKKLINEKKEDGKVFWQNLAGYKRQEALRPYLSSEEDRKKGKKFARYQLGDLLLHLEKKHGEDWGKVYDEAWERIDKKVEGLSKHIKLEEERRSEDAQSKAALTDWLRAKASFVIEGLKEADKDEFCRCELKLQKWYGDLRGKPFAIEAENSILDISGFSKQYNCAFIWQKDGVKKLNLYLIINYFKGGKLRFKKIKPEAFEANRFYTVINKKSGEIVPMEVNFNFDDPNLIILPLAFGKRQGREFIWNDLLSLETGSLKLANGRVIEKTLYNRRTRQDEPALFVALTFERREVLDSSNIKPMNLIGVDRGENIPAVIALTDPEGCPLSRFKDSLGNPTHILRIGESYKEKQRTIQAKKEVEQRRAGGYSRKYASKAKNLADDMVRNTARDLLYYAVTQDAMLIFENLSRGFGRQGKRTFMAERQYTRMEDWLTAKLAYEGLPSKTYLSKTLAQYTSKTCSNCGFTITSADYDRMLEKLKKTATGWMTTINGKELKVEGQITYYNRYKRQNVVKDLSVELDRLSEESVNNDISSWTKGRSGEALSLLKKRFSHRPVQEKFVCLNCGFETHADEQAALNIARSWLFLRSQEYKKYQTNKTTGNTDKRAFVETWQSFYRKKLKEVWKPAV

SEQ ID NO: 47270 - protein, 978 aa, synthetic construct
  REGION 1..978: note = engineered CasX variant
QEIKRINKIRRRLVKDSNTKKAGKTGPMKTLLVRVMTPDLRERLENLRKKPENIPQPISNTSRANLNKLLTDYTEMKKAILHVYWEEFQKDPVGLMSRVAQPASKKIDQNKLKPEMDEKGNLTTAGFACSQCGQPLFVYKLEQVSEKGKAYTNYFGRCNVAEHEKLIKLAQLKPEKDSDEAVTYSLGKFGQRALDFYSIHVTKESTHPVKPLAQIAGNRYASGPVGKALSDACMGTIASFLSKYQDIIIEHQKVVKGNQKRLESLRELAGKENLEYPSVTLPPQPHTKEGVDAYNEVIARVRMWVNLNLWQKLKLSRDDAKPLLRLKNFPSFPLVERQANEVDWWDMVCNVKKLINEKKEDGKVFWQNLAGYKRQEALRPYLSSEEDRKKGKKFARYQLGDLLLHLEKKHGEDWGKVYDEAWERIDKKVEGLSKHIKLEEERRSEDAQSKAALTDWLRAKASFVIEGLKEADKDEFCRCELKLQKWYGDLRGKPFAIEAENSILDISGFSKQYNCAFIWQKDGVKKLNLYLIINYFKGGKLRFKKIKPEAFEANRFYTVINKKSGEIVPMEVNFNFDDPNLIILPLAFGKRQGREFIWNDLLSLETGSLKLANGRVIEKTLYNRRTRQDEPALFVALTFERREVLDSSNIKPMNLIGVDRGENIPAVIALTDPEGCPLSRFKDSLGNPTHILRIGESYKEKQRTIQAKKEVEQRRAGGYSRKYASKAKNLADDMVRNTARDLLYYAVTQDAMLIFENLSRGFGRQGKRTFMAERQYTRMEDWLTAKLAYEGLPSKTYLSKTLAQYTSKTCSNCGFTITSADYDRMLEKLKKTATGWMTTINGKELKVEGQITYYNRYKRQNVVKDLSVELDRLSEESVNNDISSWTKGRSGEALSLLKKRFSHRPVQEKFVCLNCGFETHADEQAALNIARSWLFLRSQEYKKYQTNKTTGNTDKRAFVETWQSFYRKKLKEVWKPAV

SEQ ID NO: 47271 - protein, 977 aa, synthetic construct
  REGION 1..977: note = engineered CasX variant
QEIKRINKIRRRLVKDSNTKKAGKTGPMKTLLVRVMTPDLRERLENLRKKPENIPQPISNTSRANLNKLLTDYTEMKKAILHVYWEEFQKDPVGLMSRVAQPASKKIDQNKLKPEMDEKGNLTTAGFACSQCGQPLFVYKLEQVSEKGKAYTNYFGRCNVAEHEKLILLAQLKPEKDSDEAVTYSLGKFGQRALDFYSIHVTKESTHPVKPLAQIAGNRYASPVGKALSDACMGTIASFLSKYQDIIIEHQKVVKGNQKRLESLRELAGKENLEYPSVTLPPQPHTKEGVDAYNEVIARVRMWVNLNLWQKLKLSRDDAKPLLRLKNFPSFPLVERQANEVDWWDMVCNVKKLINEKKEDGKVFWQNLAGYKRQEALRPYLSSEEDRKKGKKFARYQLGDLLLHLEKKHGEDWGKVYDEAWERIDKKVEGLSKHIKLEEERRSEDAQSKAALTDWLRAKASFVIEGLKEADKDEFCRCELKLQKWYGDLRGKPFAIEAENSILDISGFSKQYNCAFIWQKDGVKKLNLYLIINYFKGGKLRFKKIKPEAFEANRFYTVINKKSGEIVPMEVNFNFDDPNLIILPLAFGKRQGREFIWNDLLSLETGSLKLANGRVIEKTLYNRRTRQDEPALFVALTFERREVLDSSNIKPMNLIGVDRGENIPAVIALTDPEGCPLSRFKDSLGNPTHILRIGESYKEKQRTIQAKKEVEQRRAGGYSRKYASKAKNLADDMVRNTARDLLYYAVTQDAMLIFENLSRGFGRQGKRTFMAERQYTRMEDWLTAKLAYEGLPSKTYLSKTLAQYTSKTCSNCGFTITSADYDRMLEKLKKTATGWMTTINGKELKVEGQITYYNRYKRQNVVKDLSVELDRLSEESVNNDISSWTKGRSGEALSLLKKRFSHRPVQEKFVCLNCGFETHADEQAALNIARSWLFLRSQEYKKYQTNKTTGNTDKRAFVETWQSFYRKKLKEVWKPAV

SEQ ID NO: 47272 - protein, 978 aa, synthetic construct
  REGION 1..978: note = engineered CasX variant
QEIKRINKIRRRLVKDSNTKKAGKTGPMKTLLVRVMTPDLRERLENLRKKPENIPQPISNTSRANLNKLLTDYTEMKKAILHVYWEEFQKDPVGLMSRVAQPASKKIDQNKLKPEMDEKGNLTTAGFACSQCGQPLFVYKLEQVSEKGKAYTNYFGRCNVAEHEKLILLAQLKPEKDSDEAVTYSLGKFGQRALDFYSIHVTKESTHPVKPLAQIAGNRYASYPVGKALSDACMGTIASFLSKYQDIIIEHQKVVKGNQKRLESLRELAGKENLEYPSVTLPPQPHTKEGVDAYNEVIARVRMWVNLNLWQKLKLSRDDAKPLLRLKGFPSFPLVERQANEVDWWDMVCNVKKLINEKKEDGKVFWQNLAGYKRQEALRPYLSSEEDRKKGKKFARYQLGDLLNHLEKKHGEDWGKVYDEAWERIDKKVEGLSKHIKLEEERRSEDAQSKAALTDWLRAKASFVIEGLKEADKDEFCRCELKLQKWYGDLRGKPFAIEAENSILDISGFSKQYNCAFIWQKDGVKKLNLYLIINYFKGGKLRFKKIKPEAFEANRFYTVINKKSGEIVPMEVNFNFDDPNLIILPLAFGKRQGREFIWNDLLSLETGSLKLANGRVIEKTLYNRRTRQDEPALFVALTFERREVLDSSNIKPMNLIGVDRGENIPAVIALTDPEGCPLSRFKDSLGNPTHILRIGESYKEKQRTIQAKKEVEQRRAGGYSRKYASKAKNLADDMVRNTARDLLYYAVTQDAMLIFENLSRGFGRQGKRTFMAERQYTRMEDWLTAKLAYEGLPSKTYLSKTLAQYTSKTCSNCGFTITSADYDRMLEKLKKTATGWMTTINGKELKVEGQITYYNRYKRQNVVKDLSVELDRLSEESVNNDISSWTKGRSGEALSLLKKRFSHRPVQEKFVCLNCGFETHADEQAALNIARSWLFLRSQEYKKYQTNKTTGNTDKRAFVETWQSFYRKKLKEVWKPAV

SEQ ID NO: 47273 - protein, 978 aa, synthetic construct
  REGION 1..978: note = engineered CasX variant
QEIKRINKIRRRLVKDSNTKKAGKTGPMKTLLVRVMTPDLRERLENLRKKPENIPQPISNTSRANLNKLLTDYTEMKKAILHVYWEEFQKDPVGLMSRVAQPASKKIDQNKLKPEMDEKGNLTTAGFACSQCGQPLFVYKLEQVSEKGKAYTNYFGRCNVAEHEKLILLAQLKPEKDSDEAVTYSLGKFGQRALDFYSIHVTKESTHPVKPLAQIAGNRYASHPVGKALSDACMGTIASFLSKYQDIIIEHQKVVKGNQKRLESLRELAGKENLEYPSVTLPPQPHTKEGVDAYNEVIARVRMWVNLNLWQKLKLSRDDAKPLLRLKGFPSFPLVERQANEVDWWDMVCNVKKLINEKKEDGKVFWQNLAGYKRQEALRPYLSSEEDRKKGKKFARYQLGDLLNHLEKKHGEDWGKVYDEAWERIDKKVEGLSKHIKLEEERRSEDAQSKAALTDWLRAKASFVIEGLKEADKDEFCRCELKLQKWYGDLRGKPFAIEAENSILDISGFSKQYNCAFIWQKDGVKKLNLYLIINYFKGGKLRFKKIKPEAFEANRFYTVINKKSGEIVPMEVNFNFDDPNLIILPLAFGKRQGREFIWNDLLSLETGSLKLANGRVIEKTLYNRRTRQDEPALFVALTFERREVLDSSNIKPMNLIGVDRGENIPAVIALTDPEGCPLSRFKDSLGNPTHILRIGESYKEKQRTIQAKKEVEQRRAGGYSRKYASKAKNLADDMVRNTARDLLYYAVTQDAMLIFENLSRGFGRQGKRTFMAERQYTRMEDWLTAKLAYEGLPSKTYLSKTLAQYTSKTCSNCGFTITSADYDRMLEKLKKTATGWMTTINGKELKVEGQITYYNRYKRQNVVKDLSVELDRLSEESVNNDISSWTKGRSGEALSLLKKRFSHRPVQEKFVCLNCGFETHADEQAALNIARSWLFLRSQEYKKYQTNKTTGNTDKRAFVETWQSFYRKKLKEVWKPAV

SEQ ID NO: 47274 - protein, 978 aa, synthetic construct
  REGION 1..978: note = engineered CasX variant
QEIKRINKIRRRLVKDSNTKKAGKTGPMKTLLVRVMTPDLRERLENLRKKPENIPQPISNTSRANLNKLLTDYTEMKKAILHVYWEEFQKDPVGLMSRVAQPASKKIDQNKLKPEMDEKGNLTTAGFACSQCGQPLFVYKLEQVSEKGKAYTNYFGRCNVAEHEKLILLAQLKPEKDSDEAVTYSLGKFGQRALDFYSIHVTKESTHPVKPLAQIAGNRYASSPVGKALSDACMGTIASFLSKYQDIIIEHQKVVKGNQKRLESLRELAGKENLEYPSVTLPPQPHTKEGVDAYNEVIARVRMWVNLNLWQKLKLSRDDAKPLLRLKGFPSFPLVERQANEVDWWDMVCNVKKLINEKKEDGKVFWQNLAGYKRQEALRPYLSSEEDRKKGKKFARYQLGDLLNHLEKKHGEDWGKVYDEAWERIDKKVEGLSKHIKLEEERRSEDAQSKAALTDWLRAKASFVIEGLKEADKDEFCRCELKLQKWYGDLRGKPFAIEAENSILDISGFSKQYNCAFIWQKDGVKKLNLYLIINYFKGGKLRFKKIKPEAFEANRFYTVINKKSGEIVPMEVNFNFDDPNLIILPLAFGKRQGREFIWNDLLSLETGSLKLANGRVIEKTLYNRRTRQDEPALFVALTFERREVLDSSNIKPMNLIGVDRGENIPAVIALTDPEGCPLSRFKDSLGNPTHILRIGESYKEKQRTIQAKKEVEQRRAGGYSRKYASKAKNLADDMVRNTARDLLYYAVTQDAMLIFENLSRGFGRQGKRTFMAERQYTRMEDWLTAKLAYEGLPSKTYLSKTLAQYTSKTCSNCGFTITSADYDRMLEKLKKTATGWMTTINGKELKVEGQITYYNRYKRQNVVKDLSVELDRLSEESVNNDISSWTKGRSGEALSLLKKRFSHRPVQEKFVCLNCGFETHADEQAALNIARSWLFLRSQEYKKYQTNKTTGNTDKRAFVETWQSFYRKKLKEVWKPAV

SEQ ID NO: 47275 - protein, 978 aa, synthetic construct
  REGION 1..978: note = engineered CasX variant
QEIKRINKIRRRLVKDSNTKKAGKTGPMKTLLVRVMTPDLRERLENLRKKPENIPQPISNTSRANLNKLLTDYTEMKKAILHVYWEEFQKDPVGLMSRVAQPASKKIDQNKLKPEMDEKGNLTTAGFACSQCGQPLFVYKLEQVSEKGKAYTNYFGRCNVAEHEKLILLAQLKPEKDSDEAVTYSLGKFGQRALDFYSIHVTKESTHPVKPLAQIAGNRYASTPVGKALSDACMGTIASFLSKYQDIIIEHQKVVKGNQKRLESLRELAGKENLEYPSVTLPPQPHTKEGVDAYNEVIARVRMWVNLNLWQKLKLSRDDAKPLLRLKGFPSFPLVERQANEVDWWDMVCNVKKLINEKKEDGKVFWQNLAGYKRQEALRPYLSSEEDRKKGKKFARYQLGDLLNHLEKKHGEDWGKVYDEAWERIDKKVEGLSKHIKLEEERRSEDAQSKAALTDWLRAKASFVIEGLKEADKDEFCRCELKLQKWYGDLRGKPFAIEAENSILDISGFSKQYNCAFIWQKDGVKKLNLYLIINYFKGGKLRFKKIKPEAFEANRFYTVINKKSGEIVPMEVNFNFDDPNLIILPLAFGKRQGREFIWNDLLSLETGSLKLANGRVIEKTLYNRRTRQDEPALFVALTFERREVLDSSNIKPMNLIGVDRGENIPAVIALTDPEGCPLSRFKDSLGNPTHILRIGESYKEKQRTIQAKKEVEQRRAGGYSRKYASKAKNLADDMVRNTARDLLYYAVTQDAMLIFENLSRGFGRQGKRTFMAERQYTRMEDWLTAKLAYEGLPSKTYLSKTLAQYTSKTCSNCGFTITSADYDRMLEKLKKTATGWMTTINGKELKVEGQITYYNRYKRQNVVKDLSVELDRLSEESVNNDISSWTKGRSGEALSLLKKRFSHRPVQEKFVCLNCGFETHADEQAALNIARSWLFLRSQEYKKYQTNKTTGNTDKRAFVETWQSFYRKKLKEVWKPAV

SEQ ID NO: 47276 - protein, 978 aa, synthetic construct
  REGION 1..978: note = engineered CasX variant
QEIKRINKIRRRLVKDSNTKKAGKTGPMKTLLVRVMTPDLRERLENLRKKPENIPQPISNTSRANLNKLLTDYTEMKKAILHVYWEEFQKDPVGLMSRVAQPASKKIDQNKLKPEMDEKGNLTTAGFACSQCGQPLFVYKLEQVSEKGKAYTNYFGRCNVAEHEKLILLAQLKPEKDSDEAVTYSLGKFGQRALDFYSIHVTKESTHPVKPLAQIAGNRYASAPVGKALSDACMGTIASFLSKYQDIIIEHQKVVKGNQKRLESLRELAGKENLEYPSVTLPPQPHTKEGVDAYNEVIARVRMWVNLNLWQKLKLSRDDAKPLLRLKGFPSFPLVERQANEVDWWDMVCNVKKLINEKKEDGKVFWQNLAGYKRQEALRPYLSSEEDRKKGKKFARYQLGDLLNHLEKKHGEDWGKVYDEAWERIDKKVEGLSKHIKLEEERRSEDAQSKAALTDWLRAKASFVIEGLKEADKDEFCRCELKLQKWYGDLRGKPFAIEAENSILDISGFSKQYNCAFIWQKDGVKKLNLYLIINYFKGGKLRFKKIKPEAFEANRFYTVINKKSGEIVPMEVNFNFDDPNLIILPLAFGKRQGREFIWNDLLSLETGSLKLANGRVIEKTLYNRRTRQDEPALFVALTFERREVLDSSNIKPMNLIGVDRGENIPAVIALTDPEGCPLSRFKDSLGNPTHILRIGESYKEKQRTIQAKKEVEQRRAGGYSRKYASKAKNLADDMVRNTARDLLYYAVTQDAMLIFENLSRGFGRQGKRTFMAERQYTRMEDWLTAKLAYEGLPSKTYLSKTLAQYTSKTCSNCGFTITSADYDRMLEKLKKTATGWMTTINGKELKVEGQITYYNRYKRQNVVKDLSVELDRLSEESVNNDISSWTKGRSGEALSLLKKRFSHRPVQEKFVCLNCGFETHADEQAALNIARSWLFLRSQEYKKYQTNKTTGNTDKRAFVETWQSFYRKKLKEVWKPAV

SEQ ID NO: 47277 - protein, 978 aa, synthetic construct
  REGION 1..978: note = engineered CasX variant
QEIKRINKIRRRLVKDSNTKKAGKTGPMKTLLVRVMTPDLRERLENLRKKPENIPQPISNTSRANLNKLLTDYTEMKKAILHVYWEEFQKDPVGLMSRVAQPASKKIDQNKLKPEMDEKGNLTTAGFACSQCGQPLFVYKLEQVSEKGKAYTNYFGRCNVAEHEKLILLAQLKPEKDSDEAVTYSLGKFGQRALDFYSIHVTKESTHPVKPLAQIAGNRYASVPVGKALSDACMGTIASFLSKYQDIIIEHQKVVKGNQKRLESLRELAGKENLEYPSVTLPPQPHTKEGVDAYNEVIARVRMWVNLNLWQKLKLSRDDAKPLLRLKGFPSFPLVERQANEVDWWDMVCNVKKLINEKKEDGKVFWQNLAGYKRQEALRPYLSSEEDRKKGKKFARYQLGDLLNHLEKKHGEDWGKVYDEAWERIDKKVEGLSKHIKLEEERRSEDAQSKAALTDWLRAKASFVIEGLKEADKDEFCRCELKLQKWYGDLRGKPFAIEAENSILDISGFSKQYNCAFIWQKDGVKKLNLYLIINYFKGGKLRFKKIKPEAFEANRFYTVINKKSGEIVPMEVNFNFDDPNLIILPLAFGKRQGREFIWNDLLSLETGSLKLANGRVIEKTLYNRRTRQDEPALFVALTFERREVLDSSNIKPMNLIGVDRGENIPAVIALTDPEGCPLSRFKDSLGNPTHILRIGESYKEKQRTIQAKKEVEQRRAGGYSRKYASKAKNLADDMVRNTARDLLYYAVTQDAMLIFENLSRGFGRQGKRTFMAERQYTRMEDWLTAKLAYEGLPSKTYLSKTLAQYTSKTCSNCGFTITSADYDRMLEKLKKTATGWMTTINGKELKVEGQITYYNRYKRQNVVKDLSVELDRLSEESVNNDISSWTKGRSGEALSLLKKRFSHRPVQEKFVCLNCGFETHADEQAALNIARSWLFLRSQEYKKYQTNKTTGNTDKRAFVETWQSFYRKKLKEVWKPAV

SEQ ID NO: 47278 - protein, 978 aa, synthetic construct
  REGION 1..978: note = engineered CasX variant
QEIKRINKIRRRLVKDSNTKKAGKTGPMKTLLVRVMTPDLRERLENLRKKPENIPQPISNTSRANLNKLLTDYTEMKKAILHVYWEEFQKDPVGLMSRVAQPASKKIDQNKLKPEMDEKGNLTTAGFACSQCGQPLFVYKLEQVSEKGKAYTNYFGRCNVAEHEKLIKLAQLKPEKDSDEAVTYSLGKFGQRALDFYSIHVTKESTHPVKPLAQIAGNRYASGPVGKALSDACMGTIASFLSKYQDIIIEHQKVVKGNQKRLESLRELAGKENLEYPSVTLPPQPHTKEGVDAYNEVIARVRMWVNLNLWQKLKLSRDDAKPLLRLKGFPSFPLVERQANEVDWWDMVCNVKKLINEKKEDGKVFWQNLAGYKRQEALRPYLSSEEDRKKGKKFARYQLGDLLNHLEKKHGEDWGKVYDEAWERIDKKVEGLSKHIKLEEERRSEDAQSKAALTDWLRAKASFVIEGLKEADKDEFCRCELKLQKWYGDLRGKPFAIEAENSILDISGFSKQYNCAFIWQKDGVKKLNLYLIINYFKGGKLRFKKIKPEAFEANRFYTVINKKSGEIVPMEVNFNFDDPNLIILPLAFGKRQGREFIWNDLLSLETGSLKLANGRVIEKTLYNRRTRQDEPALFVALTFERREVLDSSNIKPMNLIGVDRGENIPAVIALTDPEGCPLSRFKDSLGNPTHILRIGESYKEKQRTIQAKKEVEQRRAGGYSRKYASKAKNLADDMVRNTARDLLYYAVTQDAMLIFENLSRGFGRQGKRTFMAERQYTRMEDWLTAKLAYEGLPSKTYLSKTLAQYTSKTCSNCGFTITSADYDRMLEKLKKTATGWMTTINGKELKVEGQITYYNRYKRQNVVKDLSVELDRLSEESVNNDISSWTKGRSGEALSLLKKRFSHRPVQEKFVCLNCGFETHADEQAALNIARSWLFLRSQEYKKYQTNKTTGNTDKRAFVETWQSFYRKKLKEVWKPAV

SEQ ID NO: 47279 - protein, 977 aa, synthetic construct
  REGION 1..977: note = engineered CasX variant
QEIKRINKIRRRLVKDSNTKKAGKTGPMKTLLVRVMTPDLRERLENLRKKPENIPQPISNTSRANLNKLLTDYTEMKKAILHVYWEEFQKDPVGLMSRVAQPASKKIDQNKLKPEMDEKGNLTTAGFACSQCGQPLFVYKLEQVSEKGKAYTNYFGRCNVAEHEKLILLAQLKPEKDSDEAVTYSLGKFGQRALDFYSIHVTKESTHPVKPLAQIAGNRYASPVGKALSDACMGTIASFLSKYQDIIIEHQKVVKGNQKRLESLRELAGKENLEYPSVTLPPQPHTKEGVDAYNEVIARVRMWVNLNLWQKLKLSRDDAKPLLRLKGFPSFPLVERQANEVDWWDMVCNVKKLINEKKEDGKVFWQNLAGYKRQEALRPYLSSEEDRKKGKKFARYQLGDLLNHLEKKHGEDWGKVYDEAWERIDKKVEGLSKHIKLEEERRSEDAQSKAALTDWLRAKASFVIEGLKEADKDEFCRCELKLQKWYGDLRGKPFAIEAENSILDISGFSKQYNCAFIWQKDGVKKLNLYLIINYFKGGKLRFKKIKPEAFEANRFYTVINKKSGEIVPMEVNFNFDDPNLIILPLAFGKRQGREFIWNDLLSLETGSLKLANGRVIEKTLYNRRTRQDEPALFVALTFERREVLDSSNIKPMNLIGVDRGENIPAVIALTDPEGCPLSRFKDSLGNPTHILRIGESYKEKQRTIQAKKEVEQRRAGGYSRKYASKAKNLADDMVRNTARDLLYYAVTQDAMLIFENLSRGFGRQGKRTFMAERQYTRMEDWLTAKLAYEGLPSKTYLSKTLAQYTSKTCSNCGFTITSADYDRMLEKLKKTATGWMTTINGKELKVEGQITYYNRYKRQNVVKDLSVELDRLSEESVNNDISSWTKGRSGEALSLLKKRFSHRPVQEKFVCLNCGFETHADEQAALNIARSWLFLRSQEYKKYQTNKTTGNTDKRAFVETWQSFYRKKLKEVWKPAV

SEQ ID NO: 47280 - protein, 978 aa, synthetic construct
  REGION 1..978: note = engineered CasX variant
QEIKRINKIRRRLVKDSNTKKAGKTGPMKTLLVRVMTPDLRERLENLRKKPENIPQPISNTSRANLNKLLTDYTEMKKAILHVYWEEFQKDPVGLMSRVAQPASKKIDQNKLKPEMDEKGNLTTAGFACSQCGQPLFVYKLEQVSEKGKAYTNYFGRCNVAEHEKLILLAQLKPEKDSDEAVTYSLGKFGQRALDFYSIHVTKESTHPVKPLAQIAGNRYASYPVGKALSDACMGTIASFLSKYQDIIIEHQKVVKGNQKRLESLRELAGKENLEYPSVTLPPQPHTKEGVDAYNEVIARVRMWVNLNLWQKLKLSRDDAKPLLRLKGFPSFPLVERQANEVDWWDMVCNVKKLINEKKEDGKVFWQNLAGYKRQEALRPYLSSEEDRKKGKKFARYQLGDLLWHLEKKHGEDWGKVYDEAWERIDKKVEGLSKHIKLEEERRSEDAQSKAALTDWLRAKASFVIEGLKEADKDEFCRCELKLQKWYGDLRGKPFAIEAENSILDISGFSKQYNCAFIWQKDGVKKLNLYLIINYFKGGKLRFKKIKPEAFEANRFYTVINKKSGEIVPMEVNFNFDDPNLIILPLAFGKRQGREFIWNDLLSLETGSLKLANGRVIEKTLYNRRTRQDEPALFVALTFERREVLDSSNIKPMNLIGVDRGENIPAVIALTDPEGCPLSRFKDSLGNPTHILRIGESYKEKQRTIQAKKEVEQRRAGGYSRKYASKAKNLADDMVRNTARDLLYYAVTQDAMLIFENLSRGFGRQGKRTFMAERQYTRMEDWLTAKLAYEGLPSKTYLSKTLAQYTSKTCSNCGFTITSADYDRMLEKLKKTATGWMTTINGKELKVEGQITYYNRYKRQNVVKDLSVELDRLSEESVNNDISSWTKGRSGEALSLLKKRFSHRPVQEKFVCLNCGFETHADEQAALNIARSWLFLRSQEYKKYQTNKTTGNTDKRAFVETWQSFYRKKLKEVWKPAV

SEQ ID NO: 47281 - protein, 978 aa, synthetic construct
  REGION 1..978: note = engineered CasX variant
QEIKRINKIRRRLVKDSNTKKAGKTGPMKTLLVRVMTPDLRERLENLRKKPENIPQPISNTSRANLNKLLTDYTEMKKAILHVYWEEFQKDPVGLMSRVAQPASKKIDQNKLKPEMDEKGNLTTAGFACSQCGQPLFVYKLEQVSEKGKAYTNYFGRCNVAEHEKLILLAQLKPEKDSDEAVTYSLGKFGQRALDFYSIHVTKESTHPVKPLAQIAGNRYASHPVGKALSDACMGTIASFLSKYQDIIIEHQKVVKGNQKRLESLRELAGKENLEYPSVTLPPQPHTKEGVDAYNEVIARVRMWVNLNLWQKLKLSRDDAKPLLRLKGFPSFPLVERQANEVDWWDMVCNVKKLINEKKEDGKVFWQNLAGYKRQEALRPYLSSEEDRKKGKKFARYQLGDLLWHLEKKHGEDWGKVYDEAWERIDKKVEGLSKHIKLEEERRSEDAQSKAALTDWLRAKASFVIEGLKEADKDEFCRCELKLQKWYGDLRGKPFAIEAENSILDISGFSKQYNCAFIWQKDGVKKLNLYLIINYFKGGKLRFKKIKPEAFEANRFYTVINKKSGEIVPMEVNFNFDDPNLIILPLAFGKRQGREFIWNDLLSLETGSLKLANGRVIEKTLYNRRTRQDEPALFVALTFERREVLDSSNIKPMNLIGVDRGENIPAVIALTDPEGCPLSRFKDSLGNPTHILRIGESYKEKQRTIQAKKEVEQRRAGGYSRKYASKAKNLADDMVRNTARDLLYYAVTQDAMLIFENLSRGFGRQGKRTFMAERQYTRMEDWLTAKLAYEGLPSKTYLSKTLAQYTSKTCSNCGFTITSADYDRMLEKLKKTATGWMTTINGKELKVEGQITYYNRYKRQNVVKDLSVELDRLSEESVNNDISSWTKGRSGEALSLLKKRFSHRPVQEKFVCLNCGFETHADEQAALNIARSWLFLRSQEYKKYQTNKTTGNTDKRAFVETWQSFYRKKLKEVWKPAV

SEQ ID NO: 47282 - protein, 978 aa, synthetic construct
  REGION 1..978: note = engineered CasX variant
QEIKRINKIRRRLVKDSNTKKAGKTGPMKTLLVRVMTPDLRERLENLRKKPENIPQPISNTSRANLNKLLTDYTEMKKAILHVYWEEFQKDPVGLMSRVAQPASKKIDQNKLKPEMDEKGNLTTAGFACSQCGQPLFVYKLEQVSEKGKAYTNYFGRCNVAEHEKLILLAQLKPEKDSDEAVTYSLGKFGQRALDFYSIHVTKESTHPVKPLAQIAGNRYASSPVGKALSDACMGTIASFLSKYQDIIIEHQKVVKGNQKRLESLRELAGKENLEYPSVTLPPQPHTKEGVDAYNEVIARVRMWVNLNLWQKLKLSRDDAKPLLRLKGFPSFPLVERQANEVDWWDMVCNVKKLINEKKEDGKVFWQNLAGYKRQEALRPYLSSEEDRKKGKKFARYQLGDLLWHLEKKHGEDWGKVYDEAWERIDKKVEGLSKHIKLEEERRSEDAQSKAALTDWLRAKASFVIEGLKEADKDEFCRCELKLQKWYGDLRGKPFAIEAENSILDISGFSKQYNCAFIWQKDGVKKLNLYLIINYFKGGKLRFKKIKPEAFEANRFYTVINKKSGEIVPMEVNFNFDDPNLIILPLAFGKRQGREFIWNDLLSLETGSLKLANGRVIEKTLYNRRTRQDEPALFVALTFERREVLDSSNIKPMNLIGVDRGENIPAVIALTDPEGCPLSRFKDSLGNPTHILRIGESYKEKQRTIQAKKEVEQRRAGGYSRKYASKAKNLADDMVRNTARDLLYYAVTQDAMLIFENLSRGFGRQGKRTFMAERQYTRMEDWLTAKLAYEGLPSKTYLSKTLAQYTSKTCSNCGFTITSADYDRMLEKLKKTATGWMTTINGKELKVEGQITYYNRYKRQNVVKDLSVELDRLSEESVNNDISSWTKGRSGEALSLLKKRFSHRPVQEKFVCLNCGFETHADEQAALNIARSWLFLRSQEYKKYQTNKTTGNTDKRAFVETWQSFYRKKLKEVWKPAV

SEQ ID NO: 47283 - protein, 978 aa, synthetic construct
  REGION 1..978: note = engineered CasX variant
QEIKRINKIRRRLVKDSNTKKAGKTGPMKTLLVRVMTPDLRERLENLRKKPENIPQPISNTSRANLNKLLTDYTEMKKAILHVYWEEFQKDPVGLMSRVAQPASKKIDQNKLKPEMDEKGNLTTAGFACSQCGQPLFVYKLEQVSEKGKAYTNYFGRCNVAEHEKLILLAQLKPEKDSDEAVTYSLGKFGQRALDFYSIHVTKESTHPVKPLAQIAGNRYASTPVGKALSDACMGTIASFLSKYQDIIIEHQKVVKGNQKRLESLRELAGKENLEYPSVTLPPQPHTKEGVDAYNEVIARVRMWVNLNLWQKLKLSRDDAKPLLRLKGFPSFPLVERQANEVDWWDMVCNVKKLINEKKEDGKVFWQNLAGYKRQEALRPYLSSEEDRKKGKKFARYQLGDLLWHLEKKHGEDWGKVYDEAWERIDKKVEGLSKHIKLEEERRSEDAQSKAALTDWLRAKASFVIEGLKEADKDEFCRCELKLQKWYGDLRGKPFAIEAENSILDISGFSKQYNCAFIWQKDGVKKLNLYLIINYFKGGKLRFKKIKPEAFEANRFYTVINKKSGEIVPMEVNFNFDDPNLIILPLAFGKRQGREFIWNDLLSLETGSLKLANGRVIEKTLYNRRTRQDEPALFVALTFERREVLDSSNIKPMNLIGVDRGENIPAVIALTDPEGCPLSRFKDSLGNPTHILRIGESYKEKQRTIQAKKEVEQRRAGGYSRKYASKAKNLADDMVRNTARDLLYYAVTQDAMLIFENLSRGFGRQGKRTFMAERQYTRMEDWLTAKLAYEGLPSKTYLSKTLAQYTSKTCSNCGFTITSADYDRMLEKLKKTATGWMTTINGKELKVEGQITYYNRYKRQNVVKDLSVELDRLSEESVNNDISSWTKGRSGEALSLLKKRFSHRPVQEKFVCLNCGFETHADEQAALNIARSWLFLRSQEYKKYQTNKTTGNTDKRAFVETWQSFYRKKLKEVWKPAV

SEQ ID NO: 47284 - protein, 978 aa, synthetic construct
  REGION 1..978: note = engineered CasX variant
QEIKRINKIRRRLVKDSNTKKAGKTGPMKTLLVRVMTPDLRERLENLRKKPENIPQPISNTSRANLNKLLTDYTEMKKAILHVYWEEFQKDPVGLMSRVAQPASKKIDQNKLKPEMDEKGNLTTAGFACSQCGQPLFVYKLEQVSEKGKAYTNYFGRCNVAEHEKLILLAQLKPEKDSDEAVTYSLGKFGQRALDFYSIHVTKESTHPVKPLAQIAGNRYASAPVGKALSDACMGTIASFLSKYQDIIIEHQKVVKGNQKRLESLRELAGKENLEYPSVTLPPQPHTKEGVDAYNEVIARVRMWVNLNLWQKLKLSRDDAKPLLRLKGFPSFPLVERQANEVDWWDMVCNVKKLINEKKEDGKVFWQNLAGYKRQEALRPYLSSEEDRKKGKKFARYQLGDLLWHLEKKHGEDWGKVYDEAWERIDKKVEGLSKHIKLEEERRSEDAQSKAALTDWLRAKASFVIEGLKEADKDEFCRCELKLQKWYGDLRGKPFAIEAENSILDISGFSKQYNCAFIWQKDGVKKLNLYLIINYFKGGKLRFKKIKPEAFEANRFYTVINKKSGEIVPMEVNFNFDDPNLIILPLAFGKRQGREFIWNDLLSLETGSLKLANGRVIEKTLYNRRTRQDEPALFVALTFERREVLDSSNIKPMNLIGVDRGENIPAVIALTDPEGCPLSRFKDSLGNPTHILRIGESYKEKQRTIQAKKEVEQRRAGGYSRKYASKAKNLADDMVRNTARDLLYYAVTQDAMLIFENLSRGFGRQGKRTFMAERQYTRMEDWLTAKLAYEGLPSKTYLSKTLAQYTSKTCSNCGFTITSADYDRMLEKLKKTATGWMTTINGKELKVEGQITYYNRYKRQNVVKDLSVELDRLSEESVNNDISSWTKGRSGEALSLLKKRFSHRPVQEKFVCLNCGFETHADEQAALNIARSWLFLRSQEYKKYQTNKTTGNTDKRAFVETWQSFYRKKLKEVWKPAV

SEQ ID NO: 47285 - protein, 978 aa, synthetic construct
  REGION 1..978: note = engineered CasX variant
QEIKRINKIRRRLVKDSNTKKAGKTGPMKTLLVRVMTPDLRERLENLRKKPENIPQPISNTSRANLNKLLTDYTEMKKAILHVYWEEFQKDPVGLMSRVAQPASKKIDQNKLKPEMDEKGNLTTAGFACSQCGQPLFVYKLEQVSEKGKAYTNYFGRCNVAEHEKLILLAQLKPEKDSDEAVTYSLGKFGQRALDFYSIHVTKESTHPVKPLAQIAGNRYASVPVGKALSDACMGTIASFLSKYQDIIIEHQKVVKGNQKRLESLRELAGKENLEYPSVTLPPQPHTKEGVDAYNEVIARVRMWVNLNLWQKLKLSRDDAKPLLRLKGFPSFPLVERQANEVDWWDMVCNVKKLINEKKEDGKVFWQNLAGYKRQEALRPYLSSEEDRKKGKKFARYQLGDLLWHLEKKHGEDWGKVYDEAWERIDKKVEGLSKHIKLEEERRSEDAQSKAALTDWLRAKASFVIEGLKEADKDEFCRCELKLQKWYGDLRGKPFAIEAENSILDISGFSKQYNCAFIWQKDGVKKLNLYLIINYFKGGKLRFKKIKPEAFEANRFYTVINKKSGEIVPMEVNFNFDDPNLIILPLAFGKRQGREFIWNDLLSLETGSLKLANGRVIEKTLYNRRTRQDEPALFVALTFERREVLDSSNIKPMNLIGVDRGENIPAVIALTDPEGCPLSRFKDSLGNPTHILRIGESYKEKQRTIQAKKEVEQRRAGGYSRKYASKAKNLADDMVRNTARDLLYYAVTQDAMLIFENLSRGFGRQGKRTFMAERQYTRMEDWLTAKLAYEGLPSKTYLSKTLAQYTSKTCSNCGFTITSADYDRMLEKLKKTATGWMTTINGKELKVEGQITYYNRYKRQNVVKDLSVELDRLSEESVNNDISSWTKGRSGEALSLLKKRFSHRPVQEKFVCLNCGFETHADEQAALNIARSWLFLRSQEYKKYQTNKTTGNTDKRAFVETWQSFYRKKLKEVWKPAV

SEQ ID NO: 47286 - protein, 978 aa, synthetic construct
  REGION 1..978: note = engineered CasX variant
QEIKRINKIRRRLVKDSNTKKAGKTGPMKTLLVRVMTPDLRERLENLRKKPENIPQPISNTSRANLNKLLTDYTEMKKAILHVYWEEFQKDPVGLMSRVAQPASKKIDQNKLKPEMDEKGNLTTAGFACSQCGQPLFVYKLEQVSEKGKAYTNYFGRCNVAEHEKLIKLAQLKPEKDSDEAVTYSLGKFGQRALDFYSIHVTKESTHPVKPLAQIAGNRYASGPVGKALSDACMGTIASFLSKYQDIIIEHQKVVKGNQKRLESLRELAGKENLEYPSVTLPPQPHTKEGVDAYNEVIARVRMWVNLNLWQKLKLSRDDAKPLLRLKGFPSFPLVERQANEVDWWDMVCNVKKLINEKKEDGKVFWQNLAGYKRQEALRPYLSSEEDRKKGKKFARYQLGDLLWHLEKKHGEDWGKVYDEAWERIDKKVEGLSKHIKLEEERRSEDAQSKAALTDWLRAKASFVIEGLKEADKDEFCRCELKLQKWYGDLRGKPFAIEAENSILDISGFSKQYNCAFIWQKDGVKKLNLYLIINYFKGGKLRFKKIKPEAFEANRFYTVINKKSGEIVPMEVNFNFDDPNLIILPLAFGKRQGREFIWNDLLSLETGSLKLANGRVIEKTLYNRRTRQDEPALFVALTFERREVLDSSNIKPMNLIGVDRGENIPAVIALTDPEGCPLSRFKDSLGNPTHILRIGESYKEKQRTIQAKKEVEQRRAGGYSRKYASKAKNLADDMVRNTARDLLYYAVTQDAMLIFENLSRGFGRQGKRTFMAERQYTRMEDWLTAKLAYEGLPSKTYLSKTLAQYTSKTCSNCGFTITSADYDRMLEKLKKTATGWMTTINGKELKVEGQITYYNRYKRQNVVKDLSVELDRLSEESVNNDISSWTKGRSGEALSLLKKRFSHRPVQEKFVCLNCGFETHADEQAALNIARSWLFLRSQEYKKYQTNKTTGNTDKRAFVETWQSFYRKKLKEVWKPAV

SEQ ID NO: 47287 - protein, 977 aa, synthetic construct
  REGION 1..977: note = engineered CasX variant
QEIKRINKIRRRLVKDSNTKKAGKTGPMKTLLVRVMTPDLRERLENLRKKPENIPQPISNTSRANLNKLLTDYTEMKKAILHVYWEEFQKDPVGLMSRVAQPASKKIDQNKLKPEMDEKGNLTTAGFACSQCGQPLFVYKLEQVSEKGKAYTNYFGRCNVAEHEKLILLAQLKPEKDSDEAVTYSLGKFGQRALDFYSIHVTKESTHPVKPLAQIAGNRYASPVGKALSDACMGTIASFLSKYQDIIIEHQKVVKGNQKRLESLRELAGKENLEYPSVTLPPQPHTKEGVDAYNEVIARVRMWVNLNLWQKLKLSRDDAKPLLRLKGFPSFPLVERQANEVDWWDMVCNVKKLINEKKEDGKVFWQNLAGYKRQEALRPYLSSEEDRKKGKKFARYQLGDLLWHLEKKHGEDWGKVYDEAWERIDKKVEGLSKHIKLEEERRSEDAQSKAALTDWLRAKASFVIEGLKEADKDEFCRCELKLQKWYGDLRGKPFAIEAENSILDISGFSKQYNCAFIWQKDGVKKLNLYLIINYFKGGKLRFKKIKPEAFEANRFYTVINKKSGEIVPMEVNFNFDDPNLIILPLAFGKRQGREFIWNDLLSLETGSLKLANGRVIEKTLYNRRTRQDEPALFVALTFERREVLDSSNIKPMNLIGVDRGENIPAVIALTDPEGCPLSRFKDSLGNPTHILRIGESYKEKQRTIQAKKEVEQRRAGGYSRKYASKAKNLADDMVRNTARDLLYYAVTQDAMLIFENLSRGFGRQGKRTFMAERQYTRMEDWLTAKLAYEGLPSKTYLSKTLAQYTSKTCSNCGFTITSADYDRMLEKLKKTATGWMTTINGKELKVEGQITYYNRYKRQNVVKDLSVELDRLSEESVNNDISSWTKGRSGEALSLLKKRFSHRPVQEKFVCLNCGFETHADEQAALNIARSWLFLRSQEYKKYQTNKTTGNTDKRAFVETWQSFYRKKLKEVWKPAV

SEQ ID NO: 47288 - protein, 978 aa, synthetic construct
  REGION 1..978: note = engineered CasX variant
QEIKRINKIRRRLVKDSNTKKAGKTGPMKTLLVRVMTPDLRERLENLRKKPENIPQPISNTSRANLNKLLTDYTEMKKAILHVYWEEFQKDPVGLMSRVAQPASKKIDQNKLKPEMDEKGNLTTAGFACSQCGQPLFVYKLEQVSEKGKAYTNYFGRCNVAEHEKLILLAQLKPEKDSDEAVTYSLGKFGQRALDFYSIHVTKESTHPVKPLAQIAGNRYASYPVGKALSDACMGTIASFLSKYQDIIIEHQKVVKGNQKRLESLRELAGKENLEYPSVTLPPQPHTKEGVDAYNEVIARVRMWVNLNLWQKLKLSRDDAKPLLRLKGFPSFPLVERQANEVDWWDMVCNVKKLINEKKEDGKVFWQNLAGYKRQEALRPYLSSEEDRKKGKKFARYQLGDLLLHLYKKHGEDWGKVYDEAWERIDKKVEGLSKHIKLEEERRSEDAQSKAALTDWLRAKASFVIEGLKEADKDEFCRCELKLQKWYGDLRGKPFAIEAENSILDISGFSKQYNCAFIWQKDGVKKLNLYLIINYFKGGKLRFKKIKPEAFEANRFYTVINKKSGEIVPMEVNFNFDDPNLIILPLAFGKRQGREFIWNDLLSLETGSLKLANGRVIEKTLYNRRTRQDEPALFVALTFERREVLDSSNIKPMNLIGVDRGENIPAVIALTDPEGCPLSRFKDSLGNPTHILRIGESYKEKQRTIQAKKEVEQRRAGGYSRKYASKAKNLADDMVRNTARDLLYYAVTQDAMLIFENLSRGFGRQGKRTFMAERQYTRMEDWLTAKLAYEGLPSKTYLSKTLAQYTSKTCSNCGFTITSADYDRMLEKLKKTATGWMTTINGKELKVEGQITYYNRYKRQNVVKDLSVELDRLSEESVNNDISSWTKGRSGEALSLLKKRFSHRPVQEKFVCLNCGFETHADEQAALNIARSWLFLRSQEYKKYQTNKTTGNTDKRAFVETWQSFYRKKLKEVWKPAV

SEQ ID NO: 47289 - protein, 978 aa, synthetic construct
  REGION 1..978: note = engineered CasX variant
QEIKRINKIRRRLVKDSNTKKAGKTGPMKTLLVRVMTPDLRERLENLRKKPENIPQPISNTSRANLNKLLTDYTEMKKAILHVYWEEFQKDPVGLMSRVAQPASKKIDQNKLKPEMDEKGNLTTAGFACSQCGQPLFVYKLEQVSEKGKAYTNYFGRCNVAEHEKLILLAQLKPEKDSDEAVTYSLGKFGQRALDFYSIHVTKESTHPVKPLAQIAGNRYASHPVGKALSDACMGTIASFLSKYQDIIIEHQKVVKGNQKRLESLRELAGKENLEYPSVTLPPQPHTKEGVDAYNEVIARVRMWVNLNLWQKLKLSRDDAKPLLRLKGFPSFPLVERQANEVDWWDMVCNVKKLINEKKEDGKVFWQNLAGYKRQEALRPYLSSEEDRKKGKKFARYQLGDLLLHLYKKHGEDWGKVYDEAWERIDKKVEGLSKHIKLEEERRSEDAQSKAALTDWLRAKASFVIEGLKEADKDEFCRCELKLQKWYGDLRGKPFAIEAENSILDISGFSKQYNCAFIWQKDGVKKLNLYLIINYFKGGKLRFKKIKPEAFEANRFYTVINKKSGEIVPMEVNFNFDDPNLIILPLAFGKRQGREFIWNDLLSLETGSLKLANGRVIEKTLYNRRTRQDEPALFVALTFERREVLDSSNIKPMNLIGVDRGENIPAVIALTDPEGCPLSRFKDSLGNPTHILRIGESYKEKQRTIQAKKEVEQRRAGGYSRKYASKAKNLADDMVRNTARDLLYYAVTQDAMLIFENLSRGFGRQGKRTFMAERQYTRMEDWLTAKLAYEGLPSKTYLSKTLAQYTSKTCSNCGFTITSADYDRMLEKLKKTATGWMTTINGKELKVEGQITYYNRYKRQNVVKDLSVELDRLSEESVNNDISSWTKGRSGEALSLLKKRFSHRPVQEKFVCLNCGFETHADEQAALNIARSWLFLRSQEYKKYQTNKTTGNTDKRAFVETWQSFYRKKLKEVWKPAV

SEQ ID NO: 47290 - protein, 978 aa, synthetic construct
  REGION 1..978: note = engineered CasX variant
QEIKRINKIRRRLVKDSNTKKAGKTGPMKTLLVRVMTPDLRERLENLRKKPENIPQPISNTSRANLNKLLTDYTEMKKAILHVYWEEFQKDPVGLMSRVAQPASKKIDQNKLKPEMDEKGNLTTAGFACSQCGQPLFVYKLEQVSEKGKAYTNYFGRCNVAEHEKLILLAQLKPEKDSDEAVTYSLGKFGQRALDFYSIHVTKESTHPVKPLAQIAGNRYASSPVGKALSDACMGTIASFLSKYQDIIIEHQKVVKGNQKRLESLRELAGKENLEYPSVTLPPQPHTKEGVDAYNEVIARVRMWVNLNLWQKLKLSRDDAKPLLRLKGFPSFPLVERQANEVDWWDMVCNVKKLINEKKEDGKVFWQNLAGYKRQEALRPYLSSEEDRKKGKKFARYQLGDLLLHLYKKHGEDWGKVYDEAWERIDKKVEGLSKHIKLEEERRSEDAQSKAALTDWLRAKASFVIEGLKEADKDEFCRCELKLQKWYGDLRGKPFAIEAENSILDISGFSKQYNCAFIWQKDGVKKLNLYLIINYFKGGKLRFKKIKPEAFEANRFYTVINKKSGEIVPMEVNFNFDDPNLIILPLAFGKRQGREFIWNDLLSLETGSLKLANGRVIEKTLYNRRTRQDEPALFVALTFERREVLDSSNIKPMNLIGVDRGENIPAVIALTDPEGCPLSRFKDSLGNPTHILRIGESYKEKQRTIQAKKEVEQRRAGGYSRKYASKAKNLADDMVRNTARDLLYYAVTQDAMLIFENLSRGFGRQGKRTFMAERQYTRMEDWLTAKLAYEGLPSKTYLSKTLAQYTSKTCSNCGFTITSADYDRMLEKLKKTATGWMTTINGKELKVEGQITYYNRYKRQNVVKDLSVELDRLSEESVNNDISSWTKGRSGEALSLLKKRFSHRPVQEKFVCLNCGFETHADEQAALNIARSWLFLRSQEYKKYQTNKTTGNTDKRAFVETWQSFYRKKLKEVWKPAV

SEQ ID NO: 47291 - protein, 978 aa, synthetic construct
  REGION 1..978: note = engineered CasX variant
QEIKRINKIRRRLVKDSNTKKAGKTGPMKTLLVRVMTPDLRERLENLRKKPENIPQPISNTSRANLNKLLTDYTEMKKAILHVYWEEFQKDPVGLMSRVAQPASKKIDQNKLKPEMDEKGNLTTAGFACSQCGQPLFVYKLEQVSEKGKAYTNYFGRCNVAEHEKLILLAQLKPEKDSDEAVTYSLGKFGQRALDFYSIHVTKESTHPVKPLAQIAGNRYASTPVGKALSDACMGTIASFLSKYQDIIIEHQKVVKGNQKRLESLRELAGKENLEYPSVTLPPQPHTKEGVDAYNEVIARVRMWVNLNLWQKLKLSRDDAKPLLRLKGFPSFPLVERQANEVDWWDMVCNVKKLINEKKEDGKVFWQNLAGYKRQEALRPYLSSEEDRKKGKKFARYQLGDLLLHLYKKHGEDWGKVYDEAWERIDKKVEGLSKHIKLEEERRSEDAQSKAALTDWLRAKASFVIEGLKEADKDEFCRCELKLQKWYGDLRGKPFAIEAENSILDISGFSKQYNCAFIWQKDGVKKLNLYLIINYFKGGKLRFKKIKPEAFEANRFYTVINKKSGEIVPMEVNFNFDDPNLIILPLAFGKRQGREFIWNDLLSLETGSLKLANGRVIEKTLYNRRTRQDEPALFVALTFERREVLDSSNIKPMNLIGVDRGENIPAVIALTDPEGCPLSRFKDSLGNPTHILRIGESYKEKQRTIQAKKEVEQRRAGGYSRKYASKAKNLADDMVRNTARDLLYYAVTQDAMLIFENLSRGFGRQGKRTFMAERQYTRMEDWLTAKLAYEGLPSKTYLSKTLAQYTSKTCSNCGFTITSADYDRMLEKLKKTATGWMTTINGKELKVEGQITYYNRYKRQNVVKDLSVELDRLSEESVNNDISSWTKGRSGEALSLLKKRFSHRPVQEKFVCLNCGFETHADEQAALNIARSWLFLRSQEYKKYQTNKTTGNTDKRAFVETWQSFYRKKLKEVWKPAV

SEQ ID NO: 47292 - protein, 978 aa, synthetic construct
  REGION 1..978: note = engineered CasX variant
QEIKRINKIRRRLVKDSNTKKAGKTGPMKTLLVRVMTPDLRERLENLRKKPENIPQPISNTSRANLNKLLTDYTEMKKAILHVYWEEFQKDPVGLMSRVAQPASKKIDQNKLKPEMDEKGNLTTAGFACSQCGQPLFVYKLEQVSEKGKAYTNYFGRCNVAEHEKLILLAQLKPEKDSDEAVTYSLGKFGQRALDFYSIHVTKESTHPVKPLAQIAGNRYASAPVGKALSDACMGTIASFLSKYQDIIIEHQKVVKGNQKRLESLRELAGKENLEYPSVTLPPQPHTKEGVDAYNEVIARVRMWVNLNLWQKLKLSRDDAKPLLRLKGFPSFPLVERQANEVDWWDMVCNVKKLINEKKEDGKVFWQNLAGYKRQEALRPYLSSEEDRKKGKKFARYQLGDLLLHLYKKHGEDWGKVYDEAWERIDKKVEGLSKHIKLEEERRSEDAQSKAALTDWLRAKASFVIEGLKEADKDEFCRCELKLQKWYGDLRGKPFAIEAENSILDISGFSKQYNCAFIWQKDGVKKLNLYLIINYFKGGKLRFKKIKPEAFEANRFYTVINKKSGEIVPMEVNFNFDDPNLIILPLAFGKRQGREFIWNDLLSLETGSLKLANGRVIEKTLYNRRTRQDEPALFVALTFERREVLDSSNIKPMNLIGVDRGENIPAVIALTDPEGCPLSRFKDSLGNPTHILRIGESYKEKQRTIQAKKEVEQRRAGGYSRKYASKAKNLADDMVRNTARDLLYYAVTQDAMLIFENLSRGFGRQGKRTFMAERQYTRMEDWLTAKLAYEGLPSKTYLSKTLAQYTSKTCSNCGFTITSADYDRMLEKLKKTATGWMTTINGKELKVEGQITYYNRYKRQNVVKDLSVELDRLSEESVNNDISSWTKGRSGEALSLLKKRFSHRPVQEKFVCLNCGFETHADEQAALNIARSWLFLRSQEYKKYQTNKTTGNTDKRAFVETWQSFYRKKLKEVWKPAV

SEQ ID NO: 47293 - protein, 978 aa, synthetic construct
  REGION 1..978: note = engineered CasX variant
QEIKRINKIRRRLVKDSNTKKAGKTGPMKTLLVRVMTPDLRERLENLRKKPENIPQPISNTSRANLNKLLTDYTEMKKAILHVYWEEFQKDPVGLMSRVAQPASKKIDQNKLKPEMDEKGNLTTAGFACSQCGQPLFVYKLEQVSEKGKAYTNYFGRCNVAEHEKLILLAQLKPEKDSDEAVTYSLGKFGQRALDFYSIHVTKESTHPVKPLAQIAGNRYASVPVGKALSDACMGTIASFLSKYQDIIIEHQKVVKGNQKRLESLRELAGKENLEYPSVTLPPQPHTKEGVDAYNEVIARVRMWVNLNLWQKLKLSRDDAKPLLRLKGFPSFPLVERQANEVDWWDMVCNVKKLINEKKEDGKVFWQNLAGYKRQEALRPYLSSEEDRKKGKKFARYQLGDLLLHLYKKHGEDWGKVYDEAWERIDKKVEGLSKHIKLEEERRSEDAQSKAALTDWLRAKASFVIEGLKEADKDEFCRCELKLQKWYGDLRGKPFAIEAENSILDISGFSKQYNCAFIWQKDGVKKLNLYLIINYFKGGKLRFKKIKPEAFEANRFYTVINKKSGEIVPMEVNFNFDDPNLIILPLAFGKRQGREFIWNDLLSLETGSLKLANGRVIEKTLYNRRTRQDEPALFVALTFERREVLDSSNIKPMNLIGVDRGENIPAVIALTDPEGCPLSRFKDSLGNPTHILRIGESYKEKQRTIQAKKEVEQRRAGGYSRKYASKAKNLADDMVRNTARDLLYYAVTQDAMLIFENLSRGFGRQGKRTFMAERQYTRMEDWLTAKLAYEGLPSKTYLSKTLAQYTSKTCSNCGFTITSADYDRMLEKLKKTATGWMTTINGKELKVEGQITYYNRYKRQNVVKDLSVELDRLSEESVNNDISSWTKGRSGEALSLLKKRFSHRPVQEKFVCLNCGFETHADEQAALNIARSWLFLRSQEYKKYQTNKTTGNTDKRAFVETWQSFYRKKLKEVWKPAV

SEQ ID NO: 47294 - protein, 978 aa, synthetic construct
  REGION 1..978: note = engineered CasX variant
QEIKRINKIRRRLVKDSNTKKAGKTGPMKTLLVRVMTPDLRERLENLRKKPENIPQPISNTSRANLNKLLTDYTEMKKAILHVYWEEFQKDPVGLMSRVAQPASKKIDQNKLKPEMDEKGNLTTAGFACSQCGQPLFVYKLEQVSEKGKAYTNYFGRCNVAEHEKLIKLAQLKPEKDSDEAVTYSLGKFGQRALDFYSIHVTKESTHPVKPLAQIAGNRYASGPVGKALSDACMGTIASFLSKYQDIIIEHQKVVKGNQKRLESLRELAGKENLEYPSVTLPPQPHTKEGVDAYNEVIARVRMWVNLNLWQKLKLSRDDAKPLLRLKGFPSFPLVERQANEVDWWDMVCNVKKLINEKKEDGKVFWQNLAGYKRQEALRPYLSSEEDRKKGKKFARYQLGDLLLHLYKKHGEDWGKVYDEAWERIDKKVEGLSKHIKLEEERRSEDAQSKAALTDWLRAKASFVIEGLKEADKDEFCRCELKLQKWYGDLRGKPFAIEAENSILDISGFSKQYNCAFIWQKDGVKKLNLYLIINYFKGGKLRFKKIKPEAFEANRFYTVINKKSGEIVPMEVNFNFDDPNLIILPLAFGKRQGREFIWNDLLSLETGSLKLANGRVIEKTLYNRRTRQDEPALFVALTFERREVLDSSNIKPMNLIGVDRGENIPAVIALTDPEGCPLSRFKDSLGNPTHILRIGESYKEKQRTIQAKKEVEQRRAGGYSRKYASKAKNLADDMVRNTARDLLYYAVTQDAMLIFENLSRGFGRQGKRTFMAERQYTRMEDWLTAKLAYEGLPSKTYLSKTLAQYTSKTCSNCGFTITSADYDRMLEKLKKTATGWMTTINGKELKVEGQITYYNRYKRQNVVKDLSVELDRLSEESVNNDISSWTKGRSGEALSLLKKRFSHRPVQEKFVCLNCGFETHADEQAALNIARSWLFLRSQEYKKYQTNKTTGNTDKRAFVETWQSFYRKKLKEVWKPAV

SEQ ID NO: 47295 - protein, 977 aa, synthetic construct
  REGION 1..977: note = engineered CasX variant
QEIKRINKIRRRLVKDSNTKKAGKTGPMKTLLVRVMTPDLRERLENLRKKPENIPQPISNTSRANLNKLLTDYTEMKKAILHVYWEEFQKDPVGLMSRVAQPASKKIDQNKLKPEMDEKGNLTTAGFACSQCGQPLFVYKLEQVSEKGKAYTNYFGRCNVAEHEKLILLAQLKPEKDSDEAVTYSLGKFGQRALDFYSIHVTKESTHPVKPLAQIAGNRYASPVGKALSDACMGTIASFLSKYQDIIIEHQKVVKGNQKRLESLRELAGKENLEYPSVTLPPQPHTKEGVDAYNEVIARVRMWVNLNLWQKLKLSRDDAKPLLRLKGFPSFPLVERQANEVDWWDMVCNVKKLINEKKEDGKVFWQNLAGYKRQEALRPYLSSEEDRKKGKKFARYQLGDLLLHLYKKHGEDWGKVYDEAWERIDKKVEGLSKHIKLEEERRSEDAQSKAALTDWLRAKASFVIEGLKEADKDEFCRCELKLQKWYGDLRGKPFAIEAENSILDISGFSKQYNCAFIWQKDGVKKLNLYLIINYFKGGKLRFKKIKPEAFEANRFYTVINKKSGEIVPMEVNFNFDDPNLIILPLAFGKRQGREFIWNDLLSLETGSLKLANGRVIEKTLYNRRTRQDEPALFVALTFERREVLDSSNIKPMNLIGVDRGENIPAVIALTDPEGCPLSRFKDSLGNPTHILRIGESYKEKQRTIQAKKEVEQRRAGGYSRKYASKAKNLADDMVRNTARDLLYYAVTQDAMLIFENLSRGFGRQGKRTFMAERQYTRMEDWLTAKLAYEGLPSKTYLSKTLAQYTSKTCSNCGFTITSADYDRMLEKLKKTATGWMTTINGKELKVEGQITYYNRYKRQNVVKDLSVELDRLSEESVNNDISSWTKGRSGEALSLLKKRFSHRPVQEKFVCLNCGFETHADEQAALNIARSWLFLRSQEYKKYQTNKTTGNTDKRAFVETWQSFYRKKLKEVWKPAV

SEQ ID NO: 47296 - protein, 978 aa, synthetic construct
  REGION 1..978: note = engineered CasX variant
QEIKRINKIRRRLVKDSNTKKAGKTGPMKTLLVRVMTPDLRERLENLRKKPENIPQPISNTSRANLNKLLTDYTEMKKAILHVYWEEFQKDPVGLMSRVAQPASKKIDQNKLKPEMDEKGNLTTAGFACSQCGQPLFVYKLEQVSEKGKAYTNYFGRCNVAEHEKLILLAQLKPEKDSDEAVTYSLGKFGQRALDFYSIHVTKESTHPVKPLAQIAGNRYASYPVGKALSDACMGTIASFLSKYQDIIIEHQKVVKGNQKRLESLRELAGKENLEYPSVTLPPQPHTKEGVDAYNEVIARVRMWVNLNLWQKLKLSRDDAKPLLRLKGFPSFPLVERQANEVDWWDMVCNVKKLINEKKEDGKVFWQNLAGYKRQEALRPYLSSEEDRKKGKKFARYQLGDLLLHLEKKHPEDWGKVYDEAWERIDKKVEGLSKHIKLEEERRSEDAQSKAALTDWLRAKASFVIEGLKEADKDEFCRCELKLQKWYGDLRGKPFAIEAENSILDISGFSKQYNCAFIWQKDGVKKLNLYLIINYFKGGKLRFKKIKPEAFEANRFYTVINKKSGEIVPMEVNFNFDDPNLIILPLAFGKRQGREFIWNDLLSLETGSLKLANGRVIEKTLYNRRTRQDEPALFVALTFERREVLDSSNIKPMNLIGVDRGENIPAVIALTDPEGCPLSRFKDSLGNPTHILRIGESYKEKQRTIQAKKEVEQRRAGGYSRKYASKAKNLADDMVRNTARDLLYYAVTQDAMLIFENLSRGFGRQGKRTFMAERQYTRMEDWLTAKLAYEGLPSKTYLSKTLAQYTSKTCSNCGFTITSADYDRMLEKLKKTATGWMTTINGKELKVEGQITYYNRYKRQNVVKDLSVELDRLSEESVNNDISSWTKGRSGEALSLLKKRFSHRPVQEKFVCLNCGFETHADEQAALNIARSWLFLRSQEYKKYQTNKTTGNTDKRAFVETWQSFYRKKLKEVWKPAV

SEQ ID NO: 47297 - protein, 978 aa, synthetic construct
  REGION 1..978: note = engineered CasX variant
QEIKRINKIRRRLVKDSNTKKAGKTGPMKTLLVRVMTPDLRERLENLRKKPENIPQPISNTSRANLNKLLTDYTEMKKAILHVYWEEFQKDPVGLMSRVAQPASKKIDQNKLKPEMDEKGNLTTAGFACSQCGQPLFVYKLEQVSEKGKAYTNYFGRCNVAEHEKLILLAQLKPEKDSDEAVTYSLGKFGQRALDFYSIHVTKESTHPVKPLAQIAGNRYASHPVGKALSDACMGTIASFLSKYQDIIIEHQKVVKGNQKRLESLRELAGKENLEYPSVTLPPQPHTKEGVDAYNEVIARVRMWVNLNLWQKLKLSRDDAKPLLRLKGFPSFPLVERQANEVDWWDMVCNVKKLINEKKEDGKVFWQNLAGYKRQEALRPYLSSEEDRKKGKKFARYQLGDLLLHLEKKHPEDWGKVYDEAWERIDKKVEGLSKHIKLEEERRSEDAQSKAALTDWLRAKASFVIEGLKEADKDEFCRCELKLQKWYGDLRGKPFAIEAENSILDISGFSKQYNCAFIWQKDGVKKLNLYLIINYFKGGKLRFKKIKPEAFEANRFYTVINKKSGEIVPMEVNFNFDDPNLIILPLAFGKRQGREFIWNDLLSLETGSLKLANGRVIEKTLYNRRTRQDEPALFVALTFERREVLDSSNIKPMNLIGVDRGENIPAVIALTDPEGCPLSRFKDSLGNPTHILRIGESYKEKQRTIQAKKEVEQRRAGGYSRKYASKAKNLADDMVRNTARDLLYYAVTQDAMLIFENLSRGFGRQGKRTFMAERQYTRMEDWLTAKLAYEGLPSKTYLSKTLAQYTSKTCSNCGFTITSADYDRMLEKLKKTATGWMTTINGKELKVEGQITYYNRYKRQNVVKDLSVELDRLSEESVNNDISSWTKGRSGEALSLLKKRFSHRPVQEKFVCLNCGFETHADEQAALNIARSWLFLRSQEYKKYQTNKTTGNTDKRAFVETWQSFYRKKLKEVWKPAV

SEQ ID NO: 47298 - protein, 978 aa, synthetic construct
  REGION 1..978: note = engineered CasX variant
QEIKRINKIRRRLVKDSNTKKAGKTGPMKTLLVRVMTPDLRERLENLRKKPENIPQPISNTSRANLNKLLTDYTEMKKAILHVYWEEFQKDPVGLMSRVAQPASKKIDQNKLKPEMDEKGNLTTAGFACSQCGQPLFVYKLEQVSEKGKAYTNYFGRCNVAEHEKLILLAQLKPEKDSDEAVTYSLGKFGQRALDFYSIHVTKESTHPVKPLAQIAGNRYASSPVGKALSDACMGTIASFLSKYQDIIIEHQKVVKGNQKRLESLRELAGKENLEYPSVTLPPQPHTKEGVDAYNEVIARVRMWVNLNLWQKLKLSRDDAKPLLRLKGFPSFPLVERQANEVDWWDMVCNVKKLINEKKEDGKVFWQNLAGYKRQEALRPYLSSEEDRKKGKKFARYQLGDLLLHLEKKHPEDWGKVYDEAWERIDKKVEGLSKHIKLEEERRSEDAQSKAALTDWLRAKASFVIEGLKEADKDEFCRCELKLQKWYGDLRGKPFAIEAENSILDISGFSKQYNCAFIWQKDGVKKLNLYLIINYFKGGKLRFKKIKPEAFEANRFYTVINKKSGEIVPMEVNFNFDDPNLIILPLAFGKRQGREFIWNDLLSLETGSLKLANGRVIEKTLYNRRTRQDEPALFVALTFERREVLDSSNIKPMNLIGVDRGENIPAVIALTDPEGCPLSRFKDSLGNPTHILRIGESYKEKQRTIQAKKEVEQRRAGGYSRKYASKAKNLADDMVRNTARDLLYYAVTQDAMLIFENLSRGFGRQGKRTFMAERQYTRMEDWLTAKLAYEGLPSKTYLSKTLAQYTSKTCSNCGFTITSADYDRMLEKLKKTATGWMTTINGKELKVEGQITYYNRYKRQNVVKDLSVELDRLSEESVNNDISSWTKGRSGEALSLLKKRFSHRPVQEKFVCLNCGFETHADEQAALNIARSWLFLRSQEYKKYQTNKTTGNTDKRAFVETWQSFYRKKLKEVWKPAV

SEQ ID NO: 47299 - protein, 978 aa, synthetic construct
  REGION 1..978: note = engineered CasX variant
QEIKRINKIRRRLVKDSNTKKAGKTGPMKTLLVRVMTPDLRERLENLRKKPENIPQPISNTSRANLNKLLTDYTEMKKAILHVYWEEFQKDPVGLMSRVAQPASKKIDQNKLKPEMDEKGNLTTAGFACSQCGQPLFVYKLEQVSEKGKAYTNYFGRCNVAEHEKLILLAQLKPEKDSDEAVTYSLGKFGQRALDFYSIHVTKESTHPVKPLAQIAGNRYASTPVGKALSDACMGTIASFLSKYQDIIIEHQKVVKGNQKRLESLRELAGKENLEYPSVTLPPQPHTKEGVDAYNEVIARVRMWVNLNLWQKLKLSRDDAKPLLRLKGFPSFPLVERQANEVDWWDMVCNVKKLINEKKEDGKVFWQNLAGYKRQEALRPYLSSEEDRKKGKKFARYQLGDLLLHLEKKHPEDWGKVYDEAWERIDKKVEGLSKHIKLEEERRSEDAQSKAALTDWLRAKASFVIEGLKEADKDEFCRCELKLQKWYGDLRGKPFAIEAENSILDISGFSKQYNCAFIWQKDGVKKLNLYLIINYFKGGKLRFKKIKPEAFEANRFYTVINKKSGEIVPMEVNFNFDDPNLIILPLAFGKRQGREFIWNDLLSLETGSLKLANGRVIEKTLYNRRTRQDEPALFVALTFERREVLDSSNIKPMNLIGVDRGENIPAVIALTDPEGCPLSRFKDSLGNPTHILRIGESYKEKQRTIQAKKEVEQRRAGGYSRKYASKAKNLADDMVRNTARDLLYYAVTQDAMLIFENLSRGFGRQGKRTFMAERQYTRMEDWLTAKLAYEGLPSKTYLSKTLAQYTSKTCSNCGFTITSADYDRMLEKLKKTATGWMTTINGKELKVEGQITYYNRYKRQNVVKDLSVELDRLSEESVNNDISSWTKGRSGEALSLLKKRFSHRPVQEKFVCLNCGFETHADEQAALNIARSWLFLRSQEYKKYQTNKTTGNTDKRAFVETWQSFYRKKLKEVWKPAV

SEQ ID NO: 47300 - protein, 978 aa, synthetic construct
  REGION 1..978: note = engineered CasX variant
QEIKRINKIRRRLVKDSNTKKAGKTGPMKTLLVRVMTPDLRERLENLRKKPENIPQPISNTSRANLNKLLTDYTEMKKAILHVYWEEFQKDPVGLMSRVAQPASKKIDQNKLKPEMDEKGNLTTAGFACSQCGQPLFVYKLEQVSEKGKAYTNYFGRCNVAEHEKLILLAQLKPEKDSDEAVTYSLGKFGQRALDFYSIHVTKESTHPVKPLAQIAGNRYASAPVGKALSDACMGTIASFLSKYQDIIIEHQKVVKGNQKRLESLRELAGKENLEYPSVTLPPQPHTKEGVDAYNEVIARVRMWVNLNLWQKLKLSRDDAKPLLRLKGFPSFPLVERQANEVDWWDMVCNVKKLINEKKEDGKVFWQNLAGYKRQEALRPYLSSEEDRKKGKKFARYQLGDLLLHLEKKHPEDWGKVYDEAWERIDKKVEGLSKHIKLEEERRSEDAQSKAALTDWLRAKASFVIEGLKEADKDEFCRCELKLQKWYGDLRGKPFAIEAENSILDISGFSKQYNCAFIWQKDGVKKLNLYLIINYFKGGKLRFKKIKPEAFEANRFYTVINKKSGEIVPMEVNFNFDDPNLIILPLAFGKRQGREFIWNDLLSLETGSLKLANGRVIEKTLYNRRTRQDEPALFVALTFERREVLDSSNIKPMNLIGVDRGENIPAVIALTDPEGCPLSRFKDSLGNPTHILRIGESYKEKQRTIQAKKEVEQRRAGGYSRKYASKAKNLADDMVRNTARDLLYYAVTQDAMLIFENLSRGFGRQGKRTFMAERQYTRMEDWLTAKLAYEGLPSKTYLSKTLAQYTSKTCSNCGFTITSADYDRMLEKLKKTATGWMTTINGKELKVEGQITYYNRYKRQNVVKDLSVELDRLSEESVNNDISSWTKGRSGEALSLLKKRFSHRPVQEKFVCLNCGFETHADEQAALNIARSWLFLRSQEYKKYQTNKTTGNTDKRAFVETWQSFYRKKLKEVWKPAV

SEQ ID NO: 47301 - protein, 978 aa, synthetic construct
  REGION 1..978: note = engineered CasX variant
QEIKRINKIRRRLVKDSNTKKAGKTGPMKTLLVRVMTPDLRERLENLRKKPENIPQPISNTSRANLNKLLTDYTEMKKAILHVYWEEFQKDPVGLMSRVAQPASKKIDQNKLKPEMDEKGNLTTAGFACSQCGQPLFVYKLEQVSEKGKAYTNYFGRCNVAEHEKLILLAQLKPEKDSDEAVTYSLGKFGQRALDFYSIHVTKESTHPVKPLAQIAGNRYASVPVGKALSDACMGTIASFLSKYQDIIIEHQKVVKGNQKRLESLRELAGKENLEYPSVTLPPQPHTKEGVDAYNEVIARVRMWVNLNLWQKLKLSRDDAKPLLRLKGFPSFPLVERQANEVDWWDMVCNVKKLINEKKEDGKVFWQNLAGYKRQEALRPYLSSEEDRKKGKKFARYQLGDLLLHLEKKHPEDWGKVYDEAWERIDKKVEGLSKHIKLEEERRSEDAQSKAALTDWLRAKASFVIEGLKEADKDEFCRCELKLQKWYGDLRGKPFAIEAENSILDISGFSKQYNCAFIWQKDGVKKLNLYLIINYFKGGKLRFKKIKPEAFEANRFYTVINKKSGEIVPMEVNFNFDDPNLIILPLAFGKRQGREFIWNDLLSLETGSLKLANGRVIEKTLYNRRTRQDEPALFVALTFERREVLDSSNIKPMNLIGVDRGENIPAVIALTDPEGCPLSRFKDSLGNPTHILRIGESYKEKQRTIQAKKEVEQRRAGGYSRKYASKAKNLADDMVRNTARDLLYYAVTQDAMLIFENLSRGFGRQGKRTFMAERQYTRMEDWLTAKLAYEGLPSKTYLSKTLAQYTSKTCSNCGFTITSADYDRMLEKLKKTATGWMTTINGKELKVEGQITYYNRYKRQNVVKDLSVELDRLSEESVNNDISSWTKGRSGEALSLLKKRFSHRPVQEKFVCLNCGFETHADEQAALNIARSWLFLRSQEYKKYQTNKTTGNTDKRAFVETWQSFYRKKLKEVWKPAV

SEQ ID NO: 47302 - protein, 978 aa, synthetic construct
  REGION 1..978: note = engineered CasX variant
QEIKRINKIRRRLVKDSNTKKAGKTGPMKTLLVRVMTPDLRERLENLRKKPENIPQPISNTSRANLNKLLTDYTEMKKAILHVYWEEFQKDPVGLMSRVAQPASKKIDQNKLKPEMDEKGNLTTAGFACSQCGQPLFVYKLEQVSEKGKAYTNYFGRCNVAEHEKLIKLAQLKPEKDSDEAVTYSLGKFGQRALDFYSIHVTKESTHPVKPLAQIAGNRYASGPVGKALSDACMGTIASFLSKYQDIIIEHQKVVKGNQKRLESLRELAGKENLEYPSVTLPPQPHTKEGVDAYNEVIARVRMWVNLNLWQKLKLSRDDAKPLLRLKGFPSFPLVERQANEVDWWDMVCNVKKLINEKKEDGKVFWQNLAGYKRQEALRPYLSSEEDRKKGKKFARYQLGDLLLHLEKKHPEDWGKVYDEAWERIDKKVEGLSKHIKLEEERRSEDAQSKAALTDWLRAKASFVIEGLKEADKDEFCRCELKLQKWYGDLRGKPFAIEAENSILDISGFSKQYNCAFIWQKDGVKKLNLYLIINYFKGGKLRFKKIKPEAFEANRFYTVINKKSGEIVPMEVNFNFDDPNLIILPLAFGKRQGREFIWNDLLSLETGSLKLANGRVIEKTLYNRRTRQDEPALFVALTFERREVLDSSNIKPMNLIGVDRGENIPAVIALTDPEGCPLSRFKDSLGNPTHILRIGESYKEKQRTIQAKKEVEQRRAGGYSRKYASKAKNLADDMVRNTARDLLYYAVTQDAMLIFENLSRGFGRQGKRTFMAERQYTRMEDWLTAKLAYEGLPSKTYLSKTLAQYTSKTCSNCGFTITSADYDRMLEKLKKTATGWMTTINGKELKVEGQITYYNRYKRQNVVKDLSVELDRLSEESVNNDISSWTKGRSGEALSLLKKRFSHRPVQEKFVCLNCGFETHADEQAALNIARSWLFLRSQEYKKYQTNKTTGNTDKRAFVETWQSFYRKKLKEVWKPAV

SEQ ID NO: 47303 - protein, 977 aa, synthetic construct
  REGION 1..977: note = engineered CasX variant
QEIKRINKIRRRLVKDSNTKKAGKTGPMKTLLVRVMTPDLRERLENLRKKPENIPQPISNTSRANLNKLLTDYTEMKKAILHVYWEEFQKDPVGLMSRVAQPASKKIDQNKLKPEMDEKGNLTTAGFACSQCGQPLFVYKLEQVSEKGKAYTNYFGRCNVAEHEKLILLAQLKPEKDSDEAVTYSLGKFGQRALDFYSIHVTKESTHPVKPLAQIAGNRYASPVGKALSDACMGTIASFLSKYQDIIIEHQKVVKGNQKRLESLRELAGKENLEYPSVTLPPQPHTKEGVDAYNEVIARVRMWVNLNLWQKLKLSRDDAKPLLRLKGFPSFPLVERQANEVDWWDMVCNVKKLINEKKEDGKVFWQNLAGYKRQEALRPYLSSEEDRKKGKKFARYQLGDLLLHLEKKHPEDWGKVYDEAWERIDKKVEGLSKHIKLEEERRSEDAQSKAALTDWLRAKASFVIEGLKEADKDEFCRCELKLQKWYGDLRGKPFAIEAENSILDISGFSKQYNCAFIWQKDGVKKLNLYLIINYFKGGKLRFKKIKPEAFEANRFYTVINKKSGEIVPMEVNFNFDDPNLIILPLAFGKRQGREFIWNDLLSLETGSLKLANGRVIEKTLYNRRTRQDEPALFVALTFERREVLDSSNIKPMNLIGVDRGENIPAVIALTDPEGCPLSRFKDSLGNPTHILRIGESYKEKQRTIQAKKEVEQRRAGGYSRKYASKAKNLADDMVRNTARDLLYYAVTQDAMLIFENLSRGFGRQGKRTFMAERQYTRMEDWLTAKLAYEGLPSKTYLSKTLAQYTSKTCSNCGFTITSADYDRMLEKLKKTATGWMTTINGKELKVEGQITYYNRYKRQNVVKDLSVELDRLSEESVNNDISSWTKGRSGEALSLLKKRFSHRPVQEKFVCLNCGFETHADEQAALNIARSWLFLRSQEYKKYQTNKTTGNTDKRAFVETWQSFYRKKLKEVWKPAV

SEQ ID NO: 47304 - protein, 979 aa, synthetic construct
  REGION 1..979: note = engineered CasX variant
QEIKRINKIRRRLVKDSNTKKAGKTGPMKTLLVRVMTPDLRERLENLRKKPENIPQPISNTSRANLNKLLTDYTEMKKAILHVYWEEFQKDPVGLMSRVAQPASKKIDQNKLKPEMDEKGNLTTAGFACSQCGQPLFVYKLEQVSEKGKAYTNYFGRCNVAEHEKLILLAQLKPEKDSDEAVTYSLGKFGQRALDFYSIHVTKESTHPVKPLAQIAGNRYASYPVGKALSDACMGTIASFLSKYQDIIIEHQKVVKGNQKRLESLRELAGKENLEYPSVTLPPQPHTKEGVDAYNEVIARVRMWVNLNLWQKLKLSRDDAKPLLRLKGFPSFPLVERQANEVDWWDMVCNVKKLINEKKEDGKVFWQNLAGYKRQEALRPYLSSEEDRKKGKKFARYQLGDLLLHLEKKHGERDWGKVYDEAWERIDKKVEGLSKHIKLEEERRSEDAQSKAALTDWLRAKASFVIEGLKEADKDEFCRCELKLQKWYGDLRGKPFAIEAENSILDISGFSKQYNCAFIWQKDGVKKLNLYLIINYFKGGKLRFKKIKPEAFEANRFYTVINKKSGEIVPMEVNFNFDDPNLIILPLAFGKRQGREFIWNDLLSLETGSLKLANGRVIEKTLYNRRTRQDEPALFVALTFERREVLDSSNIKPMNLIGVDRGENIPAVIALTDPEGCPLSRFKDSLGNPTHILRIGESYKEKQRTIQAKKEVEQRRAGGYSRKYASKAKNLADDMVRNTARDLLYYAVTQDAMLIFENLSRGFGRQGKRTFMAERQYTRMEDWLTAKLAYEGLPSKTYLSKTLAQYTSKTCSNCGFTITSADYDRMLEKLKKTATGWMTTINGKELKVEGQITYYNRYKRQNVVKDLSVELDRLSEESVNNDISSWTKGRSGEALSLLKKRFSHRPVQEKFVCLNCGFETHADEQAALNIARSWLFLRSQEYKKYQTNKTTGNTDKRAFVETWQSFYRKKLKEVWKPAV

SEQ ID NO: 47305 - protein, 979 aa, synthetic construct
  REGION 1..979: note = engineered CasX variant
QEIKRINKIRRRLVKDSNTKKAGKTGPMKTLLVRVMTPDLRERLENLRKKPENIPQPISNTSRANLNKLLTDYTEMKKAILHVYWEEFQKDPVGLMSRVAQPASKKIDQNKLKPEMDEKGNLTTAGFACSQCGQPLFVYKLEQVSEKGKAYTNYFGRCNVAEHEKLILLAQLKPEKDSDEAVTYSLGKFGQRALDFYSIHVTKESTHPVKPLAQIAGNRYASHPVGKALSDACMGTIASFLSKYQDIIIEHQKVVKGNQKRLESLRELAGKENLEYPSVTLPPQPHTKEGVDAYNEVIARVRMWVNLNLWQKLKLSRDDAKPLLRLKGFPSFPLVERQANEVDWWDMVCNVKKLINEKKEDGKVFWQNLAGYKRQEALRPYLSSEEDRKKGKKFARYQLGDLLLHLEKKHGERDWGKVYDEAWERIDKKVEGLSKHIKLEEERRSEDAQSKAALTDWLRAKASFVIEGLKEADKDEFCRCELKLQKWYGDLRGKPFAIEAENSILDISGFSKQYNCAFIWQKDGVKKLNLYLIINYFKGGKLRFKKIKPEAFEANRFYTVINKKSGEIVPMEVNFNFDDPNLIILPLAFGKRQGREFIWNDLLSLETGSLKLANGRVIEKTLYNRRTRQDEPALFVALTFERREVLDSSNIKPMNLIGVDRGENIPAVIALTDPEGCPLSRFKDSLGNPTHILRIGESYKEKQRTIQAKKEVEQRRAGGYSRKYASKAKNLADDMVRNTARDLLYYAVTQDAMLIFENLSRGFGRQGKRTFMAERQYTRMEDWLTAKLAYEGLPSKTYLSKTLAQYTSKTCSNCGFTITSADYDRMLEKLKKTATGWMTTINGKELKVEGQITYYNRYKRQNVVKDLSVELDRLSEESVNNDISSWTKGRSGEALSLLKKRFSHRPVQEKFVCLNCGFETHADEQAALNIARSWLFLRSQEYKKYQTNKTTGNTDKRAFVETWQSFYRKKLKEVWKPAV

SEQ ID NO: 47306 - protein, 979 aa, synthetic construct
  REGION 1..979: note = engineered CasX variant
QEIKRINKIRRRLVKDSNTKKAGKTGPMKTLLVRVMTPDLRERLENLRKKPENIPQPISNTSRANLNKLLTDYTEMKKAILHVYWEEFQKDPVGLMSRVAQPASKKIDQNKLKPEMDEKGNLTTAGFACSQCGQPLFVYKLEQVSEKGKAYTNYFGRCNVAEHEKLILLAQLKPEKDSDEAVTYSLGKFGQRALDFYSIHVTKESTHPVKPLAQIAGNRYASSPVGKALSDACMGTIASFLSKYQDIIIEHQKVVKGNQKRLESLRELAGKENLEYPSVTLPPQPHTKEGVDAYNEVIARVRMWVNLNLWQKLKLSRDDAKPLLRLKGFPSFPLVERQANEVDWWDMVCNVKKLINEKKEDGKVFWQNLAGYKRQEALRPYLSSEEDRKKGKKFARYQLGDLLLHLEKKHGERDWGKVYDEAWERIDKKVEGLSKHIKLEEERRSEDAQSKAALTDWLRAKASFVIEGLKEADKDEFCRCELKLQKWYGDLRGKPFAIEAENSILDISGFSKQYNCAFIWQKDGVKKLNLYLIINYFKGGKLRFKKIKPEAFEANRFYTVINKKSGEIVPMEVNFNFDDPNLIILPLAFGKRQGREFIWNDLLSLETGSLKLANGRVIEKTLYNRRTRQDEPALFVALTFERREVLDSSNIKPMNLIGVDRGENIPAVIALTDPEGCPLSRFKDSLGNPTHILRIGESYKEKQRTIQAKKEVEQRRAGGYSRKYASKAKNLADDMVRNTARDLLYYAVTQDAMLIFENLSRGFGRQGKRTFMAERQYTRMEDWLTAKLAYEGLPSKTYLSKTLAQYTSKTCSNCGFTITSADYDRMLEKLKKTATGWMTTINGKELKVEGQITYYNRYKRQNVVKDLSVELDRLSEESVNNDISSWTKGRSGEALSLLKKRFSHRPVQEKFVCLNCGFETHADEQAALNIARSWLFLRSQEYKKYQTNKTTGNTDKRAFVETWQSFYRKKLKEVWKPAV

SEQ ID NO: 47307 - protein, 979 aa, synthetic construct
  REGION 1..979: note = engineered CasX variant
QEIKRINKIRRRLVKDSNTKKAGKTGPMKTLLVRVMTPDLRERLENLRKKPENIPQPISNTSRANLNKLLTDYTEMKKAILHVYWEEFQKDPVGLMSRVAQPASKKIDQNKLKPEMDEKGNLTTAGFACSQCGQPLFVYKLEQVSEKGKAYTNYFGRCNVAEHEKLILLAQLKPEKDSDEAVTYSLGKFGQRALDFYSIHVTKESTHPVKPLAQIAGNRYASTPVGKALSDACMGTIASFLSKYQDIIIEHQKVVKGNQKRLESLRELAGKENLEYPSVTLPPQPHTKEGVDAYNEVIARVRMWVNLNLWQKLKLSRDDAKPLLRLKGFPSFPLVERQANEVDWWDMVCNVKKLINEKKEDGKVFWQNLAGYKRQEALRPYLSSEEDRKKGKKFARYQLGDLLLHLEKKHGERDWGKVYDEAWERIDKKVEGLSKHIKLEEERRSEDAQSKAALTDWLRAKASFVIEGLKEADKDEFCRCELKLQKWYGDLRGKPFAIEAENSILDISGFSKQYNCAFIWQKDGVKKLNLYLIINYFKGGKLRFKKIKPEAFEANRFYTVINKKSGEIVPMEVNFNFDDPNLIILPLAFGKRQGREFIWNDLLSLETGSLKLANGRVIEKTLYNRRTRQDEPALFVALTFERREVLDSSNIKPMNLIGVDRGENIPAVIALTDPEGCPLSRFKDSLGNPTHILRIGESYKEKQRTIQAKKEVEQRRAGGYSRKYASKAKNLADDMVRNTARDLLYYAVTQDAMLIFENLSRGFGRQGKRTFMAERQYTRMEDWLTAKLAYEGLPSKTYLSKTLAQYTSKTCSNCGFTITSADYDRMLEKLKKTATGWMTTINGKELKVEGQITYYNRYKRQNVVKDLSVELDRLSEESVNNDISSWTKGRSGEALSLLKKRFSHRPVQEKFVCLNCGFETHADEQAALNIARSWLFLRSQEYKKYQTNKTTGNTDKRAFVETWQSFYRKKLKEVWKPAV

SEQ ID NO: 47308 - protein, 979 aa, synthetic construct
  REGION 1..979: note = engineered CasX variant
QEIKRINKIRRRLVKDSNTKKAGKTGPMKTLLVRVMTPDLRERLENLRKKPENIPQPISNTSRANLNKLLTDYTEMKKAILHVYWEEFQKDPVGLMSRVAQPASKKIDQNKLKPEMDEKGNLTTAGFACSQCGQPLFVYKLEQVSEKGKAYTNYFGRCNVAEHEKLILLAQLKPEKDSDEAVTYSLGKFGQRALDFYSIHVTKESTHPVKPLAQIAGNRYASAPVGKALSDACMGTIASFLSKYQDIIIEHQKVVKGNQKRLESLRELAGKENLEYPSVTLPPQPHTKEGVDAYNEVIARVRMWVNLNLWQKLKLSRDDAKPLLRLKGFPSFPLVERQANEVDWWDMVCNVKKLINEKKEDGKVFWQNLAGYKRQEALRPYLSSEEDRKKGKKFARYQLGDLLLHLEKKHGERDWGKVYDEAWERIDKKVEGLSKHIKLEEERRSEDAQSKAALTDWLRAKASFVIEGLKEADKDEFCRCELKLQKWYGDLRGKPFAIEAENSILDISGFSKQYNCAFIWQKDGVKKLNLYLIINYFKGGKLRFKKIKPEAFEANRFYTVINKKSGEIVPMEVNFNFDDPNLIILPLAFGKRQGREFIWNDLLSLETGSLKLANGRVIEKTLYNRRTRQDEPALFVALTFERREVLDSSNIKPMNLIGVDRGENIPAVIALTDPEGCPLSRFKDSLGNPTHILRIGESYKEKQRTIQAKKEVEQRRAGGYSRKYASKAKNLADDMVRNTARDLLYYAVTQDAMLIFENLSRGFGRQGKRTFMAERQYTRMEDWLTAKLAYEGLPSKTYLSKTLAQYTSKTCSNCGFTITSADYDRMLEKLKKTATGWMTTINGKELKVEGQITYYNRYKRQNVVKDLSVELDRLSEESVNNDISSWTKGRSGEALSLLKKRFSHRPVQEKFVCLNCGFETHADEQAALNIARSWLFLRSQEYKKYQTNKTTGNTDKRAFVETWQSFYRKKLKEVWKPAV

SEQ ID NO: 47309 - protein, 979 aa, synthetic construct
  REGION 1..979: note = engineered CasX variant
QEIKRINKIRRRLVKDSNTKKAGKTGPMKTLLVRVMTPDLRERLENLRKKPENIPQPISNTSRANLNKLLTDYTEMKKAILHVYWEEFQKDPVGLMSRVAQPASKKIDQNKLKPEMDEKGNLTTAGFACSQCGQPLFVYKLEQVSEKGKAYTNYFGRCNVAEHEKLILLAQLKPEKDSDEAVTYSLGKFGQRALDFYSIHVTKESTHPVKPLAQIAGNRYASVPVGKALSDACMGTIASFLSKYQDIIIEHQKVVKGNQKRLESLRELAGKENLEYPSVTLPPQPHTKEGVDAYNEVIARVRMWVNLNLWQKLKLSRDDAKPLLRLKGFPSFPLVERQANEVDWWDMVCNVKKLINEKKEDGKVFWQNLAGYKRQEALRPYLSSEEDRKKGKKFARYQLGDLLLHLEKKHGERDWGKVYDEAWERIDKKVEGLSKHIKLEEERRSEDAQSKAALTDWLRAKASFVIEGLKEADKDEFCRCELKLQKWYGDLRGKPFAIEAENSILDISGFSKQYNCAFIWQKDGVKKLNLYLIINYFKGGKLRFKKIKPEAFEANRFYTVINKKSGEIVPMEVNFNFDDPNLIILPLAFGKRQGREFIWNDLLSLETGSLKLANGRVIEKTLYNRRTRQDEPALFVALTFERREVLDSSNIKPMNLIGVDRGENIPAVIALTDPEGCPLSRFKDSLGNPTHILRIGESYKEKQRTIQAKKEVEQRRAGGYSRKYASKAKNLADDMVRNTARDLLYYAVTQDAMLIFENLSRGFGRQGKRTFMAERQYTRMEDWLTAKLAYEGLPSKTYLSKTLAQYTSKTCSNCGFTITSADYDRMLEKLKKTATGWMTTINGKELKVEGQITYYNRYKRQNVVKDLSVELDRLSEESVNNDISSWTKGRSGEALSLLKKRFSHRPVQEKFVCLNCGFETHADEQAALNIARSWLFLRSQEYKKYQTNKTTGNTDKRAFVETWQSFYRKKLKEVWKPAV

SEQ ID NO: 47310 - protein, 979 aa, synthetic construct
  REGION 1..979: note = engineered CasX variant
QEIKRINKIRRRLVKDSNTKKAGKTGPMKTLLVRVMTPDLRERLENLRKKPENIPQPISNTSRANLNKLLTDYTEMKKAILHVYWEEFQKDPVGLMSRVAQPASKKIDQNKLKPEMDEKGNLTTAGFACSQCGQPLFVYKLEQVSEKGKAYTNYFGRCNVAEHEKLIKLAQLKPEKDSDEAVTYSLGKFGQRALDFYSIHVTKESTHPVKPLAQIAGNRYASGPVGKALSDACMGTIASFLSKYQDIIIEHQKVVKGNQKRLESLRELAGKENLEYPSVTLPPQPHTKEGVDAYNEVIARVRMWVNLNLWQKLKLSRDDAKPLLRLKGFPSFPLVERQANEVDWWDMVCNVKKLINEKKEDGKVFWQNLAGYKRQEALRPYLSSEEDRKKGKKFARYQLGDLLLHLEKKHGERDWGKVYDEAWERIDKKVEGLSKHIKLEEERRSEDAQSKAALTDWLRAKASFVIEGLKEADKDEFCRCELKLQKWYGDLRGKPFAIEAENSILDISGFSKQYNCAFIWQKDGVKKLNLYLIINYFKGGKLRFKKIKPEAFEANRFYTVINKKSGEIVPMEVNFNFDDPNLIILPLAFGKRQGREFIWNDLLSLETGSLKLANGRVIEKTLYNRRTRQDEPALFVALTFERREVLDSSNIKPMNLIGVDRGENIPAVIALTDPEGCPLSRFKDSLGNPTHILRIGESYKEKQRTIQAKKEVEQRRAGGYSRKYASKAKNLADDMVRNTARDLLYYAVTQDAMLIFENLSRGFGRQGKRTFMAERQYTRMEDWLTAKLAYEGLPSKTYLSKTLAQYTSKTCSNCGFTITSADYDRMLEKLKKTATGWMTTINGKELKVEGQITYYNRYKRQNVVKDLSVELDRLSEESVNNDISSWTKGRSGEALSLLKKRFSHRPVQEKFVCLNCGFETHADEQAALNIARSWLFLRSQEYKKYQTNKTTGNTDKRAFVETWQSFYRKKLKEVWKPAV

SEQ ID NO: 47311 - protein, 978 aa, synthetic construct
  REGION 1..978: note = engineered CasX variant
QEIKRINKIRRRLVKDSNTKKAGKTGPMKTLLVRVMTPDLRERLENLRKKPENIPQPISNTSRANLNKLLTDYTEMKKAILHVYWEEFQKDPVGLMSRVAQPASKKIDQNKLKPEMDEKGNLTTAGFACSQCGQPLFVYKLEQVSEKGKAYTNYFGRCNVAEHEKLILLAQLKPEKDSDEAVTYSLGKFGQRALDFYSIHVTKESTHPVKPLAQIAGNRYASPVGKALSDACMGTIASFLSKYQDIIIEHQKVVKGNQKRLESLRELAGKENLEYPSVTLPPQPHTKEGVDAYNEVIARVRMWVNLNLWQKLKLSRDDAKPLLRLKGFPSFPLVERQANEVDWWDMVCNVKKLINEKKEDGKVFWQNLAGYKRQEALRPYLSSEEDRKKGKKFARYQLGDLLLHLEKKHGERDWGKVYDEAWERIDKKVEGLSKHIKLEEERRSEDAQSKAALTDWLRAKASFVIEGLKEADKDEFCRCELKLQKWYGDLRGKPFAIEAENSILDISGFSKQYNCAFIWQKDGVKKLNLYLIINYFKGGKLRFKKIKPEAFEANRFYTVINKKSGEIVPMEVNFNFDDPNLIILPLAFGKRQGREFIWNDLLSLETGSLKLANGRVIEKTLYNRRTRQDEPALFVALTFERREVLDSSNIKPMNLIGVDRGENIPAVIALTDPEGCPLSRFKDSLGNPTHILRIGESYKEKQRTIQAKKEVEQRRAGGYSRKYASKAKNLADDMVRNTARDLLYYAVTQDAMLIFENLSRGFGRQGKRTFMAERQYTRMEDWLTAKLAYEGLPSKTYLSKTLAQYTSKTCSNCGFTITSADYDRMLEKLKKTATGWMTTINGKELKVEGQITYYNRYKRQNVVKDLSVELDRLSEESVNNDISSWTKGRSGEALSLLKKRFSHRPVQEKFVCLNCGFETHADEQAALNIARSWLFLRSQEYKKYQTNKTTGNTDKRAFVETWQSFYRKKLKEVWKPAV

SEQ ID NO: 47312 - protein, 979 aa, synthetic construct
  REGION 1..979: note = engineered CasX variant
QEIKRINKIRRRLVKDSNTKKAGKTGPMKTLLVRVMTPDLRERLENLRKKPENIPQPISNTSRANLNKLLTDYTEMKKAILHVYWEEFQKDPVGLMSRVAQPASKKIDQNKLKPEMDEKGNLTTAGFACSQCGQPLFVYKLEQVSEKGKAYTNYFGRCNVAEHEKLILLAQLKPEKDSDEAVTYSLGKFGQRALDFYSIHVTKESTHPVKPLAQIAGNRYASYPVGKALSDACMGTIASFLSKYQDIIIEHQKVVKGNQKRLESLRELAGKENLEYPSVTLPPQPHTKEGVDAYNEVIARVRMWVNLNLWQKLKLSRDDAKPLLRLKGFPSFPLVERQANEVDWWDMVCNVKKLINEKKEDGKVFWQNLAGYKRQEALRPYLSSEEDRKKGKKFARYQLGDLLLHLEKKHGEYDWGKVYDEAWERIDKKVEGLSKHIKLEEERRSEDAQSKAALTDWLRAKASFVIEGLKEADKDEFCRCELKLQKWYGDLRGKPFAIEAENSILDISGFSKQYNCAFIWQKDGVKKLNLYLIINYFKGGKLRFKKIKPEAFEANRFYTVINKKSGEIVPMEVNFNFDDPNLIILPLAFGKRQGREFIWNDLLSLETGSLKLANGRVIEKTLYNRRTRQDEPALFVALTFERREVLDSSNIKPMNLIGVDRGENIPAVIALTDPEGCPLSRFKDSLGNPTHILRIGESYKEKQRTIQAKKEVEQRRAGGYSRKYASKAKNLADDMVRNTARDLLYYAVTQDAMLIFENLSRGFGRQGKRTFMAERQYTRMEDWLTAKLAYEGLPSKTYLSKTLAQYTSKTCSNCGFTITSADYDRMLEKLKKTATGWMTTINGKELKVEGQITYYNRYKRQNVVKDLSVELDRLSEESVNNDISSWTKGRSGEALSLLKKRFSHRPVQEKFVCLNCGFETHADEQAALNIARSWLFLRSQEYKKYQTNKTTGNTDKRAFVETWQSFYRKKLKEVWKPAV

SEQ ID NO: 47313 - protein, 979 aa, synthetic construct
  REGION 1..979: note = engineered CasX variant
QEIKRINKIRRRLVKDSNTKKAGKTGPMKTLLVRVMTPDLRERLENLRKKPENIPQPISNTSRANLNKLLTDYTEMKKAILHVYWEEFQKDPVGLMSRVAQPASKKIDQNKLKPEMDEKGNLTTAGFACSQCGQPLFVYKLEQVSEKGKAYTNYFGRCNVAEHEKLILLAQLKPEKDSDEAVTYSLGKFGQRALDFYSIHVTKESTHPVKPLAQIAGNRYASHPVGKALSDACMGTIASFLSKYQDIIIEHQKVVKGNQKRLESLRELAGKENLEYPSVTLPPQPHTKEGVDAYNEVIARVRMWVNLNLWQKLKLSRDDAKPLLRLKGFPSFPLVERQANEVDWWDMVCNVKKLINEKKEDGKVFWQNLAGYKRQEALRPYLSSEEDRKKGKKFARYQLGDLLLHLEKKHGEYDWGKVYDEAWERIDKKVEGLSKHIKLEEERRSEDAQSKAALTDWLRAKASFVIEGLKEADKDEFCRCELKLQKWYGDLRGKPFAIEAENSILDISGFSKQYNCAFIWQKDGVKKLNLYLIINYFKGGKLRFKKIKPEAFEANRFYTVINKKSGEIVPMEVNFNFDDPNLIILPLAFGKRQGREFIWNDLLSLETGSLKLANGRVIEKTLYNRRTRQDEPALFVALTFERREVLDSSNIKPMNLIGVDRGENIPAVIALTDPEGCPLSRFKDSLGNPTHILRIGESYKEKQRTIQAKKEVEQRRAGGYSRKYASKAKNLADDMVRNTARDLLYYAVTQDAMLIFENLSRGFGRQGKRTFMAERQYTRMEDWLTAKLAYEGLPSKTYLSKTLAQYTSKTCSNCGFTITSADYDRMLEKLKKTATGWMTTINGKELKVEGQITYYNRYKRQNVVKDLSVELDRLSEESVNNDISSWTKGRSGEALSLLKKRFSHRPVQEKFVCLNCGFETHADEQAALNIARSWLFLRSQEYKKYQTNKTTGNTDKRAFVETWQSFYRKKLKEVWKPAV

SEQ ID NO: 47314 - protein, 979 aa, synthetic construct
  REGION 1..979: note = engineered CasX variant
QEIKRINKIRRRLVKDSNTKKAGKTGPMKTLLVRVMTPDLRERLENLRKKPENIPQPISNTSRANLNKLLTDYTEMKKAILHVYWEEFQKDPVGLMSRVAQPASKKIDQNKLKPEMDEKGNLTTAGFACSQCGQPLFVYKLEQVSEKGKAYTNYFGRCNVAEHEKLILLAQLKPEKDSDEAVTYSLGKFGQRALDFYSIHVTKESTHPVKPLAQIAGNRYASSPVGKALSDACMGTIASFLSKYQDIIIEHQKVVKGNQKRLESLRELAGKENLEYPSVTLPPQPHTKEGVDAYNEVIARVRMWVNLNLWQKLKLSRDDAKPLLRLKGFPSFPLVERQANEVDWWDMVCNVKKLINEKKEDGKVFWQNLAGYKRQEALRPYLSSEEDRKKGKKFARYQLGDLLLHLEKKHGEYDWGKVYDEAWERIDKKVEGLSKHIKLEEERRSEDAQSKAALTDWLRAKASFVIEGLKEADKDEFCRCELKLQKWYGDLRGKPFAIEAENSILDISGFSKQYNCAFIWQKDGVKKLNLYLIINYFKGGKLRFKKIKPEAFEANRFYTVINKKSGEIVPMEVNFNFDDPNLIILPLAFGKRQGREFIWNDLLSLETGSLKLANGRVIEKTLYNRRTRQDEPALFVALTFERREVLDSSNIKPMNLIGVDRGENIPAVIALTDPEGCPLSRFKDSLGNPTHILRIGESYKEKQRTIQAKKEVEQRRAGGYSRKYASKAKNLADDMVRNTARDLLYYAVTQDAMLIFENLSRGFGRQGKRTFMAERQYTRMEDWLTAKLAYEGLPSKTYLSKTLAQYTSKTCSNCGFTITSADYDRMLEKLKKTATGWMTTINGKELKVEGQITYYNRYKRQNVVKDLSVELDRLSEESVNNDISSWTKGRSGEALSLLKKRFSHRPVQEKFVCLNCGFETHADEQAALNIARSWLFLRSQEYKKYQTNKTTGNTDKRAFVETWQSFYRKKLKEVWKPAV

SEQ ID NO: 47315 - protein, 979 aa, synthetic construct
  REGION 1..979: note = engineered CasX variant
QEIKRINKIRRRLVKDSNTKKAGKTGPMKTLLVRVMTPDLRERLENLRKKPENIPQPISNTSRANLNKLLTDYTEMKKAILHVYWEEFQKDPVGLMSRVAQPASKKIDQNKLKPEMDEKGNLTTAGFACSQCGQPLFVYKLEQVSEKGKAYTNYFGRCNVAEHEKLILLAQLKPEKDSDEAVTYSLGKFGQRALDFYSIHVTKESTHPVKPLAQIAGNRYASTPVGKALSDACMGTIASFLSKYQDIIIEHQKVVKGNQKRLESLRELAGKENLEYPSVTLPPQPHTKEGVDAYNEVIARVRMWVNLNLWQKLKLSRDDAKPLLRLKGFPSFPLVERQANEVDWWDMVCNVKKLINEKKEDGKVFWQNLAGYKRQEALRPYLSSEEDRKKGKKFARYQLGDLLLHLEKKHGEYDWGKVYDEAWERIDKKVEGLSKHIKLEEERRSEDAQSKAALTDWLRAKASFVIEGLKEADKDEFCRCELKLQKWYGDLRGKPFAIEAENSILDISGFSKQYNCAFIWQKDGVKKLNLYLIINYFKGGKLRFKKIKPEAFEANRFYTVINKKSGEIVPMEVNFNFDDPNLIILPLAFGKRQGREFIWNDLLSLETGSLKLANGRVIEKTLYNRRTRQDEPALFVALTFERREVLDSSNIKPMNLIGVDRGENIPAVIALTDPEGCPLSRFKDSLGNPTHILRIGESYKEKQRTIQAKKEVEQRRAGGYSRKYASKAKNLADDMVRNTARDLLYYAVTQDAMLIFENLSRGFGRQGKRTFMAERQYTRMEDWLTAKLAYEGLPSKTYLSKTLAQYTSKTCSNCGFTITSADYDRMLEKLKKTATGWMTTINGKELKVEGQITYYNRYKRQNVVKDLSVELDRLSEESVNNDISSWTKGRSGEALSLLKKRFSHRPVQEKFVCLNCGFETHADEQAALNIARSWLFLRSQEYKKYQTNKTTGNTDKRAFVETWQSFYRKKLKEVWKPAV

SEQ ID NO: 47316 - protein, 979 aa, synthetic construct
  REGION 1..979: note = engineered CasX variant
QEIKRINKIRRRLVKDSNTKKAGKTGPMKTLLVRVMTPDLRERLENLRKKPENIPQPISNTSRANLNKLLTDYTEMKKAILHVYWEEFQKDPVGLMSRVAQPASKKIDQNKLKPEMDEKGNLTTAGFACSQCGQPLFVYKLEQVSEKGKAYTNYFGRCNVAEHEKLILLAQLKPEKDSDEAVTYSLGKFGQRALDFYSIHVTKESTHPVKPLAQIAGNRYASAPVGKALSDACMGTIASFLSKYQDIIIEHQKVVKGNQKRLESLRELAGKENLEYPSVTLPPQPHTKEGVDAYNEVIARVRMWVNLNLWQKLKLSRDDAKPLLRLKGFPSFPLVERQANEVDWWDMVCNVKKLINEKKEDGKVFWQNLAGYKRQEALRPYLSSEEDRKKGKKFARYQLGDLLLHLEKKHGEYDWGKVYDEAWERIDKKVEGLSKHIKLEEERRSEDAQSKAALTDWLRAKASFVIEGLKEADKDEFCRCELKLQKWYGDLRGKPFAIEAENSILDISGFSKQYNCAFIWQKDGVKKLNLYLIINYFKGGKLRFKKIKPEAFEANRFYTVINKKSGEIVPMEVNFNFDDPNLIILPLAFGKRQGREFIWNDLLSLETGSLKLANGRVIEKTLYNRRTRQDEPALFVALTFERREVLDSSNIKPMNLIGVDRGENIPAVIALTDPEGCPLSRFKDSLGNPTHILRIGESYKEKQRTIQAKKEVEQRRAGGYSRKYASKAKNLADDMVRNTARDLLYYAVTQDAMLIFENLSRGFGRQGKRTFMAERQYTRMEDWLTAKLAYEGLPSKTYLSKTLAQYTSKTCSNCGFTITSADYDRMLEKLKKTATGWMTTINGKELKVEGQITYYNRYKRQNVVKDLSVELDRLSEESVNNDISSWTKGRSGEALSLLKKRFSHRPVQEKFVCLNCGFETHADEQAALNIARSWLFLRSQEYKKYQTNKTTGNTDKRAFVETWQSFYRKKLKEVWKPAV

SEQ ID NO: 47317 - protein, 979 aa, synthetic construct
  REGION 1..979: note = engineered CasX variant
QEIKRINKIRRRLVKDSNTKKAGKTGPMKTLLVRVMTPDLRERLENLRKKPENIPQPISNTSRANLNKLLTDYTEMKKAILHVYWEEFQKDPVGLMSRVAQPASKKIDQNKLKPEMDEKGNLTTAGFACSQCGQPLFVYKLEQVSEKGKAYTNYFGRCNVAEHEKLILLAQLKPEKDSDEAVTYSLGKFGQRALDFYSIHVTKESTHPVKPLAQIAGNRYASVPVGKALSDACMGTIASFLSKYQDIIIEHQKVVKGNQKRLESLRELAGKENLEYPSVTLPPQPHTKEGVDAYNEVIARVRMWVNLNLWQKLKLSRDDAKPLLRLKGFPSFPLVERQANEVDWWDMVCNVKKLINEKKEDGKVFWQNLAGYKRQEALRPYLSSEEDRKKGKKFARYQLGDLLLHLEKKHGEYDWGKVYDEAWERIDKKVEGLSKHIKLEEERRSEDAQSKAALTDWLRAKASFVIEGLKEADKDEFCRCELKLQKWYGDLRGKPFAIEAENSILDISGFSKQYNCAFIWQKDGVKKLNLYLIINYFKGGKLRFKKIKPEAFEANRFYTVINKKSGEIVPMEVNFNFDDPNLIILPLAFGKRQGREFIWNDLLSLETGSLKLANGRVIEKTLYNRRTRQDEPALFVALTFERREVLDSSNIKPMNLIGVDRGENIPAVIALTDPEGCPLSRFKDSLGNPTHILRIGESYKEKQRTIQAKKEVEQRRAGGYSRKYASKAKNLADDMVRNTARDLLYYAVTQDAMLIFENLSRGFGRQGKRTFMAERQYTRMEDWLTAKLAYEGLPSKTYLSKTLAQYTSKTCSNCGFTITSADYDRMLEKLKKTATGWMTTINGKELKVEGQITYYNRYKRQNVVKDLSVELDRLSEESVNNDISSWTKGRSGEALSLLKKRFSHRPVQEKFVCLNCGFETHADEQAALNIARSWLFLRSQEYKKYQTNKTTGNTDKRAFVETWQSFYRKKLKEVWKPAV

SEQ ID NO: 47318 - protein, 979 aa, synthetic construct
  REGION 1..979: note = engineered CasX variant
QEIKRINKIRRRLVKDSNTKKAGKTGPMKTLLVRVMTPDLRERLENLRKKPENIPQPISNTSRANLNKLLTDYTEMKKAILHVYWEEFQKDPVGLMSRVAQPASKKIDQNKLKPEMDEKGNLTTAGFACSQCGQPLFVYKLEQVSEKGKAYTNYFGRCNVAEHEKLIKLAQLKPEKDSDEAVTYSLGKFGQRALDFYSIHVTKESTHPVKPLAQIAGNRYASGPVGKALSDACMGTIASFLSKYQDIIIEHQKVVKGNQKRLESLRELAGKENLEYPSVTLPPQPHTKEGVDAYNEVIARVRMWVNLNLWQKLKLSRDDAKPLLRLKGFPSFPLVERQANEVDWWDMVCNVKKLINEKKEDGKVFWQNLAGYKRQEALRPYLSSEEDRKKGKKFARYQLGDLLLHLEKKHGEYDWGKVYDEAWERIDKKVEGLSKHIKLEEERRSEDAQSKAALTDWLRAKASFVIEGLKEADKDEFCRCELKLQKWYGDLRGKPFAIEAENSILDISGFSKQYNCAFIWQKDGVKKLNLYLIINYFKGGKLRFKKIKPEAFEANRFYTVINKKSGEIVPMEVNFNFDDPNLIILPLAFGKRQGREFIWNDLLSLETGSLKLANGRVIEKTLYNRRTRQDEPALFVALTFERREVLDSSNIKPMNLIGVDRGENIPAVIALTDPEGCPLSRFKDSLGNPTHILRIGESYKEKQRTIQAKKEVEQRRAGGYSRKYASKAKNLADDMVRNTARDLLYYAVTQDAMLIFENLSRGFGRQGKRTFMAERQYTRMEDWLTAKLAYEGLPSKTYLSKTLAQYTSKTCSNCGFTITSADYDRMLEKLKKTATGWMTTINGKELKVEGQITYYNRYKRQNVVKDLSVELDRLSEESVNNDISSWTKGRSGEALSLLKKRFSHRPVQEKFVCLNCGFETHADEQAALNIARSWLFLRSQEYKKYQTNKTTGNTDKRAFVETWQSFYRKKLKEVWKPAV

SEQ ID NO: 47319 - protein, 978 aa, synthetic construct
  REGION 1..978: note = engineered CasX variant
QEIKRINKIRRRLVKDSNTKKAGKTGPMKTLLVRVMTPDLRERLENLRKKPENIPQPISNTSRANLNKLLTDYTEMKKAILHVYWEEFQKDPVGLMSRVAQPASKKIDQNKLKPEMDEKGNLTTAGFACSQCGQPLFVYKLEQVSEKGKAYTNYFGRCNVAEHEKLILLAQLKPEKDSDEAVTYSLGKFGQRALDFYSIHVTKESTHPVKPLAQIAGNRYASPVGKALSDACMGTIASFLSKYQDIIIEHQKVVKGNQKRLESLRELAGKENLEYPSVTLPPQPHTKEGVDAYNEVIARVRMWVNLNLWQKLKLSRDDAKPLLRLKGFPSFPLVERQANEVDWWDMVCNVKKLINEKKEDGKVFWQNLAGYKRQEALRPYLSSEEDRKKGKKFARYQLGDLLLHLEKKHGEYDWGKVYDEAWERIDKKVEGLSKHIKLEEERRSEDAQSKAALTDWLRAKASFVIEGLKEADKDEFCRCELKLQKWYGDLRGKPFAIEAENSILDISGFSKQYNCAFIWQKDGVKKLNLYLIINYFKGGKLRFKKIKPEAFEANRFYTVINKKSGEIVPMEVNFNFDDPNLIILPLAFGKRQGREFIWNDLLSLETGSLKLANGRVIEKTLYNRRTRQDEPALFVALTFERREVLDSSNIKPMNLIGVDRGENIPAVIALTDPEGCPLSRFKDSLGNPTHILRIGESYKEKQRTIQAKKEVEQRRAGGYSRKYASKAKNLADDMVRNTARDLLYYAVTQDAMLIFENLSRGFGRQGKRTFMAERQYTRMEDWLTAKLAYEGLPSKTYLSKTLAQYTSKTCSNCGFTITSADYDRMLEKLKKTATGWMTTINGKELKVEGQITYYNRYKRQNVVKDLSVELDRLSEESVNNDISSWTKGRSGEALSLLKKRFSHRPVQEKFVCLNCGFETHADEQAALNIARSWLFLRSQEYKKYQTNKTTGNTDKRAFVETWQSFYRKKLKEVWKPAV

SEQ ID NO: 47320 - protein, 978 aa, synthetic construct
  REGION 1..978: note = engineered CasX variant
QEIKRINKIRRRLVKDSNTKKAGKTGPMKTLLVRVMTPDLRERLENLRKKPENIPQPISNTSRANLNKLLTDYTEMKKAILHVYWEEFQKDPVGLMSRVAQPASKKIDQNKLKPEMDEKGNLTTAGFACSQCGQPLFVYKLEQVSEKGKAYTNYFGRCNVAEHEKLILLAQLKPEKDSDEAVTYSLGKFGQRALDFYSIHVTKESTHPVKPLAQIAGNRYASYPVGKALSDACMGTIASFLSKYQDIIIEHQKVVKGNQKRLESLRELAGKENLEYPSVTLPPQPHTKEGVDAYNEVIARVRMWVNLNLWQKLKLSRDDAKPLLRLKGFPSFPLVERQANEVDWWDMVCNVKKLINEKKEDGKVFWQNLAGYKRQEALRPYLSSEEDRKKGKKFARYQLGDLLLHLEKKHGEDWGDVYDEAWERIDKKVEGLSKHIKLEEERRSEDAQSKAALTDWLRAKASFVIEGLKEADKDEFCRCELKLQKWYGDLRGKPFAIEAENSILDISGFSKQYNCAFIWQKDGVKKLNLYLIINYFKGGKLRFKKIKPEAFEANRFYTVINKKSGEIVPMEVNFNFDDPNLIILPLAFGKRQGREFIWNDLLSLETGSLKLANGRVIEKTLYNRRTRQDEPALFVALTFERREVLDSSNIKPMNLIGVDRGENIPAVIALTDPEGCPLSRFKDSLGNPTHILRIGESYKEKQRTIQAKKEVEQRRAGGYSRKYASKAKNLADDMVRNTARDLLYYAVTQDAMLIFENLSRGFGRQGKRTFMAERQYTRMEDWLTAKLAYEGLPSKTYLSKTLAQYTSKTCSNCGFTITSADYDRMLEKLKKTATGWMTTINGKELKVEGQITYYNRYKRQNVVKDLSVELDRLSEESVNNDISSWTKGRSGEALSLLKKRFSHRPVQEKFVCLNCGFETHADEQAALNIARSWLFLRSQEYKKYQTNKTTGNTDKRAFVETWQSFYRKKLKEVWKPAV

SEQ ID NO: 47321 - protein, 978 aa, synthetic construct
  REGION 1..978: note = engineered CasX variant
QEIKRINKIRRRLVKDSNTKKAGKTGPMKTLLVRVMTPDLRERLENLRKKPENIPQPISNTSRANLNKLLTDYTEMKKAILHVYWEEFQKDPVGLMSRVAQPASKKIDQNKLKPEMDEKGNLTTAGFACSQCGQPLFVYKLEQVSEKGKAYTNYFGRCNVAEHEKLILLAQLKPEKDSDEAVTYSLGKFGQRALDFYSIHVTKESTHPVKPLAQIAGNRYASHPVGKALSDACMGTIASFLSKYQDIIIEHQKVVKGNQKRLESLRELAGKENLEYPSVTLPPQPHTKEGVDAYNEVIARVRMWVNLNLWQKLKLSRDDAKPLLRLKGFPSFPLVERQANEVDWWDMVCNVKKLINEKKEDGKVFWQNLAGYKRQEALRPYLSSEEDRKKGKKFARYQLGDLLLHLEKKHGEDWGDVYDEAWERIDKKVEGLSKHIKLEEERRSEDAQSKAALTDWLRAKASFVIEGLKEADKDEFCRCELKLQKWYGDLRGKPFAIEAENSILDISGFSKQYNCAFIWQKDGVKKLNLYLIINYFKGGKLRFKKIKPEAFEANRFYTVINKKSGEIVPMEVNFNFDDPNLIILPLAFGKRQGREFIWNDLLSLETGSLKLANGRVIEKTLYNRRTRQDEPALFVALTFERREVLDSSNIKPMNLIGVDRGENIPAVIALTDPEGCPLSRFKDSLGNPTHILRIGESYKEKQRTIQAKKEVEQRRAGGYSRKYASKAKNLADDMVRNTARDLLYYAVTQDAMLIFENLSRGFGRQGKRTFMAERQYTRMEDWLTAKLAYEGLPSKTYLSKTLAQYTSKTCSNCGFTITSADYDRMLEKLKKTATGWMTTINGKELKVEGQITYYNRYKRQNVVKDLSVELDRLSEESVNNDISSWTKGRSGEALSLLKKRFSHRPVQEKFVCLNCGFETHADEQAALNIARSWLFLRSQEYKKYQTNKTTGNTDKRAFVETWQSFYRKKLKEVWKPAV

SEQ ID NO: 47322 - protein, 978 aa, synthetic construct
  REGION 1..978: note = engineered CasX variant
QEIKRINKIRRRLVKDSNTKKAGKTGPMKTLLVRVMTPDLRERLENLRKKPENIPQPISNTSRANLNKLLTDYTEMKKAILHVYWEEFQKDPVGLMSRVAQPASKKIDQNKLKPEMDEKGNLTTAGFACSQCGQPLFVYKLEQVSEKGKAYTNYFGRCNVAEHEKLILLAQLKPEKDSDEAVTYSLGKFGQRALDFYSIHVTKESTHPVKPLAQIAGNRYASSPVGKALSDACMGTIASFLSKYQDIIIEHQKVVKGNQKRLESLRELAGKENLEYPSVTLPPQPHTKEGVDAYNEVIARVRMWVNLNLWQKLKLSRDDAKPLLRLKGFPSFPLVERQANEVDWWDMVCNVKKLINEKKEDGKVFWQNLAGYKRQEALRPYLSSEEDRKKGKKFARYQLGDLLLHLEKKHGEDWGDVYDEAWERIDKKVEGLSKHIKLEEERRSEDAQSKAALTDWLRAKASFVIEGLKEADKDEFCRCELKLQKWYGDLRGKPFAIEAENSILDISGFSKQYNCAFIWQKDGVKKLNLYLIINYFKGGKLRFKKIKPEAFEANRFYTVINKKSGEIVPMEVNFNFDDPNLIILPLAFGKRQGREFIWNDLLSLETGSLKLANGRVIEKTLYNRRTRQDEPALFVALTFERREVLDSSNIKPMNLIGVDRGENIPAVIALTDPEGCPLSRFKDSLGNPTHILRIGESYKEKQRTIQAKKEVEQRRAGGYSRKYASKAKNLADDMVRNTARDLLYYAVTQDAMLIFENLSRGFGRQGKRTFMAERQYTRMEDWLTAKLAYEGLPSKTYLSKTLAQYTSKTCSNCGFTITSADYDRMLEKLKKTATGWMTTINGKELKVEGQITYYNRYKRQNVVKDLSVELDRLSEESVNNDISSWTKGRSGEALSLLKKRFSHRPVQEKFVCLNCGFETHADEQAALNIARSWLFLRSQEYKKYQTNKTTGNTDKRAFVETWQSFYRKKLKEVWKPAV

SEQ ID NO: 47323 - protein, 978 aa, synthetic construct
  REGION 1..978: note = engineered CasX variant
QEIKRINKIRRRLVKDSNTKKAGKTGPMKTLLVRVMTPDLRERLENLRKKPENIPQPISNTSRANLNKLLTDYTEMKKAILHVYWEEFQKDPVGLMSRVAQPASKKIDQNKLKPEMDEKGNLTTAGFACSQCGQPLFVYKLEQVSEKGKAYTNYFGRCNVAEHEKLILLAQLKPEKDSDEAVTYSLGKFGQRALDFYSIHVTKESTHPVKPLAQIAGNRYASTPVGKALSDACMGTIASFLSKYQDIIIEHQKVVKGNQKRLESLRELAGKENLEYPSVTLPPQPHTKEGVDAYNEVIARVRMWVNLNLWQKLKLSRDDAKPLLRLKGFPSFPLVERQANEVDWWDMVCNVKKLINEKKEDGKVFWQNLAGYKRQEALRPYLSSEEDRKKGKKFARYQLGDLLLHLEKKHGEDWGDVYDEAWERIDKKVEGLSKHIKLEEERRSEDAQSKAALTDWLRAKASFVIEGLKEADKDEFCRCELKLQKWYGDLRGKPFAIEAENSILDISGFSKQYNCAFIWQKDGVKKLNLYLIINYFKGGKLRFKKIKPEAFEANRFYTVINKKSGEIVPMEVNFNFDDPNLIILPLAFGKRQGREFIWNDLLSLETGSLKLANGRVIEKTLYNRRTRQDEPALFVALTFERREVLDSSNIKPMNLIGVDRGENIPAVIALTDPEGCPLSRFKDSLGNPTHILRIGESYKEKQRTIQAKKEVEQRRAGGYSRKYASKAKNLADDMVRNTARDLLYYAVTQDAMLIFENLSRGFGRQGKRTFMAERQYTRMEDWLTAKLAYEGLPSKTYLSKTLAQYTSKTCSNCGFTITSADYDRMLEKLKKTATGWMTTINGKELKVEGQITYYNRYKRQNVVKDLSVELDRLSEESVNNDISSWTKGRSGEALSLLKKRFSHRPVQEKFVCLNCGFETHADEQAALNIARSWLFLRSQEYKKYQTNKTTGNTDKRAFVETWQSFYRKKLKEVWKPAV

SEQ ID NO: 47324 - protein, 978 aa, synthetic construct
  REGION 1..978: note = engineered CasX variant
QEIKRINKIRRRLVKDSNTKKAGKTGPMKTLLVRVMTPDLRERLENLRKKPENIPQPISNTSRANLNKLLTDYTEMKKAILHVYWEEFQKDPVGLMSRVAQPASKKIDQNKLKPEMDEKGNLTTAGFACSQCGQPLFVYKLEQVSEKGKAYTNYFGRCNVAEHEKLILLAQLKPEKDSDEAVTYSLGKFGQRALDFYSIHVTKESTHPVKPLAQIAGNRYASAPVGKALSDACMGTIASFLSKYQDIIIEHQKVVKGNQKRLESLRELAGKENLEYPSVTLPPQPHTKEGVDAYNEVIARVRMWVNLNLWQKLKLSRDDAKPLLRLKGFPSFPLVERQANEVDWWDMVCNVKKLINEKKEDGKVFWQNLAGYKRQEALRPYLSSEEDRKKGKKFARYQLGDLLLHLEKKHGEDWGDVYDEAWERIDKKVEGLSKHIKLEEERRSEDAQSKAALTDWLRAKASFVIEGLKEADKDEFCRCELKLQKWYGDLRGKPFAIEAENSILDISGFSKQYNCAFIWQKDGVKKLNLYLIINYFKGGKLRFKKIKPEAFEANRFYTVINKKSGEIVPMEVNFNFDDPNLIILPLAFGKRQGREFIWNDLLSLETGSLKLANGRVIEKTLYNRRTRQDEPALFVALTFERREVLDSSNIKPMNLIGVDRGENIPAVIALTDPEGCPLSRFKDSLGNPTHILRIGESYKEKQRTIQAKKEVEQRRAGGYSRKYASKAKNLADDMVRNTARDLLYYAVTQDAMLIFENLSRGFGRQGKRTFMAERQYTRMEDWLTAKLAYEGLPSKTYLSKTLAQYTSKTCSNCGFTITSADYDRMLEKLKKTATGWMTTINGKELKVEGQITYYNRYKRQNVVKDLSVELDRLSEESVNNDISSWTKGRSGEALSLLKKRFSHRPVQEKFVCLNCGFETHADEQAALNIARSWLFLRSQEYKKYQTNKTTGNTDKRAFVETWQSFYRKKLKEVWKPAV

SEQ ID NO: 47325 - protein, 978 aa, synthetic construct
  REGION 1..978: note = engineered CasX variant
QEIKRINKIRRRLVKDSNTKKAGKTGPMKTLLVRVMTPDLRERLENLRKKPENIPQPISNTSRANLNKLLTDYTEMKKAILHVYWEEFQKDPVGLMSRVAQPASKKIDQNKLKPEMDEKGNLTTAGFACSQCGQPLFVYKLEQVSEKGKAYTNYFGRCNVAEHEKLILLAQLKPEKDSDEAVTYSLGKFGQRALDFYSIHVTKESTHPVKPLAQIAGNRYASVPVGKALSDACMGTIASFLSKYQDIIIEHQKVVKGNQKRLESLRELAGKENLEYPSVTLPPQPHTKEGVDAYNEVIARVRMWVNLNLWQKLKLSRDDAKPLLRLKGFPSFPLVERQANEVDWWDMVCNVKKLINEKKEDGKVFWQNLAGYKRQEALRPYLSSEEDRKKGKKFARYQLGDLLLHLEKKHGEDWGDVYDEAWERIDKKVEGLSKHIKLEEERRSEDAQSKAALTDWLRAKASFVIEGLKEADKDEFCRCELKLQKWYGDLRGKPFAIEAENSILDISGFSKQYNCAFIWQKDGVKKLNLYLIINYFKGGKLRFKKIKPEAFEANRFYTVINKKSGEIVPMEVNFNFDDPNLIILPLAFGKRQGREFIWNDLLSLETGSLKLANGRVIEKTLYNRRTRQDEPALFVALTFERREVLDSSNIKPMNLIGVDRGENIPAVIALTDPEGCPLSRFKDSLGNPTHILRIGESYKEKQRTIQAKKEVEQRRAGGYSRKYASKAKNLADDMVRNTARDLLYYAVTQDAMLIFENLSRGFGRQGKRTFMAERQYTRMEDWLTAKLAYEGLPSKTYLSKTLAQYTSKTCSNCGFTITSADYDRMLEKLKKTATGWMTTINGKELKVEGQITYYNRYKRQNVVKDLSVELDRLSEESVNNDISSWTKGRSGEALSLLKKRFSHRPVQEKFVCLNCGFETHADEQAALNIARSWLFLRSQEYKKYQTNKTTGNTDKRAFVETWQSFYRKKLKEVWKPAV

SEQ ID NO: 47326 - protein, 978 aa, synthetic construct
  REGION 1..978: note = engineered CasX variant
QEIKRINKIRRRLVKDSNTKKAGKTGPMKTLLVRVMTPDLRERLENLRKKPENIPQPISNTSRANLNKLLTDYTEMKKAILHVYWEEFQKDPVGLMSRVAQPASKKIDQNKLKPEMDEKGNLTTAGFACSQCGQPLFVYKLEQVSEKGKAYTNYFGRCNVAEHEKLIKLAQLKPEKDSDEAVTYSLGKFGQRALDFYSIHVTKESTHPVKPLAQIAGNRYASGPVGKALSDACMGTIASFLSKYQDIIIEHQKVVKGNQKRLESLRELAGKENLEYPSVTLPPQPHTKEGVDAYNEVIARVRMWVNLNLWQKLKLSRDDAKPLLRLKGFPSFPLVERQANEVDWWDMVCNVKKLINEKKEDGKVFWQNLAGYKRQEALRPYLSSEEDRKKGKKFARYQLGDLLLHLEKKHGEDWGDVYDEAWERIDKKVEGLSKHIKLEEERRSEDAQSKAALTDWLRAKASFVIEGLKEADKDEFCRCELKLQKWYGDLRGKPFAIEAENSILDISGFSKQYNCAFIWQKDGVKKLNLYLIINYFKGGKLRFKKIKPEAFEANRFYTVINKKSGEIVPMEVNFNFDDPNLIILPLAFGKRQGREFIWNDLLSLETGSLKLANGRVIEKTLYNRRTRQDEPALFVALTFERREVLDSSNIKPMNLIGVDRGENIPAVIALTDPEGCPLSRFKDSLGNPTHILRIGESYKEKQRTIQAKKEVEQRRAGGYSRKYASKAKNLADDMVRNTARDLLYYAVTQDAMLIFENLSRGFGRQGKRTFMAERQYTRMEDWLTAKLAYEGLPSKTYLSKTLAQYTSKTCSNCGFTITSADYDRMLEKLKKTATGWMTTINGKELKVEGQITYYNRYKRQNVVKDLSVELDRLSEESVNNDISSWTKGRSGEALSLLKKRFSHRPVQEKFVCLNCGFETHADEQAALNIARSWLFLRSQEYKKYQTNKTTGNTDKRAFVETWQSFYRKKLKEVWKPAV

SEQ ID NO: 47327 - protein, 977 aa, synthetic construct
  REGION 1..977: note = engineered CasX variant
QEIKRINKIRRRLVKDSNTKKAGKTGPMKTLLVRVMTPDLRERLENLRKKPENIPQPISNTSRANLNKLLTDYTEMKKAILHVYWEEFQKDPVGLMSRVAQPASKKIDQNKLKPEMDEKGNLTTAGFACSQCGQPLFVYKLEQVSEKGKAYTNYFGRCNVAEHEKLILLAQLKPEKDSDEAVTYSLGKFGQRALDFYSIHVTKESTHPVKPLAQIAGNRYASPVGKALSDACMGTIASFLSKYQDIIIEHQKVVKGNQKRLESLRELAGKENLEYPSVTLPPQPHTKEGVDAYNEVIARVRMWVNLNLWQKLKLSRDDAKPLLRLKGFPSFPLVERQANEVDWWDMVCNVKKLINEKKEDGKVFWQNLAGYKRQEALRPYLSSEEDRKKGKKFARYQLGDLLLHLEKKHGEDWGDVYDEAWERIDKKVEGLSKHIKLEEERRSEDAQSKAALTDWLRAKASFVIEGLKEADKDEFCRCELKLQKWYGDLRGKPFAIEAENSILDISGFSKQYNCAFIWQKDGVKKLNLYLIINYFKGGKLRFKKIKPEAFEANRFYTVINKKSGEIVPMEVNFNFDDPNLIILPLAFGKRQGREFIWNDLLSLETGSLKLANGRVIEKTLYNRRTRQDEPALFVALTFERREVLDSSNIKPMNLIGVDRGENIPAVIALTDPEGCPLSRFKDSLGNPTHILRIGESYKEKQRTIQAKKEVEQRRAGGYSRKYASKAKNLADDMVRNTARDLLYYAVTQDAMLIFENLSRGFGRQGKRTFMAERQYTRMEDWLTAKLAYEGLPSKTYLSKTLAQYTSKTCSNCGFTITSADYDRMLEKLKKTATGWMTTINGKELKVEGQITYYNRYKRQNVVKDLSVELDRLSEESVNNDISSWTKGRSGEALSLLKKRFSHRPVQEKFVCLNCGFETHADEQAALNIARSWLFLRSQEYKKYQTNKTTGNTDKRAFVETWQSFYRKKLKEVWKPAV

SEQ ID NO: 47328 - protein, 978 aa, synthetic construct
  REGION 1..978: note = engineered CasX variant
QEIKRINKIRRRLVKDSNTKKAGKTGPMKTLLVRVMTPDLRERLENLRKKPENIPQPISNTSRANLNKLLTDYTEMKKAILHVYWEEFQKDPVGLMSRVAQPASKKIDQNKLKPEMDEKGNLTTAGFACSQCGQPLFVYKLEQVSEKGKAYTNYFGRCNVAEHEKLILLAQLKPEKDSDEAVTYSLGKFGQRALDFYSIHVTKESTHPVKPLAQIAGNRYASYPVGKALSDACMGTIASFLSKYQDIIIEHQKVVKGNQKRLESLRELAGKENLEYPSVTLPPQPHTKEGVDAYNEVIARVRMWVNLNLWQKLKLSRDDAKPLLRLKGFPSFPLVERQANEVDWWDMVCNVKKLINEKKEDGKVFWQNLAGYKRQEALRPYLSSEEDRKKGKKFARYQLGDLLLHLEKKHGEDWGKVYGEAWERIDKKVEGLSKHIKLEEERRSEDAQSKAALTDWLRAKASFVIEGLKEADKDEFCRCELKLQKWYGDLRGKPFAIEAENSILDISGFSKQYNCAFIWQKDGVKKLNLYLIINYFKGGKLRFKKIKPEAFEANRFYTVINKKSGEIVPMEVNFNFDDPNLIILPLAFGKRQGREFIWNDLLSLETGSLKLANGRVIEKTLYNRRTRQDEPALFVALTFERREVLDSSNIKPMNLIGVDRGENIPAVIALTDPEGCPLSRFKDSLGNPTHILRIGESYKEKQRTIQAKKEVEQRRAGGYSRKYASKAKNLADDMVRNTARDLLYYAVTQDAMLIFENLSRGFGRQGKRTFMAERQYTRMEDWLTAKLAYEGLPSKTYLSKTLAQYTSKTCSNCGFTITSADYDRMLEKLKKTATGWMTTINGKELKVEGQITYYNRYKRQNVVKDLSVELDRLSEESVNNDISSWTKGRSGEALSLLKKRFSHRPVQEKFVCLNCGFETHADEQAALNIARSWLFLRSQEYKKYQTNKTTGNTDKRAFVETWQSFYRKKLKEVWKPAV

SEQ ID NO: 47329 - protein, 978 aa, synthetic construct
  REGION 1..978: note = engineered CasX variant
QEIKRINKIRRRLVKDSNTKKAGKTGPMKTLLVRVMTPDLRERLENLRKKPENIPQPISNTSRANLNKLLTDYTEMKKAILHVYWEEFQKDPVGLMSRVAQPASKKIDQNKLKPEMDEKGNLTTAGFACSQCGQPLFVYKLEQVSEKGKAYTNYFGRCNVAEHEKLILLAQLKPEKDSDEAVTYSLGKFGQRALDFYSIHVTKESTHPVKPLAQIAGNRYASHPVGKALSDACMGTIASFLSKYQDIIIEHQKVVKGNQKRLESLRELAGKENLEYPSVTLPPQPHTKEGVDAYNEVIARVRMWVNLNLWQKLKLSRDDAKPLLRLKGFPSFPLVERQANEVDWWDMVCNVKKLINEKKEDGKVFWQNLAGYKRQEALRPYLSSEEDRKKGKKFARYQLGDLLLHLEKKHGEDWGKVYGEAWERIDKKVEGLSKHIKLEEERRSEDAQSKAALTDWLRAKASFVIEGLKEADKDEFCRCELKLQKWYGDLRGKPFAIEAENSILDISGFSKQYNCAFIWQKDGVKKLNLYLIINYFKGGKLRFKKIKPEAFEANRFYTVINKKSGEIVPMEVNFNFDDPNLIILPLAFGKRQGREFIWNDLLSLETGSLKLANGRVIEKTLYNRRTRQDEPALFVALTFERREVLDSSNIKPMNLIGVDRGENIPAVIALTDPEGCPLSRFKDSLGNPTHILRIGESYKEKQRTIQAKKEVEQRRAGGYSRKYASKAKNLADDMVRNTARDLLYYAVTQDAMLIFENLSRGFGRQGKRTFMAERQYTRMEDWLTAKLAYEGLPSKTYLSKTLAQYTSKTCSNCGFTITSADYDRMLEKLKKTATGWMTTINGKELKVEGQITYYNRYKRQNVVKDLSVELDRLSEESVNNDISSWTKGRSGEALSLLKKRFSHRPVQEKFVCLNCGFETHADEQAALNIARSWLFLRSQEYKKYQTNKTTGNTDKRAFVETWQSFYRKKLKEVWKPAV

SEQ ID NO: 47330 - protein, 978 aa, synthetic construct
  REGION 1..978: note = engineered CasX variant
QEIKRINKIRRRLVKDSNTKKAGKTGPMKTLLVRVMTPDLRERLENLRKKPENIPQPISNTSRANLNKLLTDYTEMKKAILHVYWEEFQKDPVGLMSRVAQPASKKIDQNKLKPEMDEKGNLTTAGFACSQCGQPLFVYKLEQVSEKGKAYTNYFGRCNVAEHEKLILLAQLKPEKDSDEAVTYSLGKFGQRALDFYSIHVTKESTHPVKPLAQIAGNRYASSPVGKALSDACMGTIASFLSKYQDIIIEHQKVVKGNQKRLESLRELAGKENLEYPSVTLPPQPHTKEGVDAYNEVIARVRMWVNLNLWQKLKLSRDDAKPLLRLKGFPSFPLVERQANEVDWWDMVCNVKKLINEKKEDGKVFWQNLAGYKRQEALRPYLSSEEDRKKGKKFARYQLGDLLLHLEKKHGEDWGKVYGEAWERIDKKVEGLSKHIKLEEERRSEDAQSKAALTDWLRAKASFVIEGLKEADKDEFCRCELKLQKWYGDLRGKPFAIEAENSILDISGFSKQYNCAFIWQKDGVKKLNLYLIINYFKGGKLRFKKIKPEAFEANRFYTVINKKSGEIVPMEVNFNFDDPNLIILPLAFGKRQGREFIWNDLLSLETGSLKLANGRVIEKTLYNRRTRQDEPALFVALTFERREVLDSSNIKPMNLIGVDRGENIPAVIALTDPEGCPLSRFKDSLGNPTHILRIGESYKEKQRTIQAKKEVEQRRAGGYSRKYASKAKNLADDMVRNTARDLLYYAVTQDAMLIFENLSRGFGRQGKRTFMAERQYTRMEDWLTAKLAYEGLPSKTYLSKTLAQYTSKTCSNCGFTITSADYDRMLEKLKKTATGWMTTINGKELKVEGQITYYNRYKRQNVVKDLSVELDRLSEESVNNDISSWTKGRSGEALSLLKKRFSHRPVQEKFVCLNCGFETHADEQAALNIARSWLFLRSQEYKKYQTNKTTGNTDKRAFVETWQSFYRKKLKEVWKPAV

SEQ ID NO: 47331 - protein, 978 aa, synthetic construct
  REGION 1..978: note = engineered CasX variant
QEIKRINKIRRRLVKDSNTKKAGKTGPMKTLLVRVMTPDLRERLENLRKKPENIPQPISNTSRANLNKLLTDYTEMKKAILHVYWEEFQKDPVGLMSRVAQPASKKIDQNKLKPEMDEKGNLTTAGFACSQCGQPLFVYKLEQVSEKGKAYTNYFGRCNVAEHEKLILLAQLKPEKDSDEAVTYSLGKFGQRALDFYSIHVTKESTHPVKPLAQIAGNRYASTPVGKALSDACMGTIASFLSKYQDIIIEHQKVVKGNQKRLESLRELAGKENLEYPSVTLPPQPHTKEGVDAYNEVIARVRMWVNLNLWQKLKLSRDDAKPLLRLKGFPSFPLVERQANEVDWWDMVCNVKKLINEKKEDGKVFWQNLAGYKRQEALRPYLSSEEDRKKGKKFARYQLGDLLLHLEKKHGEDWGKVYGEAWERIDKKVEGLSKHIKLEEERRSEDAQSKAALTDWLRAKASFVIEGLKEADKDEFCRCELKLQKWYGDLRGKPFAIEAENSILDISGFSKQYNCAFIWQKDGVKKLNLYLIINYFKGGKLRFKKIKPEAFEANRFYTVINKKSGEIVPMEVNFNFDDPNLIILPLAFGKRQGREFIWNDLLSLETGSLKLANGRVIEKTLYNRRTRQDEPALFVALTFERREVLDSSNIKPMNLIGVDRGENIPAVIALTDPEGCPLSRFKDSLGNPTHILRIGESYKEKQRTIQAKKEVEQRRAGGYSRKYASKAKNLADDMVRNTARDLLYYAVTQDAMLIFENLSRGFGRQGKRTFMAERQYTRMEDWLTAKLAYEGLPSKTYLSKTLAQYTSKTCSNCGFTITSADYDRMLEKLKKTATGWMTTINGKELKVEGQITYYNRYKRQNVVKDLSVELDRLSEESVNNDISSWTKGRSGEALSLLKKRFSHRPVQEKFVCLNCGFETHADEQAALNIARSWLFLRSQEYKKYQTNKTTGNTDKRAFVETWQSFYRKKLKEVWKPAV

SEQ ID NO: 47332 - protein, 978 aa, synthetic construct
  REGION 1..978: note = engineered CasX variant
QEIKRINKIRRRLVKDSNTKKAGKTGPMKTLLVRVMTPDLRERLENLRKKPENIPQPISNTSRANLNKLLTDYTEMKKAILHVYWEEFQKDPVGLMSRVAQPASKKIDQNKLKPEMDEKGNLTTAGFACSQCGQPLFVYKLEQVSEKGKAYTNYFGRCNVAEHEKLILLAQLKPEKDSDEAVTYSLGKFGQRALDFYSIHVTKESTHPVKPLAQIAGNRYASAPVGKALSDACMGTIASFLSKYQDIIIEHQKVVKGNQKRLESLRELAGKENLEYPSVTLPPQPHTKEGVDAYNEVIARVRMWVNLNLWQKLKLSRDDAKPLLRLKGFPSFPLVERQANEVDWWDMVCNVKKLINEKKEDGKVFWQNLAGYKRQEALRPYLSSEEDRKKGKKFARYQLGDLLLHLEKKHGEDWGKVYGEAWERIDKKVEGLSKHIKLEEERRSEDAQSKAALTDWLRAKASFVIEGLKEADKDEFCRCELKLQKWYGDLRGKPFAIEAENSILDISGFSKQYNCAFIWQKDGVKKLNLYLIINYFKGGKLRFKKIKPEAFEANRFYTVINKKSGEIVPMEVNFNFDDPNLIILPLAFGKRQGREFIWNDLLSLETGSLKLANGRVIEKTLYNRRTRQDEPALFVALTFERREVLDSSNIKPMNLIGVDRGENIPAVIALTDPEGCPLSRFKDSLGNPTHILRIGESYKEKQRTIQAKKEVEQRRAGGYSRKYASKAKNLADDMVRNTARDLLYYAVTQDAMLIFENLSRGFGRQGKRTFMAERQYTRMEDWLTAKLAYEGLPSKTYLSKTLAQYTSKTCSNCGFTITSADYDRMLEKLKKTATGWMTTINGKELKVEGQITYYNRYKRQNVVKDLSVELDRLSEESVNNDISSWTKGRSGEALSLLKKRFSHRPVQEKFVCLNCGFETHADEQAALNIARSWLFLRSQEYKKYQTNKTTGNTDKRAFVETWQSFYRKKLKEVWKPAV

SEQ ID NO: 47333 - protein, 978 aa, synthetic construct
  REGION 1..978: note = engineered CasX variant
QEIKRINKIRRRLVKDSNTKKAGKTGPMKTLLVRVMTPDLRERLENLRKKPENIPQPISNTSRANLNKLLTDYTEMKKAILHVYWEEFQKDPVGLMSRVAQPASKKIDQNKLKPEMDEKGNLTTAGFACSQCGQPLFVYKLEQVSEKGKAYTNYFGRCNVAEHEKLILLAQLKPEKDSDEAVTYSLGKFGQRALDFYSIHVTKESTHPVKPLAQIAGNRYASVPVGKALSDACMGTIASFLSKYQDIIIEHQKVVKGNQKRLESLRELAGKENLEYPSVTLPPQPHTKEGVDAYNEVIARVRMWVNLNLWQKLKLSRDDAKPLLRLKGFPSFPLVERQANEVDWWDMVCNVKKLINEKKEDGKVFWQNLAGYKRQEALRPYLSSEEDRKKGKKFARYQLGDLLLHLEKKHGEDWGKVYGEAWERIDKKVEGLSKHIKLEEERRSEDAQSKAALTDWLRAKASFVIEGLKEADKDEFCRCELKLQKWYGDLRGKPFAIEAENSILDISGFSKQYNCAFIWQKDGVKKLNLYLIINYFKGGKLRFKKIKPEAFEANRFYTVINKKSGEIVPMEVNFNFDDPNLIILPLAFGKRQGREFIWNDLLSLETGSLKLANGRVIEKTLYNRRTRQDEPALFVALTFERREVLDSSNIKPMNLIGVDRGENIPAVIALTDPEGCPLSRFKDSLGNPTHILRIGESYKEKQRTIQAKKEVEQRRAGGYSRKYASKAKNLADDMVRNTARDLLYYAVTQDAMLIFENLSRGFGRQGKRTFMAERQYTRMEDWLTAKLAYEGLPSKTYLSKTLAQYTSKTCSNCGFTITSADYDRMLEKLKKTATGWMTTINGKELKVEGQITYYNRYKRQNVVKDLSVELDRLSEESVNNDISSWTKGRSGEALSLLKKRFSHRPVQEKFVCLNCGFETHADEQAALNIARSWLFLRSQEYKKYQTNKTTGNTDKRAFVETWQSFYRKKLKEVWKPAV

SEQ ID NO: 47334 - protein, 978 aa, synthetic construct
  REGION 1..978: note = engineered CasX variant
QEIKRINKIRRRLVKDSNTKKAGKTGPMKTLLVRVMTPDLRERLENLRKKPENIPQPISNTSRANLNKLLTDYTEMKKAILHVYWEEFQKDPVGLMSRVAQPASKKIDQNKLKPEMDEKGNLTTAGFACSQCGQPLFVYKLEQVSEKGKAYTNYFGRCNVAEHEKLIKLAQLKPEKDSDEAVTYSLGKFGQRALDFYSIHVTKESTHPVKPLAQIAGNRYASGPVGKALSDACMGTIASFLSKYQDIIIEHQKVVKGNQKRLESLRELAGKENLEYPSVTLPPQPHTKEGVDAYNEVIARVRMWVNLNLWQKLKLSRDDAKPLLRLKGFPSFPLVERQANEVDWWDMVCNVKKLINEKKEDGKVFWQNLAGYKRQEALRPYLSSEEDRKKGKKFARYQLGDLLLHLEKKHGEDWGKVYGEAWERIDKKVEGLSKHIKLEEERRSEDAQSKAALTDWLRAKASFVIEGLKEADKDEFCRCELKLQKWYGDLRGKPFAIEAENSILDISGFSKQYNCAFIWQKDGVKKLNLYLIINYFKGGKLRFKKIKPEAFEANRFYTVINKKSGEIVPMEVNFNFDDPNLIILPLAFGKRQGREFIWNDLLSLETGSLKLANGRVIEKTLYNRRTRQDEPALFVALTFERREVLDSSNIKPMNLIGVDRGENIPAVIALTDPEGCPLSRFKDSLGNPTHILRIGESYKEKQRTIQAKKEVEQRRAGGYSRKYASKAKNLADDMVRNTARDLLYYAVTQDAMLIFENLSRGFGRQGKRTFMAERQYTRMEDWLTAKLAYEGLPSKTYLSKTLAQYTSKTCSNCGFTITSADYDRMLEKLKKTATGWMTTINGKELKVEGQITYYNRYKRQNVVKDLSVELDRLSEESVNNDISSWTKGRSGEALSLLKKRFSHRPVQEKFVCLNCGFETHADEQAALNIARSWLFLRSQEYKKYQTNKTTGNTDKRAFVETWQSFYRKKLKEVWKPAV

SEQ ID NO: 47335 - protein, 977 aa, synthetic construct
  REGION 1..977: note = engineered CasX variant
QEIKRINKIRRRLVKDSNTKKAGKTGPMKTLLVRVMTPDLRERLENLRKKPENIPQPISNTSRANLNKLLTDYTEMKKAILHVYWEEFQKDPVGLMSRVAQPASKKIDQNKLKPEMDEKGNLTTAGFACSQCGQPLFVYKLEQVSEKGKAYTNYFGRCNVAEHEKLILLAQLKPEKDSDEAVTYSLGKFGQRALDFYSIHVTKESTHPVKPLAQIAGNRYASPVGKALSDACMGTIASFLSKYQDIIIEHQKVVKGNQKRLESLRELAGKENLEYPSVTLPPQPHTKEGVDAYNEVIARVRMWVNLNLWQKLKLSRDDAKPLLRLKGFPSFPLVERQANEVDWWDMVCNVKKLINEKKEDGKVFWQNLAGYKRQEALRPYLSSEEDRKKGKKFARYQLGDLLLHLEKKHGEDWGKVYGEAWERIDKKVEGLSKHIKLEEERRSEDAQSKAALTDWLRAKASFVIEGLKEADKDEFCRCELKLQKWYGDLRGKPFAIEAENSILDISGFSKQYNCAFIWQKDGVKKLNLYLIINYFKGGKLRFKKIKPEAFEANRFYTVINKKSGEIVPMEVNFNFDDPNLIILPLAFGKRQGREFIWNDLLSLETGSLKLANGRVIEKTLYNRRTRQDEPALFVALTFERREVLDSSNIKPMNLIGVDRGENIPAVIALTDPEGCPLSRFKDSLGNPTHILRIGESYKEKQRTIQAKKEVEQRRAGGYSRKYASKAKNLADDMVRNTARDLLYYAVTQDAMLIFENLSRGFGRQGKRTFMAERQYTRMEDWLTAKLAYEGLPSKTYLSKTLAQYTSKTCSNCGFTITSADYDRMLEKLKKTATGWMTTINGKELKVEGQITYYNRYKRQNVVKDLSVELDRLSEESVNNDISSWTKGRSGEALSLLKKRFSHRPVQEKFVCLNCGFETHADEQAALNIARSWLFLRSQEYKKYQTNKTTGNTDKRAFVETWQSFYRKKLKEVWKPAV

SEQ ID NO: 47336 - protein, 978 aa, synthetic construct
  REGION 1..978: note = engineered CasX variant
QEIKRINKIRRRLVKDSNTKKAGKTGPMKTLLVRVMTPDLRERLENLRKKPENIPQPISNTSRANLNKLLTDYTEMKKAILHVYWEEFQKDPVGLMSRVAQPASKKIDQNKLKPEMDEKGNLTTAGFACSQCGQPLFVYKLEQVSEKGKAYTNYFGRCNVAEHEKLILLAQLKPEKDSDEAVTYSLGKFGQRALDFYSIHVTKESTHPVKPLAQIAGNRYASYPVGKALSDACMGTIASFLSKYQDIIIEHQKVVKGNQKRLESLRELAGKENLEYPSVTLPPQPHTKEGVDAYNEVIARVRMWVNLNLWQKLKLSRDDAKPLLRLKGFPSFPLVERQANEVDWWDMVCNVKKLINEKKEDGKVFWQNLAGYKRQEALRPYLSSEEDRKKGKKFARYQLGDLLLHLEKKHGEDWGKVYDEAWERIDKKVEGLSKHIKLEEERRSEDAQSKAALTDWLRAKASFVIEGKKEADKDEFCRCELKLQKWYGDLRGKPFAIEAENSILDISGFSKQYNCAFIWQKDGVKKLNLYLIINYFKGGKLRFKKIKPEAFEANRFYTVINKKSGEIVPMEVNFNFDDPNLIILPLAFGKRQGREFIWNDLLSLETGSLKLANGRVIEKTLYNRRTRQDEPALFVALTFERREVLDSSNIKPMNLIGVDRGENIPAVIALTDPEGCPLSRFKDSLGNPTHILRIGESYKEKQRTIQAKKEVEQRRAGGYSRKYASKAKNLADDMVRNTARDLLYYAVTQDAMLIFENLSRGFGRQGKRTFMAERQYTRMEDWLTAKLAYEGLPSKTYLSKTLAQYTSKTCSNCGFTITSADYDRMLEKLKKTATGWMTTINGKELKVEGQITYYNRYKRQNVVKDLSVELDRLSEESVNNDISSWTKGRSGEALSLLKKRFSHRPVQEKFVCLNCGFETHADEQAALNIARSWLFLRSQEYKKYQTNKTTGNTDKRAFVETWQSFYRKKLKEVWKPAV

SEQ ID NO: 47337 - protein, 978 aa, synthetic construct
  REGION 1..978: note = engineered CasX variant
QEIKRINKIRRRLVKDSNTKKAGKTGPMKTLLVRVMTPDLRERLENLRKKPENIPQPISNTSRANLNKLLTDYTEMKKAILHVYWEEFQKDPVGLMSRVAQPASKKIDQNKLKPEMDEKGNLTTAGFACSQCGQPLFVYKLEQVSEKGKAYTNYFGRCNVAEHEKLILLAQLKPEKDSDEAVTYSLGKFGQRALDFYSIHVTKESTHPVKPLAQIAGNRYASHPVGKALSDACMGTIASFLSKYQDIIIEHQKVVKGNQKRLESLRELAGKENLEYPSVTLPPQPHTKEGVDAYNEVIARVRMWVNLNLWQKLKLSRDDAKPLLRLKGFPSFPLVERQANEVDWWDMVCNVKKLINEKKEDGKVFWQNLAGYKRQEALRPYLSSEEDRKKGKKFARYQLGDLLLHLEKKHGEDWGKVYDEAWERIDKKVEGLSKHIKLEEERRSEDAQSKAALTDWLRAKASFVIEGKKEADKDEFCRCELKLQKWYGDLRGKPFAIEAENSILDISGFSKQYNCAFIWQKDGVKKLNLYLIINYFKGGKLRFKKIKPEAFEANRFYTVINKKSGEIVPMEVNFNFDDPNLIILPLAFGKRQGREFIWNDLLSLETGSLKLANGRVIEKTLYNRRTRQDEPALFVALTFERREVLDSSNIKPMNLIGVDRGENIPAVIALTDPEGCPLSRFKDSLGNPTHILRIGESYKEKQRTIQAKKEVEQRRAGGYSRKYASKAKNLADDMVRNTARDLLYYAVTQDAMLIFENLSRGFGRQGKRTFMAERQYTRMEDWLTAKLAYEGLPSKTYLSKTLAQYTSKTCSNCGFTITSADYDRMLEKLKKTATGWMTTINGKELKVEGQITYYNRYKRQNVVKDLSVELDRLSEESVNNDISSWTKGRSGEALSLLKKRFSHRPVQEKFVCLNCGFETHADEQAALNIARSWLFLRSQEYKKYQTNKTTGNTDKRAFVETWQSFYRKKLKEVWKPAV

SEQ ID NO: 47338 - protein, 978 aa, synthetic construct
  REGION 1..978: note = engineered CasX variant
QEIKRINKIRRRLVKDSNTKKAGKTGPMKTLLVRVMTPDLRERLENLRKKPENIPQPISNTSRANLNKLLTDYTEMKKAILHVYWEEFQKDPVGLMSRVAQPASKKIDQNKLKPEMDEKGNLTTAGFACSQCGQPLFVYKLEQVSEKGKAYTNYFGRCNVAEHEKLILLAQLKPEKDSDEAVTYSLGKFGQRALDFYSIHVTKESTHPVKPLAQIAGNRYASSPVGKALSDACMGTIASFLSKYQDIIIEHQKVVKGNQKRLESLRELAGKENLEYPSVTLPPQPHTKEGVDAYNEVIARVRMWVNLNLWQKLKLSRDDAKPLLRLKGFPSFPLVERQANEVDWWDMVCNVKKLINEKKEDGKVFWQNLAGYKRQEALRPYLSSEEDRKKGKKFARYQLGDLLLHLEKKHGEDWGKVYDEAWERIDKKVEGLSKHIKLEEERRSEDAQSKAALTDWLRAKASFVIEGKKEADKDEFCRCELKLQKWYGDLRGKPFAIEAENSILDISGFSKQYNCAFIWQKDGVKKLNLYLIINYFKGGKLRFKKIKPEAFEANRFYTVINKKSGEIVPMEVNFNFDDPNLIILPLAFGKRQGREFIWNDLLSLETGSLKLANGRVIEKTLYNRRTRQDEPALFVALTFERREVLDSSNIKPMNLIGVDRGENIPAVIALTDPEGCPLSRFKDSLGNPTHILRIGESYKEKQRTIQAKKEVEQRRAGGYSRKYASKAKNLADDMVRNTARDLLYYAVTQDAMLIFENLSRGFGRQGKRTFMAERQYTRMEDWLTAKLAYEGLPSKTYLSKTLAQYTSKTCSNCGFTITSADYDRMLEKLKKTATGWMTTINGKELKVEGQITYYNRYKRQNVVKDLSVELDRLSEESVNNDISSWTKGRSGEALSLLKKRFSHRPVQEKFVCLNCGFETHADEQAALNIARSWLFLRSQEYKKYQTNKTTGNTDKRAFVETWQSFYRKKLKEVWKPAV

SEQ ID NO: 47339 - protein, 978 aa, synthetic construct
  REGION 1..978: note = engineered CasX variant
QEIKRINKIRRRLVKDSNTKKAGKTGPMKTLLVRVMTPDLRERLENLRKKPENIPQPISNTSRANLNKLLTDYTEMKKAILHVYWEEFQKDPVGLMSRVAQPASKKIDQNKLKPEMDEKGNLTTAGFACSQCGQPLFVYKLEQVSEKGKAYTNYFGRCNVAEHEKLILLAQLKPEKDSDEAVTYSLGKFGQRALDFYSIHVTKESTHPVKPLAQIAGNRYASTPVGKALSDACMGTIASFLSKYQDIIIEHQKVVKGNQKRLESLRELAGKENLEYPSVTLPPQPHTKEGVDAYNEVIARVRMWVNLNLWQKLKLSRDDAKPLLRLKGFPSFPLVERQANEVDWWDMVCNVKKLINEKKEDGKVFWQNLAGYKRQEALRPYLSSEEDRKKGKKFARYQLGDLLLHLEKKHGEDWGKVYDEAWERIDKKVEGLSKHIKLEEERRSEDAQSKAALTDWLRAKASFVIEGKKEADKDEFCRCELKLQKWYGDLRGKPFAIEAENSILDISGFSKQYNCAFIWQKDGVKKLNLYLIINYFKGGKLRFKKIKPEAFEANRFYTVINKKSGEIVPMEVNFNFDDPNLIILPLAFGKRQGREFIWNDLLSLETGSLKLANGRVIEKTLYNRRTRQDEPALFVALTFERREVLDSSNIKPMNLIGVDRGENIPAVIALTDPEGCPLSRFKDSLGNPTHILRIGESYKEKQRTIQAKKEVEQRRAGGYSRKYASKAKNLADDMVRNTARDLLYYAVTQDAMLIFENLSRGFGRQGKRTFMAERQYTRMEDWLTAKLAYEGLPSKTYLSKTLAQYTSKTCSNCGFTITSADYDRMLEKLKKTATGWMTTINGKELKVEGQITYYNRYKRQNVVKDLSVELDRLSEESVNNDISSWTKGRSGEALSLLKKRFSHRPVQEKFVCLNCGFETHADEQAALNIARSWLFLRSQEYKKYQTNKTTGNTDKRAFVETWQSFYRKKLKEVWKPAV

SEQ ID NO: 47340 - protein, 978 aa, synthetic construct
  REGION 1..978: note = engineered CasX variant
QEIKRINKIRRRLVKDSNTKKAGKTGPMKTLLVRVMTPDLRERLENLRKKPENIPQPISNTSRANLNKLLTDYTEMKKAILHVYWEEFQKDPVGLMSRVAQPASKKIDQNKLKPEMDEKGNLTTAGFACSQCGQPLFVYKLEQVSEKGKAYTNYFGRCNVAEHEKLILLAQLKPEKDSDEAVTYSLGKFGQRALDFYSIHVTKESTHPVKPLAQIAGNRYASAPVGKALSDACMGTIASFLSKYQDIIIEHQKVVKGNQKRLESLRELAGKENLEYPSVTLPPQPHTKEGVDAYNEVIARVRMWVNLNLWQKLKLSRDDAKPLLRLKGFPSFPLVERQANEVDWWDMVCNVKKLINEKKEDGKVFWQNLAGYKRQEALRPYLSSEEDRKKGKKFARYQLGDLLLHLEKKHGEDWGKVYDEAWERIDKKVEGLSKHIKLEEERRSEDAQSKAALTDWLRAKASFVIEGKKEADKDEFCRCELKLQKWYGDLRGKPFAIEAENSILDISGFSKQYNCAFIWQKDGVKKLNLYLIINYFKGGKLRFKKIKPEAFEANRFYTVINKKSGEIVPMEVNFNFDDPNLIILPLAFGKRQGREFIWNDLLSLETGSLKLANGRVIEKTLYNRRTRQDEPALFVALTFERREVLDSSNIKPMNLIGVDRGENIPAVIALTDPEGCPLSRFKDSLGNPTHILRIGESYKEKQRTIQAKKEVEQRRAGGYSRKYASKAKNLADDMVRNTARDLLYYAVTQDAMLIFENLSRGFGRQGKRTFMAERQYTRMEDWLTAKLAYEGLPSKTYLSKTLAQYTSKTCSNCGFTITSADYDRMLEKLKKTATGWMTTINGKELKVEGQITYYNRYKRQNVVKDLSVELDRLSEESVNNDISSWTKGRSGEALSLLKKRFSHRPVQEKFVCLNCGFETHADEQAALNIARSWLFLRSQEYKKYQTNKTTGNTDKRAFVETWQSFYRKKLKEVWKPAV

SEQ ID NO: 47341 - protein, 978 aa, synthetic construct
  REGION 1..978: note = engineered CasX variant
QEIKRINKIRRRLVKDSNTKKAGKTGPMKTLLVRVMTPDLRERLENLRKKPENIPQPISNTSRANLNKLLTDYTEMKKAILHVYWEEFQKDPVGLMSRVAQPASKKIDQNKLKPEMDEKGNLTTAGFACSQCGQPLFVYKLEQVSEKGKAYTNYFGRCNVAEHEKLILLAQLKPEKDSDEAVTYSLGKFGQRALDFYSIHVTKESTHPVKPLAQIAGNRYASVPVGKALSDACMGTIASFLSKYQDIIIEHQKVVKGNQKRLESLRELAGKENLEYPSVTLPPQPHTKEGVDAYNEVIARVRMWVNLNLWQKLKLSRDDAKPLLRLKGFPSFPLVERQANEVDWWDMVCNVKKLINEKKEDGKVFWQNLAGYKRQEALRPYLSSEEDRKKGKKFARYQLGDLLLHLEKKHGEDWGKVYDEAWERIDKKVEGLSKHIKLEEERRSEDAQSKAALTDWLRAKASFVIEGKKEADKDEFCRCELKLQKWYGDLRGKPFAIEAENSILDISGFSKQYNCAFIWQKDGVKKLNLYLIINYFKGGKLRFKKIKPEAFEANRFYTVINKKSGEIVPMEVNFNFDDPNLIILPLAFGKRQGREFIWNDLLSLETGSLKLANGRVIEKTLYNRRTRQDEPALFVALTFERREVLDSSNIKPMNLIGVDRGENIPAVIALTDPEGCPLSRFKDSLGNPTHILRIGESYKEKQRTIQAKKEVEQRRAGGYSRKYASKAKNLADDMVRNTARDLLYYAVTQDAMLIFENLSRGFGRQGKRTFMAERQYTRMEDWLTAKLAYEGLPSKTYLSKTLAQYTSKTCSNCGFTITSADYDRMLEKLKKTATGWMTTINGKELKVEGQITYYNRYKRQNVVKDLSVELDRLSEESVNNDISSWTKGRSGEALSLLKKRFSHRPVQEKFVCLNCGFETHADEQAALNIARSWLFLRSQEYKKYQTNKTTGNTDKRAFVETWQSFYRKKLKEVWKPAV

SEQ ID NO: 47342 - protein, 978 aa, synthetic construct
  REGION 1..978: note = engineered CasX variant
QEIKRINKIRRRLVKDSNTKKAGKTGPMKTLLVRVMTPDLRERLENLRKKPENIPQPISNTSRANLNKLLTDYTEMKKAILHVYWEEFQKDPVGLMSRVAQPASKKIDQNKLKPEMDEKGNLTTAGFACSQCGQPLFVYKLEQVSEKGKAYTNYFGRCNVAEHEKLIKLAQLKPEKDSDEAVTYSLGKFGQRALDFYSIHVTKESTHPVKPLAQIAGNRYASGPVGKALSDACMGTIASFLSKYQDIIIEHQKVVKGNQKRLESLRELAGKENLEYPSVTLPPQPHTKEGVDAYNEVIARVRMWVNLNLWQKLKLSRDDAKPLLRLKGFPSFPLVERQANEVDWWDMVCNVKKLINEKKEDGKVFWQNLAGYKRQEALRPYLSSEEDRKKGKKFARYQLGDLLLHLEKKHGEDWGKVYDEAWERIDKKVEGLSKHIKLEEERRSEDAQSKAALTDWLRAKASFVIEGKKEADKDEFCRCELKLQKWYGDLRGKPFAIEAENSILDISGFSKQYNCAFIWQKDGVKKLNLYLIINYFKGGKLRFKKIKPEAFEANRFYTVINKKSGEIVPMEVNFNFDDPNLIILPLAFGKRQGREFIWNDLLSLETGSLKLANGRVIEKTLYNRRTRQDEPALFVALTFERREVLDSSNIKPMNLIGVDRGENIPAVIALTDPEGCPLSRFKDSLGNPTHILRIGESYKEKQRTIQAKKEVEQRRAGGYSRKYASKAKNLADDMVRNTARDLLYYAVTQDAMLIFENLSRGFGRQGKRTFMAERQYTRMEDWLTAKLAYEGLPSKTYLSKTLAQYTSKTCSNCGFTITSADYDRMLEKLKKTATGWMTTINGKELKVEGQITYYNRYKRQNVVKDLSVELDRLSEESVNNDISSWTKGRSGEALSLLKKRFSHRPVQEKFVCLNCGFETHADEQAALNIARSWLFLRSQEYKKYQTNKTTGNTDKRAFVETWQSFYRKKLKEVWKPAV

SEQ ID NO: 47343 - protein, 977 aa, synthetic construct
  REGION 1..977: note = engineered CasX variant
QEIKRINKIRRRLVKDSNTKKAGKTGPMKTLLVRVMTPDLRERLENLRKKPENIPQPISNTSRANLNKLLTDYTEMKKAILHVYWEEFQKDPVGLMSRVAQPASKKIDQNKLKPEMDEKGNLTTAGFACSQCGQPLFVYKLEQVSEKGKAYTNYFGRCNVAEHEKLILLAQLKPEKDSDEAVTYSLGKFGQRALDFYSIHVTKESTHPVKPLAQIAGNRYASPVGKALSDACMGTIASFLSKYQDIIIEHQKVVKGNQKRLESLRELAGKENLEYPSVTLPPQPHTKEGVDAYNEVIARVRMWVNLNLWQKLKLSRDDAKPLLRLKGFPSFPLVERQANEVDWWDMVCNVKKLINEKKEDGKVFWQNLAGYKRQEALRPYLSSEEDRKKGKKFARYQLGDLLLHLEKKHGEDWGKVYDEAWERIDKKVEGLSKHIKLEEERRSEDAQSKAALTDWLRAKASFVIEGKKEADKDEFCRCELKLQKWYGDLRGKPFAIEAENSILDISGFSKQYNCAFIWQKDGVKKLNLYLIINYFKGGKLRFKKIKPEAFEANRFYTVINKKSGEIVPMEVNFNFDDPNLIILPLAFGKRQGREFIWNDLLSLETGSLKLANGRVIEKTLYNRRTRQDEPALFVALTFERREVLDSSNIKPMNLIGVDRGENIPAVIALTDPEGCPLSRFKDSLGNPTHILRIGESYKEKQRTIQAKKEVEQRRAGGYSRKYASKAKNLADDMVRNTARDLLYYAVTQDAMLIFENLSRGFGRQGKRTFMAERQYTRMEDWLTAKLAYEGLPSKTYLSKTLAQYTSKTCSNCGFTITSADYDRMLEKLKKTATGWMTTINGKELKVEGQITYYNRYKRQNVVKDLSVELDRLSEESVNNDISSWTKGRSGEALSLLKKRFSHRPVQEKFVCLNCGFETHADEQAALNIARSWLFLRSQEYKKYQTNKTTGNTDKRAFVETWQSFYRKKLKEVWKPAV

SEQ ID NO: 47344 - protein, 978 aa, synthetic construct
  REGION 1..978: note = engineered CasX variant
QEIKRINKIRRRLVKDSNTKKAGKTGPMKTLLVRVMTPDLRERLENLRKKPENIPQPISNTSRANLNKLLTDYTEMKKAILHVYWEEFQKDPVGLMSRVAQPASKKIDQNKLKPEMDEKGNLTTAGFACSQCGQPLFVYKLEQVSEKGKAYTNYFGRCNVAEHEKLILLAQLKPEKDSDEAVTYSLGKFGQRALDFYSIHVTKESTHPVKPLAQIAGNRYASYPVGKALSDACMGTIASFLSKYQDIIIEHQKVVKGNQKRLESLRELAGKENLEYPSVTLPPQPHTKEGVDAYNEVIARVRMWVNLNLWQKLKLSRDDAKPLLRLKGFPSFPLVERQANEVDWWDMVCNVKKLINEKKEDGKVFWQNLAGYKRQEALRPYLSSEEDRKKGKKFARYQLGDLLLHLEKKHGEDWGKVYDEAWERIDKKVEGLSKHIKLEEERRSEDAQSKAALTDWLRAKASFVIEGSKEADKDEFCRCELKLQKWYGDLRGKPFAIEAENSILDISGFSKQYNCAFIWQKDGVKKLNLYLIINYFKGGKLRFKKIKPEAFEANRFYTVINKKSGEIVPMEVNFNFDDPNLIILPLAFGKRQGREFIWNDLLSLETGSLKLANGRVIEKTLYNRRTRQDEPALFVALTFERREVLDSSNIKPMNLIGVDRGENIPAVIALTDPEGCPLSRFKDSLGNPTHILRIGESYKEKQRTIQAKKEVEQRRAGGYSRKYASKAKNLADDMVRNTARDLLYYAVTQDAMLIFENLSRGFGRQGKRTFMAERQYTRMEDWLTAKLAYEGLPSKTYLSKTLAQYTSKTCSNCGFTITSADYDRMLEKLKKTATGWMTTINGKELKVEGQITYYNRYKRQNVVKDLSVELDRLSEESVNNDISSWTKGRSGEALSLLKKRFSHRPVQEKFVCLNCGFETHADEQAALNIARSWLFLRSQEYKKYQTNKTTGNTDKRAFVETWQSFYRKKLKEVWKPAV

SEQ ID NO: 47345 - protein, 978 aa, synthetic construct
  REGION 1..978: note = engineered CasX variant
QEIKRINKIRRRLVKDSNTKKAGKTGPMKTLLVRVMTPDLRERLENLRKKPENIPQPISNTSRANLNKLLTDYTEMKKAILHVYWEEFQKDPVGLMSRVAQPASKKIDQNKLKPEMDEKGNLTTAGFACSQCGQPLFVYKLEQVSEKGKAYTNYFGRCNVAEHEKLILLAQLKPEKDSDEAVTYSLGKFGQRALDFYSIHVTKESTHPVKPLAQIAGNRYASHPVGKALSDACMGTIASFLSKYQDIIIEHQKVVKGNQKRLESLRELAGKENLEYPSVTLPPQPHTKEGVDAYNEVIARVRMWVNLNLWQKLKLSRDDAKPLLRLKGFPSFPLVERQANEVDWWDMVCNVKKLINEKKEDGKVFWQNLAGYKRQEALRPYLSSEEDRKKGKKFARYQLGDLLLHLEKKHGEDWGKVYDEAWERIDKKVEGLSKHIKLEEERRSEDAQSKAALTDWLRAKASFVIEGSKEADKDEFCRCELKLQKWYGDLRGKPFAIEAENSILDISGFSKQYNCAFIWQKDGVKKLNLYLIINYFKGGKLRFKKIKPEAFEANRFYTVINKKSGEIVPMEVNFNFDDPNLIILPLAFGKRQGREFIWNDLLSLETGSLKLANGRVIEKTLYNRRTRQDEPALFVALTFERREVLDSSNIKPMNLIGVDRGENIPAVIALTDPEGCPLSRFKDSLGNPTHILRIGESYKEKQRTIQAKKEVEQRRAGGYSRKYASKAKNLADDMVRNTARDLLYYAVTQDAMLIFENLSRGFGRQGKRTFMAERQYTRMEDWLTAKLAYEGLPSKTYLSKTLAQYTSKTCSNCGFTITSADYDRMLEKLKKTATGWMTTINGKELKVEGQITYYNRYKRQNVVKDLSVELDRLSEESVNNDISSWTKGRSGEALSLLKKRFSHRPVQEKFVCLNCGFETHADEQAALNIARSWLFLRSQEYKKYQTNKTTGNTDKRAFVETWQSFYRKKLKEVWKPAV

SEQ ID NO: 47346 - protein, 978 aa, synthetic construct
  REGION 1..978: note = engineered CasX variant
QEIKRINKIRRRLVKDSNTKKAGKTGPMKTLLVRVMTPDLRERLENLRKKPENIPQPISNTSRANLNKLLTDYTEMKKAILHVYWEEFQKDPVGLMSRVAQPASKKIDQNKLKPEMDEKGNLTTAGFACSQCGQPLFVYKLEQVSEKGKAYTNYFGRCNVAEHEKLILLAQLKPEKDSDEAVTYSLGKFGQRALDFYSIHVTKESTHPVKPLAQIAGNRYASSPVGKALSDACMGTIASFLSKYQDIIIEHQKVVKGNQKRLESLRELAGKENLEYPSVTLPPQPHTKEGVDAYNEVIARVRMWVNLNLWQKLKLSRDDAKPLLRLKGFPSFPLVERQANEVDWWDMVCNVKKLINEKKEDGKVFWQNLAGYKRQEALRPYLSSEEDRKKGKKFARYQLGDLLLHLEKKHGEDWGKVYDEAWERIDKKVEGLSKHIKLEEERRSEDAQSKAALTDWLRAKASFVIEGSKEADKDEFCRCELKLQKWYGDLRGKPFAIEAENSILDISGFSKQYNCAFIWQKDGVKKLNLYLIINYFKGGKLRFKKIKPEAFEANRFYTVINKKSGEIVPMEVNFNFDDPNLIILPLAFGKRQGREFIWNDLLSLETGSLKLANGRVIEKTLYNRRTRQDEPALFVALTFERREVLDSSNIKPMNLIGVDRGENIPAVIALTDPEGCPLSRFKDSLGNPTHILRIGESYKEKQRTIQAKKEVEQRRAGGYSRKYASKAKNLADDMVRNTARDLLYYAVTQDAMLIFENLSRGFGRQGKRTFMAERQYTRMEDWLTAKLAYEGLPSKTYLSKTLAQYTSKTCSNCGFTITSADYDRMLEKLKKTATGWMTTINGKELKVEGQITYYNRYKRQNVVKDLSVELDRLSEESVNNDISSWTKGRSGEALSLLKKRFSHRPVQEKFVCLNCGFETHADEQAALNIARSWLFLRSQEYKKYQTNKTTGNTDKRAFVETWQSFYRKKLKEVWKPAV

SEQ ID NO: 47347 - protein, 978 aa, synthetic construct
  REGION 1..978: note = engineered CasX variant
QEIKRINKIRRRLVKDSNTKKAGKTGPMKTLLVRVMTPDLRERLENLRKKPENIPQPISNTSRANLNKLLTDYTEMKKAILHVYWEEFQKDPVGLMSRVAQPASKKIDQNKLKPEMDEKGNLTTAGFACSQCGQPLFVYKLEQVSEKGKAYTNYFGRCNVAEHEKLILLAQLKPEKDSDEAVTYSLGKFGQRALDFYSIHVTKESTHPVKPLAQIAGNRYASTPVGKALSDACMGTIASFLSKYQDIIIEHQKVVKGNQKRLESLRELAGKENLEYPSVTLPPQPHTKEGVDAYNEVIARVRMWVNLNLWQKLKLSRDDAKPLLRLKGFPSFPLVERQANEVDWWDMVCNVKKLINEKKEDGKVFWQNLAGYKRQEALRPYLSSEEDRKKGKKFARYQLGDLLLHLEKKHGEDWGKVYDEAWERIDKKVEGLSKHIKLEEERRSEDAQSKAALTDWLRAKASFVIEGSKEADKDEFCRCELKLQKWYGDLRGKPFAIEAENSILDISGFSKQYNCAFIWQKDGVKKLNLYLIINYFKGGKLRFKKIKPEAFEANRFYTVINKKSGEIVPMEVNFNFDDPNLIILPLAFGKRQGREFIWNDLLSLETGSLKLANGRVIEKTLYNRRTRQDEPALFVALTFERREVLDSSNIKPMNLIGVDRGENIPAVIALTDPEGCPLSRFKDSLGNPTHILRIGESYKEKQRTIQAKKEVEQRRAGGYSRKYASKAKNLADDMVRNTARDLLYYAVTQDAMLIFENLSRGFGRQGKRTFMAERQYTRMEDWLTAKLAYEGLPSKTYLSKTLAQYTSKTCSNCGFTITSADYDRMLEKLKKTATGWMTTINGKELKVEGQITYYNRYKRQNVVKDLSVELDRLSEESVNNDISSWTKGRSGEALSLLKKRFSHRPVQEKFVCLNCGFETHADEQAALNIARSWLFLRSQEYKKYQTNKTTGNTDKRAFVETWQSFYRKKLKEVWKPAV

SEQ ID NO: 47348 - protein, 978 aa, synthetic construct
  REGION 1..978: note = engineered CasX variant
QEIKRINKIRRRLVKDSNTKKAGKTGPMKTLLVRVMTPDLRERLENLRKKPENIPQPISNTSRANLNKLLTDYTEMKKAILHVYWEEFQKDPVGLMSRVAQPASKKIDQNKLKPEMDEKGNLTTAGFACSQCGQPLFVYKLEQVSEKGKAYTNYFGRCNVAEHEKLILLAQLKPEKDSDEAVTYSLGKFGQRALDFYSIHVTKESTHPVKPLAQIAGNRYASAPVGKALSDACMGTIASFLSKYQDIIIEHQKVVKGNQKRLESLRELAGKENLEYPSVTLPPQPHTKEGVDAYNEVIARVRMWVNLNLWQKLKLSRDDAKPLLRLKGFPSFPLVERQANEVDWWDMVCNVKKLINEKKEDGKVFWQNLAGYKRQEALRPYLSSEEDRKKGKKFARYQLGDLLLHLEKKHGEDWGKVYDEAWERIDKKVEGLSKHIKLEEERRSEDAQSKAALTDWLRAKASFVIEGSKEADKDEFCRCELKLQKWYGDLRGKPFAIEAENSILDISGFSKQYNCAFIWQKDGVKKLNLYLIINYFKGGKLRFKKIKPEAFEANRFYTVINKKSGEIVPMEVNFNFDDPNLIILPLAFGKRQGREFIWNDLLSLETGSLKLANGRVIEKTLYNRRTRQDEPALFVALTFERREVLDSSNIKPMNLIGVDRGENIPAVIALTDPEGCPLSRFKDSLGNPTHILRIGESYKEKQRTIQAKKEVEQRRAGGYSRKYASKAKNLADDMVRNTARDLLYYAVTQDAMLIFENLSRGFGRQGKRTFMAERQYTRMEDWLTAKLAYEGLPSKTYLSKTLAQYTSKTCSNCGFTITSADYDRMLEKLKKTATGWMTTINGKELKVEGQITYYNRYKRQNVVKDLSVELDRLSEESVNNDISSWTKGRSGEALSLLKKRFSHRPVQEKFVCLNCGFETHADEQAALNIARSWLFLRSQEYKKYQTNKTTGNTDKRAFVETWQSFYRKKLKEVWKPAV

SEQ ID NO: 47349 - protein, 978 aa, synthetic construct
  REGION 1..978: note = engineered CasX variant
QEIKRINKIRRRLVKDSNTKKAGKTGPMKTLLVRVMTPDLRERLENLRKKPENIPQPISNTSRANLNKLLTDYTEMKKAILHVYWEEFQKDPVGLMSRVAQPASKKIDQNKLKPEMDEKGNLTTAGFACSQCGQPLFVYKLEQVSEKGKAYTNYFGRCNVAEHEKLILLAQLKPEKDSDEAVTYSLGKFGQRALDFYSIHVTKESTHPVKPLAQIAGNRYASVPVGKALSDACMGTIASFLSKYQDIIIEHQKVVKGNQKRLESLRELAGKENLEYPSVTLPPQPHTKEGVDAYNEVIARVRMWVNLNLWQKLKLSRDDAKPLLRLKGFPSFPLVERQANEVDWWDMVCNVKKLINEKKEDGKVFWQNLAGYKRQEALRPYLSSEEDRKKGKKFARYQLGDLLLHLEKKHGEDWGKVYDEAWERIDKKVEGLSKHIKLEEERRSEDAQSKAALTDWLRAKASFVIEGSKEADKDEFCRCELKLQKWYGDLRGKPFAIEAENSILDISGFSKQYNCAFIWQKDGVKKLNLYLIINYFKGGKLRFKKIKPEAFEANRFYTVINKKSGEIVPMEVNFNFDDPNLIILPLAFGKRQGREFIWNDLLSLETGSLKLANGRVIEKTLYNRRTRQDEPALFVALTFERREVLDSSNIKPMNLIGVDRGENIPAVIALTDPEGCPLSRFKDSLGNPTHILRIGESYKEKQRTIQAKKEVEQRRAGGYSRKYASKAKNLADDMVRNTARDLLYYAVTQDAMLIFENLSRGFGRQGKRTFMAERQYTRMEDWLTAKLAYEGLPSKTYLSKTLAQYTSKTCSNCGFTITSADYDRMLEKLKKTATGWMTTINGKELKVEGQITYYNRYKRQNVVKDLSVELDRLSEESVNNDISSWTKGRSGEALSLLKKRFSHRPVQEKFVCLNCGFETHADEQAALNIARSWLFLRSQEYKKYQTNKTTGNTDKRAFVETWQSFYRKKLKEVWKPAV

SEQ ID NO: 47350 - protein, 978 aa, synthetic construct
  REGION 1..978: note = engineered CasX variant
QEIKRINKIRRRLVKDSNTKKAGKTGPMKTLLVRVMTPDLRERLENLRKKPENIPQPISNTSRANLNKLLTDYTEMKKAILHVYWEEFQKDPVGLMSRVAQPASKKIDQNKLKPEMDEKGNLTTAGFACSQCGQPLFVYKLEQVSEKGKAYTNYFGRCNVAEHEKLIKLAQLKPEKDSDEAVTYSLGKFGQRALDFYSIHVTKESTHPVKPLAQIAGNRYASGPVGKALSDACMGTIASFLSKYQDIIIEHQKVVKGNQKRLESLRELAGKENLEYPSVTLPPQPHTKEGVDAYNEVIARVRMWVNLNLWQKLKLSRDDAKPLLRLKGFPSFPLVERQANEVDWWDMVCNVKKLINEKKEDGKVFWQNLAGYKRQEALRPYLSSEEDRKKGKKFARYQLGDLLLHLEKKHGEDWGKVYDEAWERIDKKVEGLSKHIKLEEERRSEDAQSKAALTDWLRAKASFVIEGSKEADKDEFCRCELKLQKWYGDLRGKPFAIEAENSILDISGFSKQYNCAFIWQKDGVKKLNLYLIINYFKGGKLRFKKIKPEAFEANRFYTVINKKSGEIVPMEVNFNFDDPNLIILPLAFGKRQGREFIWNDLLSLETGSLKLANGRVIEKTLYNRRTRQDEPALFVALTFERREVLDSSNIKPMNLIGVDRGENIPAVIALTDPEGCPLSRFKDSLGNPTHILRIGESYKEKQRTIQAKKEVEQRRAGGYSRKYASKAKNLADDMVRNTARDLLYYAVTQDAMLIFENLSRGFGRQGKRTFMAERQYTRMEDWLTAKLAYEGLPSKTYLSKTLAQYTSKTCSNCGFTITSADYDRMLEKLKKTATGWMTTINGKELKVEGQITYYNRYKRQNVVKDLSVELDRLSEESVNNDISSWTKGRSGEALSLLKKRFSHRPVQEKFVCLNCGFETHADEQAALNIARSWLFLRSQEYKKYQTNKTTGNTDKRAFVETWQSFYRKKLKEVWKPAV

SEQ ID NO: 47351 - protein, 977 aa, synthetic construct
  REGION 1..977: note = engineered CasX variant
QEIKRINKIRRRLVKDSNTKKAGKTGPMKTLLVRVMTPDLRERLENLRKKPENIPQPISNTSRANLNKLLTDYTEMKKAILHVYWEEFQKDPVGLMSRVAQPASKKIDQNKLKPEMDEKGNLTTAGFACSQCGQPLFVYKLEQVSEKGKAYTNYFGRCNVAEHEKLILLAQLKPEKDSDEAVTYSLGKFGQRALDFYSIHVTKESTHPVKPLAQIAGNRYASPVGKALSDACMGTIASFLSKYQDIIIEHQKVVKGNQKRLESLRELAGKENLEYPSVTLPPQPHTKEGVDAYNEVIARVRMWVNLNLWQKLKLSRDDAKPLLRLKGFPSFPLVERQANEVDWWDMVCNVKKLINEKKEDGKVFWQNLAGYKRQEALRPYLSSEEDRKKGKKFARYQLGDLLLHLEKKHGEDWGKVYDEAWERIDKKVEGLSKHIKLEEERRSEDAQSKAALTDWLRAKASFVIEGSKEADKDEFCRCELKLQKWYGDLRGKPFAIEAENSILDISGFSKQYNCAFIWQKDGVKKLNLYLIINYFKGGKLRFKKIKPEAFEANRFYTVINKKSGEIVPMEVNFNFDDPNLIILPLAFGKRQGREFIWNDLLSLETGSLKLANGRVIEKTLYNRRTRQDEPALFVALTFERREVLDSSNIKPMNLIGVDRGENIPAVIALTDPEGCPLSRFKDSLGNPTHILRIGESYKEKQRTIQAKKEVEQRRAGGYSRKYASKAKNLADDMVRNTARDLLYYAVTQDAMLIFENLSRGFGRQGKRTFMAERQYTRMEDWLTAKLAYEGLPSKTYLSKTLAQYTSKTCSNCGFTITSADYDRMLEKLKKTATGWMTTINGKELKVEGQITYYNRYKRQNVVKDLSVELDRLSEESVNNDISSWTKGRSGEALSLLKKRFSHRPVQEKFVCLNCGFETHADEQAALNIARSWLFLRSQEYKKYQTNKTTGNTDKRAFVETWQSFYRKKLKEVWKPAV

SEQ ID NO: 47352 - protein, 979 aa, synthetic construct
  REGION 1..979: note = engineered CasX variant
QEIKRINKIRRRLVKDSNTKKAGKTGPMKTLLVRVMTPDLRERLENLRKKPENIPQPISNTSRANLNKLLTDYTEMKKAILHVYWEEFQKDPVGLMSRVAQPASKKIDQNKLKPEMDEKGNLTTAGFACSQCGQPLFVYKLEQVSEKGKAYTNYFGRCNVAEHEKLILLAQLKPEKDSDEAVTYSLGKFGQRALDFYSIHVTKESTHPVKPLAQIAGNRYASYPVGKALSDACMGTIASFLSKYQDIIIEHQKVVKGNQKRLESLRELAGKENLEYPSVTLPPQPHTKEGVDAYNEVIARVRMWVNLNLWQKLKLSRDDAKPLLRLKGFPSFPLVERQANEVDWWDMVCNVKKLINEKKEDGKVFWQNLAGYKRQEALRPYLSSEEDRKKGKKFARYQLGDLLLHLEKKHGEDWGKVYDEAWERIDKKVEGLSKHIKLEEERRSEDAQSKAALTDWLRAKASFVIEGLKEADDKDEFCRCELKLQKWYGDLRGKPFAIEAENSILDISGFSKQYNCAFIWQKDGVKKLNLYLIINYFKGGKLRFKKIKPEAFEANRFYTVINKKSGEIVPMEVNFNFDDPNLIILPLAFGKRQGREFIWNDLLSLETGSLKLANGRVIEKTLYNRRTRQDEPALFVALTFERREVLDSSNIKPMNLIGVDRGENIPAVIALTDPEGCPLSRFKDSLGNPTHILRIGESYKEKQRTIQAKKEVEQRRAGGYSRKYASKAKNLADDMVRNTARDLLYYAVTQDAMLIFENLSRGFGRQGKRTFMAERQYTRMEDWLTAKLAYEGLPSKTYLSKTLAQYTSKTCSNCGFTITSADYDRMLEKLKKTATGWMTTINGKELKVEGQITYYNRYKRQNVVKDLSVELDRLSEESVNNDISSWTKGRSGEALSLLKKRFSHRPVQEKFVCLNCGFETHADEQAALNIARSWLFLRSQEYKKYQTNKTTGNTDKRAFVETWQSFYRKKLKEVWKPAV

SEQ ID NO: 47353 - protein, 979 aa, synthetic construct
  REGION 1..979: note = engineered CasX variant
QEIKRINKIRRRLVKDSNTKKAGKTGPMKTLLVRVMTPDLRERLENLRKKPENIPQPISNTSRANLNKLLTDYTEMKKAILHVYWEEFQKDPVGLMSRVAQPASKKIDQNKLKPEMDEKGNLTTAGFACSQCGQPLFVYKLEQVSEKGKAYTNYFGRCNVAEHEKLILLAQLKPEKDSDEAVTYSLGKFGQRALDFYSIHVTKESTHPVKPLAQIAGNRYASHPVGKALSDACMGTIASFLSKYQDIIIEHQKVVKGNQKRLESLRELAGKENLEYPSVTLPPQPHTKEGVDAYNEVIARVRMWVNLNLWQKLKLSRDDAKPLLRLKGFPSFPLVERQANEVDWWDMVCNVKKLINEKKEDGKVFWQNLAGYKRQEALRPYLSSEEDRKKGKKFARYQLGDLLLHLEKKHGEDWGKVYDEAWERIDKKVEGLSKHIKLEEERRSEDAQSKAALTDWLRAKASFVIEGLKEADDKDEFCRCELKLQKWYGDLRGKPFAIEAENSILDISGFSKQYNCAFIWQKDGVKKLNLYLIINYFKGGKLRFKKIKPEAFEANRFYTVINKKSGEIVPMEVNFNFDDPNLIILPLAFGKRQGREFIWNDLLSLETGSLKLANGRVIEKTLYNRRTRQDEPALFVALTFERREVLDSSNIKPMNLIGVDRGENIPAVIALTDPEGCPLSRFKDSLGNPTHILRIGESYKEKQRTIQAKKEVEQRRAGGYSRKYASKAKNLADDMVRNTARDLLYYAVTQDAMLIFENLSRGFGRQGKRTFMAERQYTRMEDWLTAKLAYEGLPSKTYLSKTLAQYTSKTCSNCGFTITSADYDRMLEKLKKTATGWMTTINGKELKVEGQITYYNRYKRQNVVKDLSVELDRLSEESVNNDISSWTKGRSGEALSLLKKRFSHRPVQEKFVCLNCGFETHADEQAALNIARSWLFLRSQEYKKYQTNKTTGNTDKRAFVETWQSFYRKKLKEVWKPAV

SEQ ID NO: 47354 - protein, 979 aa, synthetic construct
  REGION 1..979: note = engineered CasX variant
QEIKRINKIRRRLVKDSNTKKAGKTGPMKTLLVRVMTPDLRERLENLRKKPENIPQPISNTSRANLNKLLTDYTEMKKAILHVYWEEFQKDPVGLMSRVAQPASKKIDQNKLKPEMDEKGNLTTAGFACSQCGQPLFVYKLEQVSEKGKAYTNYFGRCNVAEHEKLILLAQLKPEKDSDEAVTYSLGKFGQRALDFYSIHVTKESTHPVKPLAQIAGNRYASSPVGKALSDACMGTIASFLSKYQDIIIEHQKVVKGNQKRLESLRELAGKENLEYPSVTLPPQPHTKEGVDAYNEVIARVRMWVNLNLWQKLKLSRDDAKPLLRLKGFPSFPLVERQANEVDWWDMVCNVKKLINEKKEDGKVFWQNLAGYKRQEALRPYLSSEEDRKKGKKFARYQLGDLLLHLEKKHGEDWGKVYDEAWERIDKKVEGLSKHIKLEEERRSEDAQSKAALTDWLRAKASFVIEGLKEADDKDEFCRCELKLQKWYGDLRGKPFAIEAENSILDISGFSKQYNCAFIWQKDGVKKLNLYLIINYFKGGKLRFKKIKPEAFEANRFYTVINKKSGEIVPMEVNFNFDDPNLIILPLAFGKRQGREFIWNDLLSLETGSLKLANGRVIEKTLYNRRTRQDEPALFVALTFERREVLDSSNIKPMNLIGVDRGENIPAVIALTDPEGCPLSRFKDSLGNPTHILRIGESYKEKQRTIQAKKEVEQRRAGGYSRKYASKAKNLADDMVRNTARDLLYYAVTQDAMLIFENLSRGFGRQGKRTFMAERQYTRMEDWLTAKLAYEGLPSKTYLSKTLAQYTSKTCSNCGFTITSADYDRMLEKLKKTATGWMTTINGKELKVEGQITYYNRYKRQNVVKDLSVELDRLSEESVNNDISSWTKGRSGEALSLLKKRFSHRPVQEKFVCLNCGFETHADEQAALNIARSWLFLRSQEYKKYQTNKTTGNTDKRAFVETWQSFYRKKLKEVWKPAV

SEQ ID NO: 47355 - protein, 979 aa, synthetic construct
  REGION 1..979: note = engineered CasX variant
QEIKRINKIRRRLVKDSNTKKAGKTGPMKTLLVRVMTPDLRERLENLRKKPENIPQPISNTSRANLNKLLTDYTEMKKAILHVYWEEFQKDPVGLMSRVAQPASKKIDQNKLKPEMDEKGNLTTAGFACSQCGQPLFVYKLEQVSEKGKAYTNYFGRCNVAEHEKLILLAQLKPEKDSDEAVTYSLGKFGQRALDFYSIHVTKESTHPVKPLAQIAGNRYASTPVGKALSDACMGTIASFLSKYQDIIIEHQKVVKGNQKRLESLRELAGKENLEYPSVTLPPQPHTKEGVDAYNEVIARVRMWVNLNLWQKLKLSRDDAKPLLRLKGFPSFPLVERQANEVDWWDMVCNVKKLINEKKEDGKVFWQNLAGYKRQEALRPYLSSEEDRKKGKKFARYQLGDLLLHLEKKHGEDWGKVYDEAWERIDKKVEGLSKHIKLEEERRSEDAQSKAALTDWLRAKASFVIEGLKEADDKDEFCRCELKLQKWYGDLRGKPFAIEAENSILDISGFSKQYNCAFIWQKDGVKKLNLYLIINYFKGGKLRFKKIKPEAFEANRFYTVINKKSGEIVPMEVNFNFDDPNLIILPLAFGKRQGREFIWNDLLSLETGSLKLANGRVIEKTLYNRRTRQDEPALFVALTFERREVLDSSNIKPMNLIGVDRGENIPAVIALTDPEGCPLSRFKDSLGNPTHILRIGESYKEKQRTIQAKKEVEQRRAGGYSRKYASKAKNLADDMVRNTARDLLYYAVTQDAMLIFENLSRGFGRQGKRTFMAERQYTRMEDWLTAKLAYEGLPSKTYLSKTLAQYTSKTCSNCGFTITSADYDRMLEKLKKTATGWMTTINGKELKVEGQITYYNRYKRQNVVKDLSVELDRLSEESVNNDISSWTKGRSGEALSLLKKRFSHRPVQEKFVCLNCGFETHADEQAALNIARSWLFLRSQEYKKYQTNKTTGNTDKRAFVETWQSFYRKKLKEVWKPAV

SEQ ID NO: 47356 - protein, 979 aa, synthetic construct
  REGION 1..979: note = engineered CasX variant
QEIKRINKIRRRLVKDSNTKKAGKTGPMKTLLVRVMTPDLRERLENLRKKPENIPQPISNTSRANLNKLLTDYTEMKKAILHVYWEEFQKDPVGLMSRVAQPASKKIDQNKLKPEMDEKGNLTTAGFACSQCGQPLFVYKLEQVSEKGKAYTNYFGRCNVAEHEKLILLAQLKPEKDSDEAVTYSLGKFGQRALDFYSIHVTKESTHPVKPLAQIAGNRYASAPVGKALSDACMGTIASFLSKYQDIIIEHQKVVKGNQKRLESLRELAGKENLEYPSVTLPPQPHTKEGVDAYNEVIARVRMWVNLNLWQKLKLSRDDAKPLLRLKGFPSFPLVERQANEVDWWDMVCNVKKLINEKKEDGKVFWQNLAGYKRQEALRPYLSSEEDRKKGKKFARYQLGDLLLHLEKKHGEDWGKVYDEAWERIDKKVEGLSKHIKLEEERRSEDAQSKAALTDWLRAKASFVIEGLKEADDKDEFCRCELKLQKWYGDLRGKPFAIEAENSILDISGFSKQYNCAFIWQKDGVKKLNLYLIINYFKGGKLRFKKIKPEAFEANRFYTVINKKSGEIVPMEVNFNFDDPNLIILPLAFGKRQGREFIWNDLLSLETGSLKLANGRVIEKTLYNRRTRQDEPALFVALTFERREVLDSSNIKPMNLIGVDRGENIPAVIALTDPEGCPLSRFKDSLGNPTHILRIGESYKEKQRTIQAKKEVEQRRAGGYSRKYASKAKNLADDMVRNTARDLLYYAVTQDAMLIFENLSRGFGRQGKRTFMAERQYTRMEDWLTAKLAYEGLPSKTYLSKTLAQYTSKTCSNCGFTITSADYDRMLEKLKKTATGWMTTINGKELKVEGQITYYNRYKRQNVVKDLSVELDRLSEESVNNDISSWTKGRSGEALSLLKKRFSHRPVQEKFVCLNCGFETHADEQAALNIARSWLFLRSQEYKKYQTNKTTGNTDKRAFVETWQSFYRKKLKEVWKPAV

SEQ ID NO: 47357 - protein, 979 aa, synthetic construct
  REGION 1..979: note = engineered CasX variant
QEIKRINKIRRRLVKDSNTKKAGKTGPMKTLLVRVMTPDLRERLENLRKKPENIPQPISNTSRANLNKLLTDYTEMKKAILHVYWEEFQKDPVGLMSRVAQPASKKIDQNKLKPEMDEKGNLTTAGFACSQCGQPLFVYKLEQVSEKGKAYTNYFGRCNVAEHEKLILLAQLKPEKDSDEAVTYSLGKFGQRALDFYSIHVTKESTHPVKPLAQIAGNRYASVPVGKALSDACMGTIASFLSKYQDIIIEHQKVVKGNQKRLESLRELAGKENLEYPSVTLPPQPHTKEGVDAYNEVIARVRMWVNLNLWQKLKLSRDDAKPLLRLKGFPSFPLVERQANEVDWWDMVCNVKKLINEKKEDGKVFWQNLAGYKRQEALRPYLSSEEDRKKGKKFARYQLGDLLLHLEKKHGEDWGKVYDEAWERIDKKVEGLSKHIKLEEERRSEDAQSKAALTDWLRAKASFVIEGLKEADDKDEFCRCELKLQKWYGDLRGKPFAIEAENSILDISGFSKQYNCAFIWQKDGVKKLNLYLIINYFKGGKLRFKKIKPEAFEANRFYTVINKKSGEIVPMEVNFNFDDPNLIILPLAFGKRQGREFIWNDLLSLETGSLKLANGRVIEKTLYNRRTRQDEPALFVALTFERREVLDSSNIKPMNLIGVDRGENIPAVIALTDPEGCPLSRFKDSLGNPTHILRIGESYKEKQRTIQAKKEVEQRRAGGYSRKYASKAKNLADDMVRNTARDLLYYAVTQDAMLIFENLSRGFGRQGKRTFMAERQYTRMEDWLTAKLAYEGLPSKTYLSKTLAQYTSKTCSNCGFTITSADYDRMLEKLKKTATGWMTTINGKELKVEGQITYYNRYKRQNVVKDLSVELDRLSEESVNNDISSWTKGRSGEALSLLKKRFSHRPVQEKFVCLNCGFETHADEQAALNIARSWLFLRSQEYKKYQTNKTTGNTDKRAFVETWQSFYRKKLKEVWKPAV

SEQ ID NO: 47358 - protein, 979 aa, synthetic construct
  REGION 1..979: note = engineered CasX variant
QEIKRINKIRRRLVKDSNTKKAGKTGPMKTLLVRVMTPDLRERLENLRKKPENIPQPISNTSRANLNKLLTDYTEMKKAILHVYWEEFQKDPVGLMSRVAQPASKKIDQNKLKPEMDEKGNLTTAGFACSQCGQPLFVYKLEQVSEKGKAYTNYFGRCNVAEHEKLIKLAQLKPEKDSDEAVTYSLGKFGQRALDFYSIHVTKESTHPVKPLAQIAGNRYASGPVGKALSDACMGTIASFLSKYQDIIIEHQKVVKGNQKRLESLRELAGKENLEYPSVTLPPQPHTKEGVDAYNEVIARVRMWVNLNLWQKLKLSRDDAKPLLRLKGFPSFPLVERQANEVDWWDMVCNVKKLINEKKEDGKVFWQNLAGYKRQEALRPYLSSEEDRKKGKKFARYQLGDLLLHLEKKHGEDWGKVYDEAWERIDKKVEGLSKHIKLEEERRSEDAQSKAALTDWLRAKASFVIEGLKEADDKDEFCRCELKLQKWYGDLRGKPFAIEAENSILDISGFSKQYNCAFIWQKDGVKKLNLYLIINYFKGGKLRFKKIKPEAFEANRFYTVINKKSGEIVPMEVNFNFDDPNLIILPLAFGKRQGREFIWNDLLSLETGSLKLANGRVIEKTLYNRRTRQDEPALFVALTFERREVLDSSNIKPMNLIGVDRGENIPAVIALTDPEGCPLSRFKDSLGNPTHILRIGESYKEKQRTIQAKKEVEQRRAGGYSRKYASKAKNLADDMVRNTARDLLYYAVTQDAMLIFENLSRGFGRQGKRTFMAERQYTRMEDWLTAKLAYEGLPSKTYLSKTLAQYTSKTCSNCGFTITSADYDRMLEKLKKTATGWMTTINGKELKVEGQITYYNRYKRQNVVKDLSVELDRLSEESVNNDISSWTKGRSGEALSLLKKRFSHRPVQEKFVCLNCGFETHADEQAALNIARSWLFLRSQEYKKYQTNKTTGNTDKRAFVETWQSFYRKKLKEVWKPAV

SEQ ID NO: 47359 - protein, 978 aa, synthetic construct
  REGION 1..978: note = engineered CasX variant
QEIKRINKIRRRLVKDSNTKKAGKTGPMKTLLVRVMTPDLRERLENLRKKPENIPQPISNTSRANLNKLLTDYTEMKKAILHVYWEEFQKDPVGLMSRVAQPASKKIDQNKLKPEMDEKGNLTTAGFACSQCGQPLFVYKLEQVSEKGKAYTNYFGRCNVAEHEKLILLAQLKPEKDSDEAVTYSLGKFGQRALDFYSIHVTKESTHPVKPLAQIAGNRYASPVGKALSDACMGTIASFLSKYQDIIIEHQKVVKGNQKRLESLRELAGKENLEYPSVTLPPQPHTKEGVDAYNEVIARVRMWVNLNLWQKLKLSRDDAKPLLRLKGFPSFPLVERQANEVDWWDMVCNVKKLINEKKEDGKVFWQNLAGYKRQEALRPYLSSEEDRKKGKKFARYQLGDLLLHLEKKHGEDWGKVYDEAWERIDKKVEGLSKHIKLEEERRSEDAQSKAALTDWLRAKASFVIEGLKEADDKDEFCRCELKLQKWYGDLRGKPFAIEAENSILDISGFSKQYNCAFIWQKDGVKKLNLYLIINYFKGGKLRFKKIKPEAFEANRFYTVINKKSGEIVPMEVNFNFDDPNLIILPLAFGKRQGREFIWNDLLSLETGSLKLANGRVIEKTLYNRRTRQDEPALFVALTFERREVLDSSNIKPMNLIGVDRGENIPAVIALTDPEGCPLSRFKDSLGNPTHILRIGESYKEKQRTIQAKKEVEQRRAGGYSRKYASKAKNLADDMVRNTARDLLYYAVTQDAMLIFENLSRGFGRQGKRTFMAERQYTRMEDWLTAKLAYEGLPSKTYLSKTLAQYTSKTCSNCGFTITSADYDRMLEKLKKTATGWMTTINGKELKVEGQITYYNRYKRQNVVKDLSVELDRLSEESVNNDISSWTKGRSGEALSLLKKRFSHRPVQEKFVCLNCGFETHADEQAALNIARSWLFLRSQEYKKYQTNKTTGNTDKRAFVETWQSFYRKKLKEVWKPAV

SEQ ID NO: 47360 - protein, 979 aa, synthetic construct
  REGION 1..979: note = engineered CasX variant
QEIKRINKIRRRLVKDSNTKKAGKTGPMKTLLVRVMTPDLRERLENLRKKPENIPQPISNTSRANLNKLLTDYTEMKKAILHVYWEEFQKDPVGLMSRVAQPASKKIDQNKLKPEMDEKGNLTTAGFACSQCGQPLFVYKLEQVSEKGKAYTNYFGRCNVAEHEKLILLAQLKPEKDSDEAVTYSLGKFGQRALDFYSIHVTKESTHPVKPLAQIAGNRYASYPVGKALSDACMGTIASFLSKYQDIIIEHQKVVKGNQKRLESLRELAGKENLEYPSVTLPPQPHTKEGVDAYNEVIARVRMWVNLNLWQKLKLSRDDAKPLLRLKGFPSFPLVERQANEVDWWDMVCNVKKLINEKKEDGKVFWQNLAGYKRQEALRPYLSSEEDRKKGKKFARYQLGDLLLHLEKKHGEDWGKVYDEAWERIDKKVEGLSKHIKLEEERRSEDAQSKAALTDWLRAKASFVIEGLKEADKDEFCRCELKLQKWYGDLRGKPFAIEAENSILDISGFSKQYNCAFIWQKDGVKKLNLYLIINYFKGGKLRFKKIKPEAFEANRFYTVINKKSGEIVPMEVNFNFDDPNLIILPLAFGKRQGREFIWNDLLSLETGSLKLANGRVIEKTLYNRRTRQDEPALFVALTFERREVLDSSNIKPMNLIGVDRGENIPAVIALTDPEGCPLSRFKDSLGNPTHILRIGESYKEKQRTIQAKKEVEQRRAGGYSRKYASKAKNLADDMVRNTARDLLYYAVTQDAMLIFENLSRGFGRQGKRTFMAERQYTRMEDWLTAKLAYEGLPSKTYLSKTLAQYTSKTCSNCGFTITSADYDRMLEKLKKTATGWMTTINGKELKVEGQITYYNRYKRQNVVKDLSVELDRLSEESVNNDISSWTKGRSGNEALSLLKKRFSHRPVQEKFVCLNCGFETHADEQAALNIARSWLFLRSQEYKKYQTNKTTGNTDKRAFVETWQSFYRKKLKEVWKPAV

SEQ ID NO: 47361 - protein, 979 aa, synthetic construct
  REGION 1..979: note = engineered CasX variant
QEIKRINKIRRRLVKDSNTKKAGKTGPMKTLLVRVMTPDLRERLENLRKKPENIPQPISNTSRANLNKLLTDYTEMKKAILHVYWEEFQKDPVGLMSRVAQPASKKIDQNKLKPEMDEKGNLTTAGFACSQCGQPLFVYKLEQVSEKGKAYTNYFGRCNVAEHEKLILLAQLKPEKDSDEAVTYSLGKFGQRALDFYSIHVTKESTHPVKPLAQIAGNRYASHPVGKALSDACMGTIASFLSKYQDIIIEHQKVVKGNQKRLESLRELAGKENLEYPSVTLPPQPHTKEGVDAYNEVIARVRMWVNLNLWQKLKLSRDDAKPLLRLKGFPSFPLVERQANEVDWWDMVCNVKKLINEKKEDGKVFWQNLAGYKRQEALRPYLSSEEDRKKGKKFARYQLGDLLLHLEKKHGEDWGKVYDEAWERIDKKVEGLSKHIKLEEERRSEDAQSKAALTDWLRAKASFVIEGLKEADKDEFCRCELKLQKWYGDLRGKPFAIEAENSILDISGFSKQYNCAFIWQKDGVKKLNLYLIINYFKGGKLRFKKIKPEAFEANRFYTVINKKSGEIVPMEVNFNFDDPNLIILPLAFGKRQGREFIWNDLLSLETGSLKLANGRVIEKTLYNRRTRQDEPALFVALTFERREVLDSSNIKPMNLIGVDRGENIPAVIALTDPEGCPLSRFKDSLGNPTHILRIGESYKEKQRTIQAKKEVEQRRAGGYSRKYASKAKNLADDMVRNTARDLLYYAVTQDAMLIFENLSRGFGRQGKRTFMAERQYTRMEDWLTAKLAYEGLPSKTYLSKTLAQYTSKTCSNCGFTITSADYDRMLEKLKKTATGWMTTINGKELKVEGQITYYNRYKRQNVVKDLSVELDRLSEESVNNDISSWTKGRSGNEALSLLKKRFSHRPVQEKFVCLNCGFETHADEQAALNIARSWLFLRSQEYKKYQTNKTTGNTDKRAFVETWQSFYRKKLKEVWKPAV

SEQ ID NO: 47362 - protein, 979 aa, synthetic construct
  REGION 1..979: note = engineered CasX variant
QEIKRINKIRRRLVKDSNTKKAGKTGPMKTLLVRVMTPDLRERLENLRKKPENIPQPISNTSRANLNKLLTDYTEMKKAILHVYWEEFQKDPVGLMSRVAQPASKKIDQNKLKPEMDEKGNLTTAGFACSQCGQPLFVYKLEQVSEKGKAYTNYFGRCNVAEHEKLILLAQLKPEKDSDEAVTYSLGKFGQRALDFYSIHVTKESTHPVKPLAQIAGNRYASSPVGKALSDACMGTIASFLSKYQDIIIEHQKVVKGNQKRLESLRELAGKENLEYPSVTLPPQPHTKEGVDAYNEVIARVRMWVNLNLWQKLKLSRDDAKPLLRLKGFPSFPLVERQANEVDWWDMVCNVKKLINEKKEDGKVFWQNLAGYKRQEALRPYLSSEEDRKKGKKFARYQLGDLLLHLEKKHGEDWGKVYDEAWERIDKKVEGLSKHIKLEEERRSEDAQSKAALTDWLRAKASFVIEGLKEADKDEFCRCELKLQKWYGDLRGKPFAIEAENSILDISGFSKQYNCAFIWQKDGVKKLNLYLIINYFKGGKLRFKKIKPEAFEANRFYTVINKKSGEIVPMEVNFNFDDPNLIILPLAFGKRQGREFIWNDLLSLETGSLKLANGRVIEKTLYNRRTRQDEPALFVALTFERREVLDSSNIKPMNLIGVDRGENIPAVIALTDPEGCPLSRFKDSLGNPTHILRIGESYKEKQRTIQAKKEVEQRRAGGYSRKYASKAKNLADDMVRNTARDLLYYAVTQDAMLIFENLSRGFGRQGKRTFMAERQYTRMEDWLTAKLAYEGLPSKTYLSKTLAQYTSKTCSNCGFTITSADYDRMLEKLKKTATGWMTTINGKELKVEGQITYYNRYKRQNVVKDLSVELDRLSEESVNNDISSWTKGRSGNEALSLLKKRFSHRPVQEKFVCLNCGFETHADEQAALNIARSWLFLRSQEYKKYQTNKTTGNTDKRAFVETWQSFYRKKLKEVWKPAV

SEQ ID NO: 47363 - protein, 979 aa, synthetic construct
  REGION 1..979: note = engineered CasX variant
QEIKRINKIRRRLVKDSNTKKAGKTGPMKTLLVRVMTPDLRERLENLRKKPENIPQPISNTSRANLNKLLTDYTEMKKAILHVYWEEFQKDPVGLMSRVAQPASKKIDQNKLKPEMDEKGNLTTAGFACSQCGQPLFVYKLEQVSEKGKAYTNYFGRCNVAEHEKLILLAQLKPEKDSDEAVTYSLGKFGQRALDFYSIHVTKESTHPVKPLAQIAGNRYASTPVGKALSDACMGTIASFLSKYQDIIIEHQKVVKGNQKRLESLRELAGKENLEYPSVTLPPQPHTKEGVDAYNEVIARVRMWVNLNLWQKLKLSRDDAKPLLRLKGFPSFPLVERQANEVDWWDMVCNVKKLINEKKEDGKVFWQNLAGYKRQEALRPYLSSEEDRKKGKKFARYQLGDLLLHLEKKHGEDWGKVYDEAWERIDKKVEGLSKHIKLEEERRSEDAQSKAALTDWLRAKASFVIEGLKEADKDEFCRCELKLQKWYGDLRGKPFAIEAENSILDISGFSKQYNCAFIWQKDGVKKLNLYLIINYFKGGKLRFKKIKPEAFEANRFYTVINKKSGEIVPMEVNFNFDDPNLIILPLAFGKRQGREFIWNDLLSLETGSLKLANGRVIEKTLYNRRTRQDEPALFVALTFERREVLDSSNIKPMNLIGVDRGENIPAVIALTDPEGCPLSRFKDSLGNPTHILRIGESYKEKQRTIQAKKEVEQRRAGGYSRKYASKAKNLADDMVRNTARDLLYYAVTQDAMLIFENLSRGFGRQGKRTFMAERQYTRMEDWLTAKLAYEGLPSKTYLSKTLAQYTSKTCSNCGFTITSADYDRMLEKLKKTATGWMTTINGKELKVEGQITYYNRYKRQNVVKDLSVELDRLSEESVNNDISSWTKGRSGNEALSLLKKRFSHRPVQEKFVCLNCGFETHADEQAALNIARSWLFLRSQEYKKYQTNKTTGNTDKRAFVETWQSFYRKKLKEVWKPAV

SEQ ID NO: 47364 - protein, 979 aa, synthetic construct
  REGION 1..979: note = engineered CasX variant
QEIKRINKIRRRLVKDSNTKKAGKTGPMKTLLVRVMTPDLRERLENLRKKPENIPQPISNTSRANLNKLLTDYTEMKKAILHVYWEEFQKDPVGLMSRVAQPASKKIDQNKLKPEMDEKGNLTTAGFACSQCGQPLFVYKLEQVSEKGKAYTNYFGRCNVAEHEKLILLAQLKPEKDSDEAVTYSLGKFGQRALDFYSIHVTKESTHPVKPLAQIAGNRYASAPVGKALSDACMGTIASFLSKYQDIIIEHQKVVKGNQKRLESLRELAGKENLEYPSVTLPPQPHTKEGVDAYNEVIARVRMWVNLNLWQKLKLSRDDAKPLLRLKGFPSFPLVERQANEVDWWDMVCNVKKLINEKKEDGKVFWQNLAGYKRQEALRPYLSSEEDRKKGKKFARYQLGDLLLHLEKKHGEDWGKVYDEAWERIDKKVEGLSKHIKLEEERRSEDAQSKAALTDWLRAKASFVIEGLKEADKDEFCRCELKLQKWYGDLRGKPFAIEAENSILDISGFSKQYNCAFIWQKDGVKKLNLYLIINYFKGGKLRFKKIKPEAFEANRFYTVINKKSGEIVPMEVNFNFDDPNLIILPLAFGKRQGREFIWNDLLSLETGSLKLANGRVIEKTLYNRRTRQDEPALFVALTFERREVLDSSNIKPMNLIGVDRGENIPAVIALTDPEGCPLSRFKDSLGNPTHILRIGESYKEKQRTIQAKKEVEQRRAGGYSRKYASKAKNLADDMVRNTARDLLYYAVTQDAMLIFENLSRGFGRQGKRTFMAERQYTRMEDWLTAKLAYEGLPSKTYLSKTLAQYTSKTCSNCGFTITSADYDRMLEKLKKTATGWMTTINGKELKVEGQITYYNRYKRQNVVKDLSVELDRLSEESVNNDISSWTKGRSGNEALSLLKKRFSHRPVQEKFVCLNCGFETHADEQAALNIARSWLFLRSQEYKKYQTNKTTGNTDKRAFVETWQSFYRKKLKEVWKPAV

SEQ ID NO: 47365 - protein, 979 aa, synthetic construct
  REGION 1..979: note = engineered CasX variant
QEIKRINKIRRRLVKDSNTKKAGKTGPMKTLLVRVMTPDLRERLENLRKKPENIPQPISNTSRANLNKLLTDYTEMKKAILHVYWEEFQKDPVGLMSRVAQPASKKIDQNKLKPEMDEKGNLTTAGFACSQCGQPLFVYKLEQVSEKGKAYTNYFGRCNVAEHEKLILLAQLKPEKDSDEAVTYSLGKFGQRALDFYSIHVTKESTHPVKPLAQIAGNRYASVPVGKALSDACMGTIASFLSKYQDIIIEHQKVVKGNQKRLESLRELAGKENLEYPSVTLPPQPHTKEGVDAYNEVIARVRMWVNLNLWQKLKLSRDDAKPLLRLKGFPSFPLVERQANEVDWWDMVCNVKKLINEKKEDGKVFWQNLAGYKRQEALRPYLSSEEDRKKGKKFARYQLGDLLLHLEKKHGEDWGKVYDEAWERIDKKVEGLSKHIKLEEERRSEDAQSKAALTDWLRAKASFVIEGLKEADKDEFCRCELKLQKWYGDLRGKPFAIEAENSILDISGFSKQYNCAFIWQKDGVKKLNLYLIINYFKGGKLRFKKIKPEAFEANRFYTVINKKSGEIVPMEVNFNFDDPNLIILPLAFGKRQGREFIWNDLLSLETGSLKLANGRVIEKTLYNRRTRQDEPALFVALTFERREVLDSSNIKPMNLIGVDRGENIPAVIALTDPEGCPLSRFKDSLGNPTHILRIGESYKEKQRTIQAKKEVEQRRAGGYSRKYASKAKNLADDMVRNTARDLLYYAVTQDAMLIFENLSRGFGRQGKRTFMAERQYTRMEDWLTAKLAYEGLPSKTYLSKTLAQYTSKTCSNCGFTITSADYDRMLEKLKKTATGWMTTINGKELKVEGQITYYNRYKRQNVVKDLSVELDRLSEESVNNDISSWTKGRSGNEALSLLKKRFSHRPVQEKFVCLNCGFETHADEQAALNIARSWLFLRSQEYKKYQTNKTTGNTDKRAFVETWQSFYRKKLKEVWKPAV

SEQ ID NO: 47366 - protein, 979 aa, synthetic construct
  REGION 1..979: note = engineered CasX variant
QEIKRINKIRRRLVKDSNTKKAGKTGPMKTLLVRVMTPDLRERLENLRKKPENIPQPISNTSRANLNKLLTDYTEMKKAILHVYWEEFQKDPVGLMSRVAQPASKKIDQNKLKPEMDEKGNLTTAGFACSQCGQPLFVYKLEQVSEKGKAYTNYFGRCNVAEHEKLIKLAQLKPEKDSDEAVTYSLGKFGQRALDFYSIHVTKESTHPVKPLAQIAGNRYASGPVGKALSDACMGTIASFLSKYQDIIIEHQKVVKGNQKRLESLRELAGKENLEYPSVTLPPQPHTKEGVDAYNEVIARVRMWVNLNLWQKLKLSRDDAKPLLRLKGFPSFPLVERQANEVDWWDMVCNVKKLINEKKEDGKVFWQNLAGYKRQEALRPYLSSEEDRKKGKKFARYQLGDLLLHLEKKHGEDWGKVYDEAWERIDKKVEGLSKHIKLEEERRSEDAQSKAALTDWLRAKASFVIEGLKEADKDEFCRCELKLQKWYGDLRGKPFAIEAENSILDISGFSKQYNCAFIWQKDGVKKLNLYLIINYFKGGKLRFKKIKPEAFEANRFYTVINKKSGEIVPMEVNFNFDDPNLIILPLAFGKRQGREFIWNDLLSLETGSLKLANGRVIEKTLYNRRTRQDEPALFVALTFERREVLDSSNIKPMNLIGVDRGENIPAVIALTDPEGCPLSRFKDSLGNPTHILRIGESYKEKQRTIQAKKEVEQRRAGGYSRKYASKAKNLADDMVRNTARDLLYYAVTQDAMLIFENLSRGFGRQGKRTFMAERQYTRMEDWLTAKLAYEGLPSKTYLSKTLAQYTSKTCSNCGFTITSADYDRMLEKLKKTATGWMTTINGKELKVEGQITYYNRYKRQNVVKDLSVELDRLSEESVNNDISSWTKGRSGNEALSLLKKRFSHRPVQEKFVCLNCGFETHADEQAALNIARSWLFLRSQEYKKYQTNKTTGNTDKRAFVETWQSFYRKKLKEVWKPAV

SEQ ID NO: 47367 - protein, 978 aa, synthetic construct
  REGION 1..978: note = engineered CasX variant
QEIKRINKIRRRLVKDSNTKKAGKTGPMKTLLVRVMTPDLRERLENLRKKPENIPQPISNTSRANLNKLLTDYTEMKKAILHVYWEEFQKDPVGLMSRVAQPASKKIDQNKLKPEMDEKGNLTTAGFACSQCGQPLFVYKLEQVSEKGKAYTNYFGRCNVAEHEKLILLAQLKPEKDSDEAVTYSLGKFGQRALDFYSIHVTKESTHPVKPLAQIAGNRYASPVGKALSDACMGTIASFLSKYQDIIIEHQKVVKGNQKRLESLRELAGKENLEYPSVTLPPQPHTKEGVDAYNEVIARVRMWVNLNLWQKLKLSRDDAKPLLRLKGFPSFPLVERQANEVDWWDMVCNVKKLINEKKEDGKVFWQNLAGYKRQEALRPYLSSEEDRKKGKKFARYQLGDLLLHLEKKHGEDWGKVYDEAWERIDKKVEGLSKHIKLEEERRSEDAQSKAALTDWLRAKASFVIEGLKEADKDEFCRCELKLQKWYGDLRGKPFAIEAENSILDISGFSKQYNCAFIWQKDGVKKLNLYLIINYFKGGKLRFKKIKPEAFEANRFYTVINKKSGEIVPMEVNFNFDDPNLIILPLAFGKRQGREFIWNDLLSLETGSLKLANGRVIEKTLYNRRTRQDEPALFVALTFERREVLDSSNIKPMNLIGVDRGENIPAVIALTDPEGCPLSRFKDSLGNPTHILRIGESYKEKQRTIQAKKEVEQRRAGGYSRKYASKAKNLADDMVRNTARDLLYYAVTQDAMLIFENLSRGFGRQGKRTFMAERQYTRMEDWLTAKLAYEGLPSKTYLSKTLAQYTSKTCSNCGFTITSADYDRMLEKLKKTATGWMTTINGKELKVEGQITYYNRYKRQNVVKDLSVELDRLSEESVNNDISSWTKGRSGNEALSLLKKRFSHRPVQEKFVCLNCGFETHADEQAALNIARSWLFLRSQEYKKYQTNKTTGNTDKRAFVETWQSFYRKKLKEVWKPAV

SEQ ID NO: 47368 - protein, 978 aa, synthetic construct
  REGION 1..978: note = engineered CasX variant
QEIKRINKIRRRLVKDSNTKKAGKTGPMKTLLVRVMTPDLRERLENLRKKPENIPQPISNTSRANLNKLLTDYTEMKKAILHVYWEEFQKDPVGLMSRVAQPASKKIDQNKLKPEMDEKGNLTTAGFACSQCGQPLFVYKLEQVSEKGKAYTNYFGRCNVAEHEKLILLAQLKPEKDSDEAVTYSLGKFGQRALDFYSIHVTKESTHPVKPLAQIAGNRYASYPVGKALSDACMGTIASFLSKYQDIIIEHQKVVKGNQKRLESLRELAGKENLEYPSVTLPPQPHTKEGVDAYNEVIARVRMWVNLNLWQKLKLSRDDAKPLLRLKGFPSFPLVERQANEVDWWDMVCNVKKLINEKKEDGKVFWQNLAGYKRQEALRPYLSSEEDRQKGKKFARYQLGDLLLHLEKKHGEDWGKVYDEAWERIDKKVEGLSKHIKLEEERRSEDAQSKAALTDWLRAKASFVIEGLKEADKDEFCRCELKLQKWYGDLRGKPFAIEAENSILDISGFSKQYNCAFIWQKDGVKKLNLYLIINYFKGGKLRFKKIKPEAFEANRFYTVINKKSGEIVPMEVNFNFDDPNLIILPLAFGKRQGREFIWNDLLSLETGSLKLANGRVIEKTLYNRRTRQDEPALFVALTFERREVLDSSNIKPMNLIGVDRGENIPAVIALTDPEGCPLSRFKDSLGNPTHILRIGESYKEKQRTIQAKKEVEQRRAGGYSRKYASKAKNLADDMVRNTARDLLYYAVTQDAMLIFENLSRGFGRQGKRTFMAERQYTRMEDWLTAKLAYEGLPSKTYLSKTLAQYTSKTCSNCGFTITSADYDRMLEKLKKTATGWMTTINGKELKVEGQITYYNRYKRQNVVKDLSVELDRLSEESVNNDISSWTKGRSGEALSLLKKRFSHRPVQEKFVCLNCGFETHADEQAALNIARSWLFLRSQEYKKYQTNKTTGNTDKRAFVETWQSFYRKKLKEVWKPAV

SEQ ID NO: 47369 - protein, 978 aa, synthetic construct
  REGION 1..978: note = engineered CasX variant
QEIKRINKIRRRLVKDSNTKKAGKTGPMKTLLVRVMTPDLRERLENLRKKPENIPQPISNTSRANLNKLLTDYTEMKKAILHVYWEEFQKDPVGLMSRVAQPASKKIDQNKLKPEMDEKGNLTTAGFACSQCGQPLFVYKLEQVSEKGKAYTNYFGRCNVAEHEKLILLAQLKPEKDSDEAVTYSLGKFGQRALDFYSIHVTKESTHPVKPLAQIAGNRYASHPVGKALSDACMGTIASFLSKYQDIIIEHQKVVKGNQKRLESLRELAGKENLEYPSVTLPPQPHTKEGVDAYNEVIARVRMWVNLNLWQKLKLSRDDAKPLLRLKGFPSFPLVERQANEVDWWDMVCNVKKLINEKKEDGKVFWQNLAGYKRQEALRPYLSSEEDRQKGKKFARYQLGDLLLHLEKKHGEDWGKVYDEAWERIDKKVEGLSKHIKLEEERRSEDAQSKAALTDWLRAKASFVIEGLKEADKDEFCRCELKLQKWYGDLRGKPFAIEAENSILDISGFSKQYNCAFIWQKDGVKKLNLYLIINYFKGGKLRFKKIKPEAFEANRFYTVINKKSGEIVPMEVNFNFDDPNLIILPLAFGKRQGREFIWNDLLSLETGSLKLANGRVIEKTLYNRRTRQDEPALFVALTFERREVLDSSNIKPMNLIGVDRGENIPAVIALTDPEGCPLSRFKDSLGNPTHILRIGESYKEKQRTIQAKKEVEQRRAGGYSRKYASKAKNLADDMVRNTARDLLYYAVTQDAMLIFENLSRGFGRQGKRTFMAERQYTRMEDWLTAKLAYEGLPSKTYLSKTLAQYTSKTCSNCGFTITSADYDRMLEKLKKTATGWMTTINGKELKVEGQITYYNRYKRQNVVKDLSVELDRLSEESVNNDISSWTKGRSGEALSLLKKRFSHRPVQEKFVCLNCGFETHADEQAALNIARSWLFLRSQEYKKYQTNKTTGNTDKRAFVETWQSFYRKKLKEVWKPAV

SEQ ID NO: 47370 - protein, 978 aa, synthetic construct
  REGION 1..978: note = engineered CasX variant
QEIKRINKIRRRLVKDSNTKKAGKTGPMKTLLVRVMTPDLRERLENLRKKPENIPQPISNTSRANLNKLLTDYTEMKKAILHVYWEEFQKDPVGLMSRVAQPASKKIDQNKLKPEMDEKGNLTTAGFACSQCGQPLFVYKLEQVSEKGKAYTNYFGRCNVAEHEKLILLAQLKPEKDSDEAVTYSLGKFGQRALDFYSIHVTKESTHPVKPLAQIAGNRYASSPVGKALSDACMGTIASFLSKYQDIIIEHQKVVKGNQKRLESLRELAGKENLEYPSVTLPPQPHTKEGVDAYNEVIARVRMWVNLNLWQKLKLSRDDAKPLLRLKGFPSFPLVERQANEVDWWDMVCNVKKLINEKKEDGKVFWQNLAGYKRQEALRPYLSSEEDRQKGKKFARYQLGDLLLHLEKKHGEDWGKVYDEAWERIDKKVEGLSKHIKLEEERRSEDAQSKAALTDWLRAKASFVIEGLKEADKDEFCRCELKLQKWYGDLRGKPFAIEAENSILDISGFSKQYNCAFIWQKDGVKKLNLYLIINYFKGGKLRFKKIKPEAFEANRFYTVINKKSGEIVPMEVNFNFDDPNLIILPLAFGKRQGREFIWNDLLSLETGSLKLANGRVIEKTLYNRRTRQDEPALFVALTFERREVLDSSNIKPMNLIGVDRGENIPAVIALTDPEGCPLSRFKDSLGNPTHILRIGESYKEKQRTIQAKKEVEQRRAGGYSRKYASKAKNLADDMVRNTARDLLYYAVTQDAMLIFENLSRGFGRQGKRTFMAERQYTRMEDWLTAKLAYEGLPSKTYLSKTLAQYTSKTCSNCGFTITSADYDRMLEKLKKTATGWMTTINGKELKVEGQITYYNRYKRQNVVKDLSVELDRLSEESVNNDISSWTKGRSGEALSLLKKRFSHRPVQEKFVCLNCGFETHADEQAALNIARSWLFLRSQEYKKYQTNKTTGNTDKRAFVETWQSFYRKKLKEVWKPAV

SEQ ID NO: 47371 - protein, 978 aa, synthetic construct
  REGION 1..978: note = engineered CasX variant
QEIKRINKIRRRLVKDSNTKKAGKTGPMKTLLVRVMTPDLRERLENLRKKPENIPQPISNTSRANLNKLLTDYTEMKKAILHVYWEEFQKDPVGLMSRVAQPASKKIDQNKLKPEMDEKGNLTTAGFACSQCGQPLFVYKLEQVSEKGKAYTNYFGRCNVAEHEKLILLAQLKPEKDSDEAVTYSLGKFGQRALDFYSIHVTKESTHPVKPLAQIAGNRYASTPVGKALSDACMGTIASFLSKYQDIIIEHQKVVKGNQKRLESLRELAGKENLEYPSVTLPPQPHTKEGVDAYNEVIARVRMWVNLNLWQKLKLSRDDAKPLLRLKGFPSFPLVERQANEVDWWDMVCNVKKLINEKKEDGKVFWQNLAGYKRQEALRPYLSSEEDRQKGKKFARYQLGDLLLHLEKKHGEDWGKVYDEAWERIDKKVEGLSKHIKLEEERRSEDAQSKAALTDWLRAKASFVIEGLKEADKDEFCRCELKLQKWYGDLRGKPFAIEAENSILDISGFSKQYNCAFIWQKDGVKKLNLYLIINYFKGGKLRFKKIKPEAFEANRFYTVINKKSGEIVPMEVNFNFDDPNLIILPLAFGKRQGREFIWNDLLSLETGSLKLANGRVIEKTLYNRRTRQDEPALFVALTFERREVLDSSNIKPMNLIGVDRGENIPAVIALTDPEGCPLSRFKDSLGNPTHILRIGESYKEKQRTIQAKKEVEQRRAGGYSRKYASKAKNLADDMVRNTARDLLYYAVTQDAMLIFENLSRGFGRQGKRTFMAERQYTRMEDWLTAKLAYEGLPSKTYLSKTLAQYTSKTCSNCGFTITSADYDRMLEKLKKTATGWMTTINGKELKVEGQITYYNRYKRQNVVKDLSVELDRLSEESVNNDISSWTKGRSGEALSLLKKRFSHRPVQEKFVCLNCGFETHADEQAALNIARSWLFLRSQEYKKYQTNKTTGNTDKRAFVETWQSFYRKKLKEVWKPAV

SEQ ID NO: 47372 - protein, 978 aa, synthetic construct
  REGION 1..978: note = engineered CasX variant
QEIKRINKIRRRLVKDSNTKKAGKTGPMKTLLVRVMTPDLRERLENLRKKPENIPQPISNTSRANLNKLLTDYTEMKKAILHVYWEEFQKDPVGLMSRVAQPASKKIDQNKLKPEMDEKGNLTTAGFACSQCGQPLFVYKLEQVSEKGKAYTNYFGRCNVAEHEKLILLAQLKPEKDSDEAVTYSLGKFGQRALDFYSIHVTKESTHPVKPLAQIAGNRYASAPVGKALSDACMGTIASFLSKYQDIIIEHQKVVKGNQKRLESLRELAGKENLEYPSVTLPPQPHTKEGVDAYNEVIARVRMWVNLNLWQKLKLSRDDAKPLLRLKGFPSFPLVERQANEVDWWDMVCNVKKLINEKKEDGKVFWQNLAGYKRQEALRPYLSSEEDRQKGKKFARYQLGDLLLHLEKKHGEDWGKVYDEAWERIDKKVEGLSKHIKLEEERRSEDAQSKAALTDWLRAKASFVIEGLKEADKDEFCRCELKLQKWYGDLRGKPFAIEAENSILDISGFSKQYNCAFIWQKDGVKKLNLYLIINYFKGGKLRFKKIKPEAFEANRFYTVINKKSGEIVPMEVNFNFDDPNLIILPLAFGKRQGREFIWNDLLSLETGSLKLANGRVIEKTLYNRRTRQDEPALFVALTFERREVLDSSNIKPMNLIGVDRGENIPAVIALTDPEGCPLSRFKDSLGNPTHILRIGESYKEKQRTIQAKKEVEQRRAGGYSRKYASKAKNLADDMVRNTARDLLYYAVTQDAMLIFENLSRGFGRQGKRTFMAERQYTRMEDWLTAKLAYEGLPSKTYLSKTLAQYTSKTCSNCGFTITSADYDRMLEKLKKTATGWMTTINGKELKVEGQITYYNRYKRQNVVKDLSVELDRLSEESVNNDISSWTKGRSGEALSLLKKRFSHRPVQEKFVCLNCGFETHADEQAALNIARSWLFLRSQEYKKYQTNKTTGNTDKRAFVETWQSFYRKKLKEVWKPAV

SEQ ID NO: 47373 - protein, 978 aa, synthetic construct
  REGION 1..978: note = engineered CasX variant
QEIKRINKIRRRLVKDSNTKKAGKTGPMKTLLVRVMTPDLRERLENLRKKPENIPQPISNTSRANLNKLLTDYTEMKKAILHVYWEEFQKDPVGLMSRVAQPASKKIDQNKLKPEMDEKGNLTTAGFACSQCGQPLFVYKLEQVSEKGKAYTNYFGRCNVAEHEKLILLAQLKPEKDSDEAVTYSLGKFGQRALDFYSIHVTKESTHPVKPLAQIAGNRYASVPVGKALSDACMGTIASFLSKYQDIIIEHQKVVKGNQKRLESLRELAGKENLEYPSVTLPPQPHTKEGVDAYNEVIARVRMWVNLNLWQKLKLSRDDAKPLLRLKGFPSFPLVERQANEVDWWDMVCNVKKLINEKKEDGKVFWQNLAGYKRQEALRPYLSSEEDRQKGKKFARYQLGDLLLHLEKKHGEDWGKVYDEAWERIDKKVEGLSKHIKLEEERRSEDAQSKAALTDWLRAKASFVIEGLKEADKDEFCRCELKLQKWYGDLRGKPFAIEAENSILDISGFSKQYNCAFIWQKDGVKKLNLYLIINYFKGGKLRFKKIKPEAFEANRFYTVINKKSGEIVPMEVNFNFDDPNLIILPLAFGKRQGREFIWNDLLSLETGSLKLANGRVIEKTLYNRRTRQDEPALFVALTFERREVLDSSNIKPMNLIGVDRGENIPAVIALTDPEGCPLSRFKDSLGNPTHILRIGESYKEKQRTIQAKKEVEQRRAGGYSRKYASKAKNLADDMVRNTARDLLYYAVTQDAMLIFENLSRGFGRQGKRTFMAERQYTRMEDWLTAKLAYEGLPSKTYLSKTLAQYTSKTCSNCGFTITSADYDRMLEKLKKTATGWMTTINGKELKVEGQITYYNRYKRQNVVKDLSVELDRLSEESVNNDISSWTKGRSGEALSLLKKRFSHRPVQEKFVCLNCGFETHADEQAALNIARSWLFLRSQEYKKYQTNKTTGNTDKRAFVETWQSFYRKKLKEVWKPAV

SEQ ID NO: 47374 - protein, 978 aa, synthetic construct
  REGION 1..978: note = engineered CasX variant
QEIKRINKIRRRLVKDSNTKKAGKTGPMKTLLVRVMTPDLRERLENLRKKPENIPQPISNTSRANLNKLLTDYTEMKKAILHVYWEEFQKDPVGLMSRVAQPASKKIDQNKLKPEMDEKGNLTTAGFACSQCGQPLFVYKLEQVSEKGKAYTNYFGRCNVAEHEKLIKLAQLKPEKDSDEAVTYSLGKFGQRALDFYSIHVTKESTHPVKPLAQIAGNRYASGPVGKALSDACMGTIASFLSKYQDIIIEHQKVVKGNQKRLESLRELAGKENLEYPSVTLPPQPHTKEGVDAYNEVIARVRMWVNLNLWQKLKLSRDDAKPLLRLKGFPSFPLVERQANEVDWWDMVCNVKKLINEKKEDGKVFWQNLAGYKRQEALRPYLSSEEDRQKGKKFARYQLGDLLLHLEKKHGEDWGKVYDEAWERIDKKVEGLSKHIKLEEERRSEDAQSKAALTDWLRAKASFVIEGLKEADKDEFCRCELKLQKWYGDLRGKPFAIEAENSILDISGFSKQYNCAFIWQKDGVKKLNLYLIINYFKGGKLRFKKIKPEAFEANRFYTVINKKSGEIVPMEVNFNFDDPNLIILPLAFGKRQGREFIWNDLLSLETGSLKLANGRVIEKTLYNRRTRQDEPALFVALTFERREVLDSSNIKPMNLIGVDRGENIPAVIALTDPEGCPLSRFKDSLGNPTHILRIGESYKEKQRTIQAKKEVEQRRAGGYSRKYASKAKNLADDMVRNTARDLLYYAVTQDAMLIFENLSRGFGRQGKRTFMAERQYTRMEDWLTAKLAYEGLPSKTYLSKTLAQYTSKTCSNCGFTITSADYDRMLEKLKKTATGWMTTINGKELKVEGQITYYNRYKRQNVVKDLSVELDRLSEESVNNDISSWTKGRSGEALSLLKKRFSHRPVQEKFVCLNCGFETHADEQAALNIARSWLFLRSQEYKKYQTNKTTGNTDKRAFVETWQSFYRKKLKEVWKPAV

SEQ ID NO: 47375 - protein, 977 aa, synthetic construct
  REGION 1..977: note = engineered CasX variant
QEIKRINKIRRRLVKDSNTKKAGKTGPMKTLLVRVMTPDLRERLENLRKKPENIPQPISNTSRANLNKLLTDYTEMKKAILHVYWEEFQKDPVGLMSRVAQPASKKIDQNKLKPEMDEKGNLTTAGFACSQCGQPLFVYKLEQVSEKGKAYTNYFGRCNVAEHEKLILLAQLKPEKDSDEAVTYSLGKFGQRALDFYSIHVTKESTHPVKPLAQIAGNRYASPVGKALSDACMGTIASFLSKYQDIIIEHQKVVKGNQKRLESLRELAGKENLEYPSVTLPPQPHTKEGVDAYNEVIARVRMWVNLNLWQKLKLSRDDAKPLLRLKGFPSFPLVERQANEVDWWDMVCNVKKLINEKKEDGKVFWQNLAGYKRQEALRPYLSSEEDRQKGKKFARYQLGDLLLHLEKKHGEDWGKVYDEAWERIDKKVEGLSKHIKLEEERRSEDAQSKAALTDWLRAKASFVIEGLKEADKDEFCRCELKLQKWYGDLRGKPFAIEAENSILDISGFSKQYNCAFIWQKDGVKKLNLYLIINYFKGGKLRFKKIKPEAFEANRFYTVINKKSGEIVPMEVNFNFDDPNLIILPLAFGKRQGREFIWNDLLSLETGSLKLANGRVIEKTLYNRRTRQDEPALFVALTFERREVLDSSNIKPMNLIGVDRGENIPAVIALTDPEGCPLSRFKDSLGNPTHILRIGESYKEKQRTIQAKKEVEQRRAGGYSRKYASKAKNLADDMVRNTARDLLYYAVTQDAMLIFENLSRGFGRQGKRTFMAERQYTRMEDWLTAKLAYEGLPSKTYLSKTLAQYTSKTCSNCGFTITSADYDRMLEKLKKTATGWMTTINGKELKVEGQITYYNRYKRQNVVKDLSVELDRLSEESVNNDISSWTKGRSGEALSLLKKRFSHRPVQEKFVCLNCGFETHADEQAALNIARSWLFLRSQEYKKYQTNKTTGNTDKRAFVETWQSFYRKKLKEVWKPAV

SEQ ID NO: 47376 - protein, 978 aa, synthetic construct
  REGION 1..978: note = engineered CasX variant
QEIKRINKIRRRLVKDSNTKKAGKTGPMKTLLVRVMTPDLRERLENLRKKPENIPQPISNTSRANLNKLLTDYTEMKKAILHVYWEEFQKDPVGLMSRVAQPASKKIDQNKLKPEMDEKGNLTTAGFACSQCGQPLFVYKLEQVSEKGKAYTNYFGRCNVAEHEKLILLAQLKPEKDSDEAVTYSLGKFGQRALDFYSIHVTKESTHPVKPLAQIAGNRYASYPVGKALSDACMGTIASFLSKYQDIIIEHQKVVKGNQKRLESLRELAGKENLEYPSVTLPPQPHTKEGVDAYNEVIARVRMWVNLNLWQKLKLSRDDAKPLLRLKGFPSFPLVERQANEVDWWDMVCNVKKLINEKKEDGKVFWQNLAGYKRQEALRPYLSSEEDRKKGKKFARYQLGDLLLHLEKKHGEDWGKVYDEAWERIDKKVEGLSKHIKLEEERRSEDAQSKAALTDWLRAKASFVIEGLKEADKDEFCRCELKLQKWYGDLRGKPFAIEAENSILDISGFSKQYNCAFIWQKDGVKKLNLYLIINYFKGGKLRFKKIKPEAFEANRFYTVINKKSGEIVPMEVNFNFDDPNLIILPLAFGKRQGREFIWNDLLSLETGSLKLANGRVIEKTLYNRRTRQDEPALFVALTFERREVLDSSNIKPMNLIGVDRGENIPAVIALTDPEGCPLSRFKDSLGNPTHILRIGESYKEKQRTIQAKKEVEQRRAGGYSRKYASKAKNLADDMVRNTARDLLYYAVTQDAMLIFENLSRGFGRQGKRTFMAERQYTRMEDWLTAKLAYEGLPSQTYLSKTLAQYTSKTCSNCGFTITSADYDRMLEKLKKTATGWMTTINGKELKVEGQITYYNRYKRQNVVKDLSVELDRLSEESVNNDISSWTKGRSGEALSLLKKRFSHRPVQEKFVCLNCGFETHADEQAALNIARSWLFLRSQEYKKYQTNKTTGNTDKRAFVETWQSFYRKKLKEVWKPAV

SEQ ID NO: 47377 - protein, 978 aa, synthetic construct
  REGION 1..978: note = engineered CasX variant
QEIKRINKIRRRLVKDSNTKKAGKTGPMKTLLVRVMTPDLRERLENLRKKPENIPQPISNTSRANLNKLLTDYTEMKKAILHVYWEEFQKDPVGLMSRVAQPASKKIDQNKLKPEMDEKGNLTTAGFACSQCGQPLFVYKLEQVSEKGKAYTNYFGRCNVAEHEKLILLAQLKPEKDSDEAVTYSLGKFGQRALDFYSIHVTKESTHPVKPLAQIAGNRYASHPVGKALSDACMGTIASFLSKYQDIIIEHQKVVKGNQKRLESLRELAGKENLEYPSVTLPPQPHTKEGVDAYNEVIARVRMWVNLNLWQKLKLSRDDAKPLLRLKGFPSFPLVERQANEVDWWDMVCNVKKLINEKKEDGKVFWQNLAGYKRQEALRPYLSSEEDRKKGKKFARYQLGDLLLHLEKKHGEDWGKVYDEAWERIDKKVEGLSKHIKLEEERRSEDAQSKAALTDWLRAKASFVIEGLKEADKDEFCRCELKLQKWYGDLRGKPFAIEAENSILDISGFSKQYNCAFIWQKDGVKKLNLYLIINYFKGGKLRFKKIKPEAFEANRFYTVINKKSGEIVPMEVNFNFDDPNLIILPLAFGKRQGREFIWNDLLSLETGSLKLANGRVIEKTLYNRRTRQDEPALFVALTFERREVLDSSNIKPMNLIGVDRGENIPAVIALTDPEGCPLSRFKDSLGNPTHILRIGESYKEKQRTIQAKKEVEQRRAGGYSRKYASKAKNLADDMVRNTARDLLYYAVTQDAMLIFENLSRGFGRQGKRTFMAERQYTRMEDWLTAKLAYEGLPSQTYLSKTLAQYTSKTCSNCGFTITSADYDRMLEKLKKTATGWMTTINGKELKVEGQITYYNRYKRQNVVKDLSVELDRLSEESVNNDISSWTKGRSGEALSLLKKRFSHRPVQEKFVCLNCGFETHADEQAALNIARSWLFLRSQEYKKYQTNKTTGNTDKRAFVETWQSFYRKKLKEVWKPAV

SEQ ID NO: 47378 - protein, 978 aa, synthetic construct
  REGION 1..978: note = engineered CasX variant
QEIKRINKIRRRLVKDSNTKKAGKTGPMKTLLVRVMTPDLRERLENLRKKPENIPQPISNTSRANLNKLLTDYTEMKKAILHVYWEEFQKDPVGLMSRVAQPASKKIDQNKLKPEMDEKGNLTTAGFACSQCGQPLFVYKLEQVSEKGKAYTNYFGRCNVAEHEKLILLAQLKPEKDSDEAVTYSLGKFGQRALDFYSIHVTKESTHPVKPLAQIAGNRYASSPVGKALSDACMGTIASFLSKYQDIIIEHQKVVKGNQKRLESLRELAGKENLEYPSVTLPPQPHTKEGVDAYNEVIARVRMWVNLNLWQKLKLSRDDAKPLLRLKGFPSFPLVERQANEVDWWDMVCNVKKLINEKKEDGKVFWQNLAGYKRQEALRPYLSSEEDRKKGKKFARYQLGDLLLHLEKKHGEDWGKVYDEAWERIDKKVEGLSKHIKLEEERRSEDAQSKAALTDWLRAKASFVIEGLKEADKDEFCRCELKLQKWYGDLRGKPFAIEAENSILDISGFSKQYNCAFIWQKDGVKKLNLYLIINYFKGGKLRFKKIKPEAFEANRFYTVINKKSGEIVPMEVNFNFDDPNLIILPLAFGKRQGREFIWNDLLSLETGSLKLANGRVIEKTLYNRRTRQDEPALFVALTFERREVLDSSNIKPMNLIGVDRGENIPAVIALTDPEGCPLSRFKDSLGNPTHILRIGESYKEKQRTIQAKKEVEQRRAGGYSRKYASKAKNLADDMVRNTARDLLYYAVTQDAMLIFENLSRGFGRQGKRTFMAERQYTRMEDWLTAKLAYEGLPSQTYLSKTLAQYTSKTCSNCGFTITSADYDRMLEKLKKTATGWMTTINGKELKVEGQITYYNRYKRQNVVKDLSVELDRLSEESVNNDISSWTKGRSGEALSLLKKRFSHRPVQEKFVCLNCGFETHADEQAALNIARSWLFLRSQEYKKYQTNKTTGNTDKRAFVETWQSFYRKKLKEVWKPAV

SEQ ID NO: 47379 - protein, 978 aa, synthetic construct
  REGION 1..978: note = engineered CasX variant
QEIKRINKIRRRLVKDSNTKKAGKTGPMKTLLVRVMTPDLRERLENLRKKPENIPQPISNTSRANLNKLLTDYTEMKKAILHVYWEEFQKDPVGLMSRVAQPASKKIDQNKLKPEMDEKGNLTTAGFACSQCGQPLFVYKLEQVSEKGKAYTNYFGRCNVAEHEKLILLAQLKPEKDSDEAVTYSLGKFGQRALDFYSIHVTKESTHPVKPLAQIAGNRYASTPVGKALSDACMGTIASFLSKYQDIIIEHQKVVKGNQKRLESLRELAGKENLEYPSVTLPPQPHTKEGVDAYNEVIARVRMWVNLNLWQKLKLSRDDAKPLLRLKGFPSFPLVERQANEVDWWDMVCNVKKLINEKKEDGKVFWQNLAGYKRQEALRPYLSSEEDRKKGKKFARYQLGDLLLHLEKKHGEDWGKVYDEAWERIDKKVEGLSKHIKLEEERRSEDAQSKAALTDWLRAKASFVIEGLKEADKDEFCRCELKLQKWYGDLRGKPFAIEAENSILDISGFSKQYNCAFIWQKDGVKKLNLYLIINYFKGGKLRFKKIKPEAFEANRFYTVINKKSGEIVPMEVNFNFDDPNLIILPLAFGKRQGREFIWNDLLSLETGSLKLANGRVIEKTLYNRRTRQDEPALFVALTFERREVLDSSNIKPMNLIGVDRGENIPAVIALTDPEGCPLSRFKDSLGNPTHILRIGESYKEKQRTIQAKKEVEQRRAGGYSRKYASKAKNLADDMVRNTARDLLYYAVTQDAMLIFENLSRGFGRQGKRTFMAERQYTRMEDWLTAKLAYEGLPSQTYLSKTLAQYTSKTCSNCGFTITSADYDRMLEKLKKTATGWMTTINGKELKVEGQITYYNRYKRQNVVKDLSVELDRLSEESVNNDISSWTKGRSGEALSLLKKRFSHRPVQEKFVCLNCGFETHADEQAALNIARSWLFLRSQEYKKYQTNKTTGNTDKRAFVETWQSFYRKKLKEVWKPAV

SEQ ID NO: 47380 - protein, 978 aa, synthetic construct
  REGION 1..978: note = engineered CasX variant
QEIKRINKIRRRLVKDSNTKKAGKTGPMKTLLVRVMTPDLRERLENLRKKPENIPQPISNTSRANLNKLLTDYTEMKKAILHVYWEEFQKDPVGLMSRVAQPASKKIDQNKLKPEMDEKGNLTTAGFACSQCGQPLFVYKLEQVSEKGKAYTNYFGRCNVAEHEKLILLAQLKPEKDSDEAVTYSLGKFGQRALDFYSIHVTKESTHPVKPLAQIAGNRYASAPVGKALSDACMGTIASFLSKYQDIIIEHQKVVKGNQKRLESLRELAGKENLEYPSVTLPPQPHTKEGVDAYNEVIARVRMWVNLNLWQKLKLSRDDAKPLLRLKGFPSFPLVERQANEVDWWDMVCNVKKLINEKKEDGKVFWQNLAGYKRQEALRPYLSSEEDRKKGKKFARYQLGDLLLHLEKKHGEDWGKVYDEAWERIDKKVEGLSKHIKLEEERRSEDAQSKAALTDWLRAKASFVIEGLKEADKDEFCRCELKLQKWYGDLRGKPFAIEAENSILDISGFSKQYNCAFIWQKDGVKKLNLYLIINYFKGGKLRFKKIKPEAFEANRFYTVINKKSGEIVPMEVNFNFDDPNLIILPLAFGKRQGREFIWNDLLSLETGSLKLANGRVIEKTLYNRRTRQDEPALFVALTFERREVLDSSNIKPMNLIGVDRGENIPAVIALTDPEGCPLSRFKDSLGNPTHILRIGESYKEKQRTIQAKKEVEQRRAGGYSRKYASKAKNLADDMVRNTARDLLYYAVTQDAMLIFENLSRGFGRQGKRTFMAERQYTRMEDWLTAKLAYEGLPSQTYLSKTLAQYTSKTCSNCGFTITSADYDRMLEKLKKTATGWMTTINGKELKVEGQITYYNRYKRQNVVKDLSVELDRLSEESVNNDISSWTKGRSGEALSLLKKRFSHRPVQEKFVCLNCGFETHADEQAALNIARSWLFLRSQEYKKYQTNKTTGNTDKRAFVETWQSFYRKKLKEVWKPAV

SEQ ID NO: 47381 - protein, 978 aa, synthetic construct
  REGION 1..978: note = engineered CasX variant
QEIKRINKIRRRLVKDSNTKKAGKTGPMKTLLVRVMTPDLRERLENLRKKPENIPQPISNTSRANLNKLLTDYTEMKKAILHVYWEEFQKDPVGLMSRVAQPASKKIDQNKLKPEMDEKGNLTTAGFACSQCGQPLFVYKLEQVSEKGKAYTNYFGRCNVAEHEKLILLAQLKPEKDSDEAVTYSLGKFGQRALDFYSIHVTKESTHPVKPLAQIAGNRYASVPVGKALSDACMGTIASFLSKYQDIIIEHQKVVKGNQKRLESLRELAGKENLEYPSVTLPPQPHTKEGVDAYNEVIARVRMWVNLNLWQKLKLSRDDAKPLLRLKGFPSFPLVERQANEVDWWDMVCNVKKLINEKKEDGKVFWQNLAGYKRQEALRPYLSSEEDRKKGKKFARYQLGDLLLHLEKKHGEDWGKVYDEAWERIDKKVEGLSKHIKLEEERRSEDAQSKAALTDWLRAKASFVIEGLKEADKDEFCRCELKLQKWYGDLRGKPFAIEAENSILDISGFSKQYNCAFIWQKDGVKKLNLYLIINYFKGGKLRFKKIKPEAFEANRFYTVINKKSGEIVPMEVNFNFDDPNLIILPLAFGKRQGREFIWNDLLSLETGSLKLANGRVIEKTLYNRRTRQDEPALFVALTFERREVLDSSNIKPMNLIGVDRGENIPAVIALTDPEGCPLSRFKDSLGNPTHILRIGESYKEKQRTIQAKKEVEQRRAGGYSRKYASKAKNLADDMVRNTARDLLYYAVTQDAMLIFENLSRGFGRQGKRTFMAERQYTRMEDWLTAKLAYEGLPSQTYLSKTLAQYTSKTCSNCGFTITSADYDRMLEKLKKTATGWMTTINGKELKVEGQITYYNRYKRQNVVKDLSVELDRLSEESVNNDISSWTKGRSGEALSLLKKRFSHRPVQEKFVCLNCGFETHADEQAALNIARSWLFLRSQEYKKYQTNKTTGNTDKRAFVETWQSFYRKKLKEVWKPAV

SEQ ID NO: 47382 - protein, 978 aa, synthetic construct
  REGION 1..978: note = engineered CasX variant
QEIKRINKIRRRLVKDSNTKKAGKTGPMKTLLVRVMTPDLRERLENLRKKPENIPQPISNTSRANLNKLLTDYTEMKKAILHVYWEEFQKDPVGLMSRVAQPASKKIDQNKLKPEMDEKGNLTTAGFACSQCGQPLFVYKLEQVSEKGKAYTNYFGRCNVAEHEKLIKLAQLKPEKDSDEAVTYSLGKFGQRALDFYSIHVTKESTHPVKPLAQIAGNRYASGPVGKALSDACMGTIASFLSKYQDIIIEHQKVVKGNQKRLESLRELAGKENLEYPSVTLPPQPHTKEGVDAYNEVIARVRMWVNLNLWQKLKLSRDDAKPLLRLKGFPSFPLVERQANEVDWWDMVCNVKKLINEKKEDGKVFWQNLAGYKRQEALRPYLSSEEDRKKGKKFARYQLGDLLLHLEKKHGEDWGKVYDEAWERIDKKVEGLSKHIKLEEERRSEDAQSKAALTDWLRAKASFVIEGLKEADKDEFCRCELKLQKWYGDLRGKPFAIEAENSILDISGFSKQYNCAFIWQKDGVKKLNLYLIINYFKGGKLRFKKIKPEAFEANRFYTVINKKSGEIVPMEVNFNFDDPNLIILPLAFGKRQGREFIWNDLLSLETGSLKLANGRVIEKTLYNRRTRQDEPALFVALTFERREVLDSSNIKPMNLIGVDRGENIPAVIALTDPEGCPLSRFKDSLGNPTHILRIGESYKEKQRTIQAKKEVEQRRAGGYSRKYASKAKNLADDMVRNTARDLLYYAVTQDAMLIFENLSRGFGRQGKRTFMAERQYTRMEDWLTAKLAYEGLPSQTYLSKTLAQYTSKTCSNCGFTITSADYDRMLEKLKKTATGWMTTINGKELKVEGQITYYNRYKRQNVVKDLSVELDRLSEESVNNDISSWTKGRSGEALSLLKKRFSHRPVQEKFVCLNCGFETHADEQAALNIARSWLFLRSQEYKKYQTNKTTGNTDKRAFVETWQSFYRKKLKEVWKPAV

SEQ ID NO: 47383 - protein, 977 aa, synthetic construct
  REGION 1..977: note = engineered CasX variant
QEIKRINKIRRRLVKDSNTKKAGKTGPMKTLLVRVMTPDLRERLENLRKKPENIPQPISNTSRANLNKLLTDYTEMKKAILHVYWEEFQKDPVGLMSRVAQPASKKIDQNKLKPEMDEKGNLTTAGFACSQCGQPLFVYKLEQVSEKGKAYTNYFGRCNVAEHEKLILLAQLKPEKDSDEAVTYSLGKFGQRALDFYSIHVTKESTHPVKPLAQIAGNRYASPVGKALSDACMGTIASFLSKYQDIIIEHQKVVKGNQKRLESLRELAGKENLEYPSVTLPPQPHTKEGVDAYNEVIARVRMWVNLNLWQKLKLSRDDAKPLLRLKGFPSFPLVERQANEVDWWDMVCNVKKLINEKKEDGKVFWQNLAGYKRQEALRPYLSSEEDRKKGKKFARYQLGDLLLHLEKKHGEDWGKVYDEAWERIDKKVEGLSKHIKLEEERRSEDAQSKAALTDWLRAKASFVIEGLKEADKDEFCRCELKLQKWYGDLRGKPFAIEAENSILDISGFSKQYNCAFIWQKDGVKKLNLYLIINYFKGGKLRFKKIKPEAFEANRFYTVINKKSGEIVPMEVNFNFDDPNLIILPLAFGKRQGREFIWNDLLSLETGSLKLANGRVIEKTLYNRRTRQDEPALFVALTFERREVLDSSNIKPMNLIGVDRGENIPAVIALTDPEGCPLSRFKDSLGNPTHILRIGESYKEKQRTIQAKKEVEQRRAGGYSRKYASKAKNLADDMVRNTARDLLYYAVTQDAMLIFENLSRGFGRQGKRTFMAERQYTRMEDWLTAKLAYEGLPSQTYLSKTLAQYTSKTCSNCGFTITSADYDRMLEKLKKTATGWMTTINGKELKVEGQITYYNRYKRQNVVKDLSVELDRLSEESVNNDISSWTKGRSGEALSLLKKRFSHRPVQEKFVCLNCGFETHADEQAALNIARSWLFLRSQEYKKYQTNKTTGNTDKRAFVETWQSFYRKKLKEVWKPAV

SEQ ID NO: 47384 - protein, 978 aa, synthetic construct
  REGION 1..978: note = engineered CasX variant
QEIKRINKIRRRLVKDSNTKKAGKTGPMKTLLVRVMTPDLRERLENLRKKPENIPQPISNTSRANLNKLLTDYTEMKKAILHVYWEEFQKDPVGLMSRVAQPASKKIDQNKLKPEMDEKGNLTTAGFACSQCGQPLFVYKLEQVSEKGKAYTNYFGRCNVAEHEKLILLAQLKPEKDSDEAVTYSLGKFGQRALDFYSIHVTKESTHPVKPLAQIAGNRYASYPVGKALSDACMGTIASFLSKYQDIIIEHQKVVKGNQKRLESLRELAGKENLEYPSVTLPPQPHTKEGVDAYNEVIARVRMWVNLNLWQKLKLSRDDAKPLLRLKGFPSFPLVERQANEVDWWDMVCNVKKLINEKKEDGKVFWQNLAGYKRQEALRPYLSSEEDRKKGKKFARYQLGDLLLHLEKKHGEDWGKVYDEAWERIDKKVEGLSKHIKLEEERRSEDAQSKAALTDWLRAKASFVIEGLKEADKDEFCRCELKLQKWYGDLRGKPFAIEAENSILDISGFSKQYNCAFIWQKDGVKKLNLYLIINYFKGGKLRFKKIKPEAFEANRFYTVINKKSGEIVPMEVNFNFDDPNLIILPLAFGKRQGREFIWNDLLSLETGSLKLANGRVIEKTLYNRRTRQDEPALFVALTFERREVLDSSNIKPMNLIGVDRGENIPAVIALTDPEGCPLSRFKDSLGNPTHILRIGESYKEKQRTIQAKKEVEQRRAGGYSRKYASKAKNLADDMVRNTARDLLYYAVTQDAMLIFENLSRGFGRQGKRTFMAERQYTRMEDWLTAKLAYNGLPSKTYLSKTLAQYTSKTCSNCGFTITSADYDRMLEKLKKTATGWMTTINGKELKVEGQITYYNRYKRQNVVKDLSVELDRLSEESVNNDISSWTKGRSGEALSLLKKRFSHRPVQEKFVCLNCGFETHADEQAALNIARSWLFLRSQEYKKYQTNKTTGNTDKRAFVETWQSFYRKKLKEVWKPAV

SEQ ID NO: 47385 - protein, 978 aa, synthetic construct
  REGION 1..978: note = engineered CasX variant
QEIKRINKIRRRLVKDSNTKKAGKTGPMKTLLVRVMTPDLRERLENLRKKPENIPQPISNTSRANLNKLLTDYTEMKKAILHVYWEEFQKDPVGLMSRVAQPASKKIDQNKLKPEMDEKGNLTTAGFACSQCGQPLFVYKLEQVSEKGKAYTNYFGRCNVAEHEKLILLAQLKPEKDSDEAVTYSLGKFGQRALDFYSIHVTKESTHPVKPLAQIAGNRYASHPVGKALSDACMGTIASFLSKYQDIIIEHQKVVKGNQKRLESLRELAGKENLEYPSVTLPPQPHTKEGVDAYNEVIARVRMWVNLNLWQKLKLSRDDAKPLLRLKGFPSFPLVERQANEVDWWDMVCNVKKLINEKKEDGKVFWQNLAGYKRQEALRPYLSSEEDRKKGKKFARYQLGDLLLHLEKKHGEDWGKVYDEAWERIDKKVEGLSKHIKLEEERRSEDAQSKAALTDWLRAKASFVIEGLKEADKDEFCRCELKLQKWYGDLRGKPFAIEAENSILDISGFSKQYNCAFIWQKDGVKKLNLYLIINYFKGGKLRFKKIKPEAFEANRFYTVINKKSGEIVPMEVNFNFDDPNLIILPLAFGKRQGREFIWNDLLSLETGSLKLANGRVIEKTLYNRRTRQDEPALFVALTFERREVLDSSNIKPMNLIGVDRGENIPAVIALTDPEGCPLSRFKDSLGNPTHILRIGESYKEKQRTIQAKKEVEQRRAGGYSRKYASKAKNLADDMVRNTARDLLYYAVTQDAMLIFENLSRGFGRQGKRTFMAERQYTRMEDWLTAKLAYNGLPSKTYLSKTLAQYTSKTCSNCGFTITSADYDRMLEKLKKTATGWMTTINGKELKVEGQITYYNRYKRQNVVKDLSVELDRLSEESVNNDISSWTKGRSGEALSLLKKRFSHRPVQEKFVCLNCGFETHADEQAALNIARSWLFLRSQEYKKYQTNKTTGNTDKRAFVETWQSFYRKKLKEVWKPAV

SEQ ID NO: 47386 - protein, 978 aa, synthetic construct
  REGION 1..978: note = engineered CasX variant
QEIKRINKIRRRLVKDSNTKKAGKTGPMKTLLVRVMTPDLRERLENLRKKPENIPQPISNTSRANLNKLLTDYTEMKKAILHVYWEEFQKDPVGLMSRVAQPASKKIDQNKLKPEMDEKGNLTTAGFACSQCGQPLFVYKLEQVSEKGKAYTNYFGRCNVAEHEKLILLAQLKPEKDSDEAVTYSLGKFGQRALDFYSIHVTKESTHPVKPLAQIAGNRYASSPVGKALSDACMGTIASFLSKYQDIIIEHQKVVKGNQKRLESLRELAGKENLEYPSVTLPPQPHTKEGVDAYNEVIARVRMWVNLNLWQKLKLSRDDAKPLLRLKGFPSFPLVERQANEVDWWDMVCNVKKLINEKKEDGKVFWQNLAGYKRQEALRPYLSSEEDRKKGKKFARYQLGDLLLHLEKKHGEDWGKVYDEAWERIDKKVEGLSKHIKLEEERRSEDAQSKAALTDWLRAKASFVIEGLKEADKDEFCRCELKLQKWYGDLRGKPFAIEAENSILDISGFSKQYNCAFIWQKDGVKKLNLYLIINYFKGGKLRFKKIKPEAFEANRFYTVINKKSGEIVPMEVNFNFDDPNLIILPLAFGKRQGREFIWNDLLSLETGSLKLANGRVIEKTLYNRRTRQDEPALFVALTFERREVLDSSNIKPMNLIGVDRGENIPAVIALTDPEGCPLSRFKDSLGNPTHILRIGESYKEKQRTIQAKKEVEQRRAGGYSRKYASKAKNLADDMVRNTARDLLYYAVTQDAMLIFENLSRGFGRQGKRTFMAERQYTRMEDWLTAKLAYNGLPSKTYLSKTLAQYTSKTCSNCGFTITSADYDRMLEKLKKTATGWMTTINGKELKVEGQITYYNRYKRQNVVKDLSVELDRLSEESVNNDISSWTKGRSGEALSLLKKRFSHRPVQEKFVCLNCGFETHADEQAALNIARSWLFLRSQEYKKYQTNKTTGNTDKRAFVETWQSFYRKKLKEVWKPAV

SEQ ID NO: 47387 - protein, 978 aa, synthetic construct
  REGION 1..978: note = engineered CasX variant
QEIKRINKIRRRLVKDSNTKKAGKTGPMKTLLVRVMTPDLRERLENLRKKPENIPQPISNTSRANLNKLLTDYTEMKKAILHVYWEEFQKDPVGLMSRVAQPASKKIDQNKLKPEMDEKGNLTTAGFACSQCGQPLFVYKLEQVSEKGKAYTNYFGRCNVAEHEKLILLAQLKPEKDSDEAVTYSLGKFGQRALDFYSIHVTKESTHPVKPLAQIAGNRYASTPVGKALSDACMGTIASFLSKYQDIIIEHQKVVKGNQKRLESLRELAGKENLEYPSVTLPPQPHTKEGVDAYNEVIARVRMWVNLNLWQKLKLSRDDAKPLLRLKGFPSFPLVERQANEVDWWDMVCNVKKLINEKKEDGKVFWQNLAGYKRQEALRPYLSSEEDRKKGKKFARYQLGDLLLHLEKKHGEDWGKVYDEAWERIDKKVEGLSKHIKLEEERRSEDAQSKAALTDWLRAKASFVIEGLKEADKDEFCRCELKLQKWYGDLRGKPFAIEAENSILDISGFSKQYNCAFIWQKDGVKKLNLYLIINYFKGGKLRFKKIKPEAFEANRFYTVINKKSGEIVPMEVNFNFDDPNLIILPLAFGKRQGREFIWNDLLSLETGSLKLANGRVIEKTLYNRRTRQDEPALFVALTFERREVLDSSNIKPMNLIGVDRGENIPAVIALTDPEGCPLSRFKDSLGNPTHILRIGESYKEKQRTIQAKKEVEQRRAGGYSRKYASKAKNLADDMVRNTARDLLYYAVTQDAMLIFENLSRGFGRQGKRTFMAERQYTRMEDWLTAKLAYNGLPSKTYLSKTLAQYTSKTCSNCGFTITSADYDRMLEKLKKTATGWMTTINGKELKVEGQITYYNRYKRQNVVKDLSVELDRLSEESVNNDISSWTKGRSGEALSLLKKRFSHRPVQEKFVCLNCGFETHADEQAALNIARSWLFLRSQEYKKYQTNKTTGNTDKRAFVETWQSFYRKKLKEVWKPAV

SEQ ID NO: 47388 - protein, 978 aa, synthetic construct
  REGION 1..978: note = engineered CasX variant
QEIKRINKIRRRLVKDSNTKKAGKTGPMKTLLVRVMTPDLRERLENLRKKPENIPQPISNTSRANLNKLLTDYTEMKKAILHVYWEEFQKDPVGLMSRVAQPASKKIDQNKLKPEMDEKGNLTTAGFACSQCGQPLFVYKLEQVSEKGKAYTNYFGRCNVAEHEKLILLAQLKPEKDSDEAVTYSLGKFGQRALDFYSIHVTKESTHPVKPLAQIAGNRYASAPVGKALSDACMGTIASFLSKYQDIIIEHQKVVKGNQKRLESLRELAGKENLEYPSVTLPPQPHTKEGVDAYNEVIARVRMWVNLNLWQKLKLSRDDAKPLLRLKGFPSFPLVERQANEVDWWDMVCNVKKLINEKKEDGKVFWQNLAGYKRQEALRPYLSSEEDRKKGKKFARYQLGDLLLHLEKKHGEDWGKVYDEAWERIDKKVEGLSKHIKLEEERRSEDAQSKAALTDWLRAKASFVIEGLKEADKDEFCRCELKLQKWYGDLRGKPFAIEAENSILDISGFSKQYNCAFIWQKDGVKKLNLYLIINYFKGGKLRFKKIKPEAFEANRFYTVINKKSGEIVPMEVNFNFDDPNLIILPLAFGKRQGREFIWNDLLSLETGSLKLANGRVIEKTLYNRRTRQDEPALFVALTFERREVLDSSNIKPMNLIGVDRGENIPAVIALTDPEGCPLSRFKDSLGNPTHILRIGESYKEKQRTIQAKKEVEQRRAGGYSRKYASKAKNLADDMVRNTARDLLYYAVTQDAMLIFENLSRGFGRQGKRTFMAERQYTRMEDWLTAKLAYNGLPSKTYLSKTLAQYTSKTCSNCGFTITSADYDRMLEKLKKTATGWMTTINGKELKVEGQITYYNRYKRQNVVKDLSVELDRLSEESVNNDISSWTKGRSGEALSLLKKRFSHRPVQEKFVCLNCGFETHADEQAALNIARSWLFLRSQEYKKYQTNKTTGNTDKRAFVETWQSFYRKKLKEVWKPAV

SEQ ID NO: 47389 - protein, 978 aa, synthetic construct
  REGION 1..978: note = engineered CasX variant
QEIKRINKIRRRLVKDSNTKKAGKTGPMKTLLVRVMTPDLRERLENLRKKPENIPQPISNTSRANLNKLLTDYTEMKKAILHVYWEEFQKDPVGLMSRVAQPASKKIDQNKLKPEMDEKGNLTTAGFACSQCGQPLFVYKLEQVSEKGKAYTNYFGRCNVAEHEKLILLAQLKPEKDSDEAVTYSLGKFGQRALDFYSIHVTKESTHPVKPLAQIAGNRYASVPVGKALSDACMGTIASFLSKYQDIIIEHQKVVKGNQKRLESLRELAGKENLEYPSVTLPPQPHTKEGVDAYNEVIARVRMWVNLNLWQKLKLSRDDAKPLLRLKGFPSFPLVERQANEVDWWDMVCNVKKLINEKKEDGKVFWQNLAGYKRQEALRPYLSSEEDRKKGKKFARYQLGDLLLHLEKKHGEDWGKVYDEAWERIDKKVEGLSKHIKLEEERRSEDAQSKAALTDWLRAKASFVIEGLKEADKDEFCRCELKLQKWYGDLRGKPFAIEAENSILDISGFSKQYNCAFIWQKDGVKKLNLYLIINYFKGGKLRFKKIKPEAFEANRFYTVINKKSGEIVPMEVNFNFDDPNLIILPLAFGKRQGREFIWNDLLSLETGSLKLANGRVIEKTLYNRRTRQDEPALFVALTFERREVLDSSNIKPMNLIGVDRGENIPAVIALTDPEGCPLSRFKDSLGNPTHILRIGESYKEKQRTIQAKKEVEQRRAGGYSRKYASKAKNLADDMVRNTARDLLYYAVTQDAMLIFENLSRGFGRQGKRTFMAERQYTRMEDWLTAKLAYNGLPSKTYLSKTLAQYTSKTCSNCGFTITSADYDRMLEKLKKTATGWMTTINGKELKVEGQITYYNRYKRQNVVKDLSVELDRLSEESVNNDISSWTKGRSGEALSLLKKRFSHRPVQEKFVCLNCGFETHADEQAALNIARSWLFLRSQEYKKYQTNKTTGNTDKRAFVETWQSFYRKKLKEVWKPAV

SEQ ID NO: 47390 - protein, 978 aa, synthetic construct
  REGION 1..978: note = engineered CasX variant
QEIKRINKIRRRLVKDSNTKKAGKTGPMKTLLVRVMTPDLRERLENLRKKPENIPQPISNTSRANLNKLLTDYTEMKKAILHVYWEEFQKDPVGLMSRVAQPASKKIDQNKLKPEMDEKGNLTTAGFACSQCGQPLFVYKLEQVSEKGKAYTNYFGRCNVAEHEKLIKLAQLKPEKDSDEAVTYSLGKFGQRALDFYSIHVTKESTHPVKPLAQIAGNRYASGPVGKALSDACMGTIASFLSKYQDIIIEHQKVVKGNQKRLESLRELAGKENLEYPSVTLPPQPHTKEGVDAYNEVIARVRMWVNLNLWQKLKLSRDDAKPLLRLKGFPSFPLVERQANEVDWWDMVCNVKKLINEKKEDGKVFWQNLAGYKRQEALRPYLSSEEDRKKGKKFARYQLGDLLLHLEKKHGEDWGKVYDEAWERIDKKVEGLSKHIKLEEERRSEDAQSKAALTDWLRAKASFVIEGLKEADKDEFCRCELKLQKWYGDLRGKPFAIEAENSILDISGFSKQYNCAFIWQKDGVKKLNLYLIINYFKGGKLRFKKIKPEAFEANRFYTVINKKSGEIVPMEVNFNFDDPNLIILPLAFGKRQGREFIWNDLLSLETGSLKLANGRVIEKTLYNRRTRQDEPALFVALTFERREVLDSSNIKPMNLIGVDRGENIPAVIALTDPEGCPLSRFKDSLGNPTHILRIGESYKEKQRTIQAKKEVEQRRAGGYSRKYASKAKNLADDMVRNTARDLLYYAVTQDAMLIFENLSRGFGRQGKRTFMAERQYTRMEDWLTAKLAYNGLPSKTYLSKTLAQYTSKTCSNCGFTITSADYDRMLEKLKKTATGWMTTINGKELKVEGQITYYNRYKRQNVVKDLSVELDRLSEESVNNDISSWTKGRSGEALSLLKKRFSHRPVQEKFVCLNCGFETHADEQAALNIARSWLFLRSQEYKKYQTNKTTGNTDKRAFVETWQSFYRKKLKEVWKPAV

SEQ ID NO: 47391 - protein, 977 aa, synthetic construct
  REGION 1..977: note = engineered CasX variant
QEIKRINKIRRRLVKDSNTKKAGKTGPMKTLLVRVMTPDLRERLENLRKKPENIPQPISNTSRANLNKLLTDYTEMKKAILHVYWEEFQKDPVGLMSRVAQPASKKIDQNKLKPEMDEKGNLTTAGFACSQCGQPLFVYKLEQVSEKGKAYTNYFGRCNVAEHEKLILLAQLKPEKDSDEAVTYSLGKFGQRALDFYSIHVTKESTHPVKPLAQIAGNRYASPVGKALSDACMGTIASFLSKYQDIIIEHQKVVKGNQKRLESLRELAGKENLEYPSVTLPPQPHTKEGVDAYNEVIARVRMWVNLNLWQKLKLSRDDAKPLLRLKGFPSFPLVERQANEVDWWDMVCNVKKLINEKKEDGKVFWQNLAGYKRQEALRPYLSSEEDRKKGKKFARYQLGDLLLHLEKKHGEDWGKVYDEAWERIDKKVEGLSKHIKLEEERRSEDAQSKAALTDWLRAKASFVIEGLKEADKDEFCRCELKLQKWYGDLRGKPFAIEAENSILDISGFSKQYNCAFIWQKDGVKKLNLYLIINYFKGGKLRFKKIKPEAFEANRFYTVINKKSGEIVPMEVNFNFDDPNLIILPLAFGKRQGREFIWNDLLSLETGSLKLANGRVIEKTLYNRRTRQDEPALFVALTFERREVLDSSNIKPMNLIGVDRGENIPAVIALTDPEGCPLSRFKDSLGNPTHILRIGESYKEKQRTIQAKKEVEQRRAGGYSRKYASKAKNLADDMVRNTARDLLYYAVTQDAMLIFENLSRGFGRQGKRTFMAERQYTRMEDWLTAKLAYNGLPSKTYLSKTLAQYTSKTCSNCGFTITSADYDRMLEKLKKTATGWMTTINGKELKVEGQITYYNRYKRQNVVKDLSVELDRLSEESVNNDISSWTKGRSGEALSLLKKRFSHRPVQEKFVCLNCGFETHADEQAALNIARSWLFLRSQEYKKYQTNKTTGNTDKRAFVETWQSFYRKKLKEVWKPAV

SEQ ID NO: 47392 - protein, 978 aa, synthetic construct
  REGION 1..978: note = engineered CasX variant
QEIKRINKIRRRLVKDSNTKKAGKTGPMKTLLVRVMTPDLRERLENLRKKPENIPQPISNTSRANLNKLLTDYTEMKKAILHVYWEEFQKDPVGLMSRVAQPASKKIDQNKLKPEMDEKGNLTTAGFACSQCGQPLFVYKLEQVSEKGKAYTNYFGRCNVAEHEKLIQLAQLKPEKDSDEAVTYSLGKFGQRALDFYSIHVTKESTHPVKPLAQIAGNRYASYPVGKALSDACMGTIASFLSKYQDIIIEHQKVVKGNQKRLESLRELAGKENLEYPSVTLPPQPHTKEGVDAYNEVIARVRMWVNLNLWQKLKLSRDDAKPLLRLKGFPSFPLVERQANEVDWWDMVCNVKKLINEKKEDGKVFWQNLAGYKRQEALRPYLSSEEDRKKGKKFARYQLGDLLLHLEKKHGEDWGKVYDEAWERIDKKVEGLSKHIKLEEERRSEDAQSKAALTDWLRAKASFVIEGLKEADKDEFCRCELKLQKWYGDLRGKPFAIEAENSILDISGFSKQYNCAFIWQKDGVKKLNLYLIINYFKGGKLRFKKIKPEAFEANRFYTVINKKSGEIVPMEVNFNFDDPNLIILPLAFGKRQGREFIWNDLLSLETGSLKLANGRVIEKTLYNRRTRQDEPALFVALTFERREVLDSSNIKPMNLIGVDRGENIPAVIALTDPEGCPLSRFKDSLGNPTHILRIGESYKEKQRTIQAKKEVEQRRAGGYSRKYASKAKNLADDMVRNTARDLLYYAVTQDAMLIFENLSRGFGRQGKRTFMAERQYTRMEDWLTAKLAYEGLPSKTYLSKTLAQYTSKTCSNCGFTITSADYDRMLEKLKKTATGWMTTINGKELKVEGQITYYNRYKRQNVVKDLSVELDRLSEESVNNDISSWTKGRSGEALSLLKKRFSHRPVQEKFVCLNCGFETHADEQAALNIARSWLFLRSQEYKKYQTNKTTGNTDKRAFVETWQSFYRKKLKEVWKPAV

SEQ ID NO: 47393 - protein, 978 aa, synthetic construct
  REGION 1..978: note = engineered CasX variant
QEIKRINKIRRRLVKDSNTKKAGKTGPMKTLLVRVMTPDLRERLENLRKKPENIPQPISNTSRANLNKLLTDYTEMKKAILHVYWEEFQKDPVGLMSRVAQPASKKIDQNKLKPEMDEKGNLTTAGFACSQCGQPLFVYKLEQVSEKGKAYTNYFGRCNVAEHEKLIQLAQLKPEKDSDEAVTYSLGKFGQRALDFYSIHVTKESTHPVKPLAQIAGNRYASHPVGKALSDACMGTIASFLSKYQDIIIEHQKVVKGNQKRLESLRELAGKENLEYPSVTLPPQPHTKEGVDAYNEVIARVRMWVNLNLWQKLKLSRDDAKPLLRLKGFPSFPLVERQANEVDWWDMVCNVKKLINEKKEDGKVFWQNLAGYKRQEALRPYLSSEEDRKKGKKFARYQLGDLLLHLEKKHGEDWGKVYDEAWERIDKKVEGLSKHIKLEEERRSEDAQSKAALTDWLRAKASFVIEGLKEADKDEFCRCELKLQKWYGDLRGKPFAIEAENSILDISGFSKQYNCAFIWQKDGVKKLNLYLIINYFKGGKLRFKKIKPEAFEANRFYTVINKKSGEIVPMEVNFNFDDPNLIILPLAFGKRQGREFIWNDLLSLETGSLKLANGRVIEKTLYNRRTRQDEPALFVALTFERREVLDSSNIKPMNLIGVDRGENIPAVIALTDPEGCPLSRFKDSLGNPTHILRIGESYKEKQRTIQAKKEVEQRRAGGYSRKYASKAKNLADDMVRNTARDLLYYAVTQDAMLIFENLSRGFGRQGKRTFMAERQYTRMEDWLTAKLAYEGLPSKTYLSKTLAQYTSKTCSNCGFTITSADYDRMLEKLKKTATGWMTTINGKELKVEGQITYYNRYKRQNVVKDLSVELDRLSEESVNNDISSWTKGRSGEALSLLKKRFSHRPVQEKFVCLNCGFETHADEQAALNIARSWLFLRSQEYKKYQTNKTTGNTDKRAFVETWQSFYRKKLKEVWKPAV

SEQ ID NO: 47394 - protein, 978 aa, synthetic construct
  REGION 1..978: note = engineered CasX variant
QEIKRINKIRRRLVKDSNTKKAGKTGPMKTLLVRVMTPDLRERLENLRKKPENIPQPISNTSRANLNKLLTDYTEMKKAILHVYWEEFQKDPVGLMSRVAQPASKKIDQNKLKPEMDEKGNLTTAGFACSQCGQPLFVYKLEQVSEKGKAYTNYFGRCNVAEHEKLIQLAQLKPEKDSDEAVTYSLGKFGQRALDFYSIHVTKESTHPVKPLAQIAGNRYASSPVGKALSDACMGTIASFLSKYQDIIIEHQKVVKGNQKRLESLRELAGKENLEYPSVTLPPQPHTKEGVDAYNEVIARVRMWVNLNLWQKLKLSRDDAKPLLRLKGFPSFPLVERQANEVDWWDMVCNVKKLINEKKEDGKVFWQNLAGYKRQEALRPYLSSEEDRKKGKKFARYQLGDLLLHLEKKHGEDWGKVYDEAWERIDKKVEGLSKHIKLEEERRSEDAQSKAALTDWLRAKASFVIEGLKEADKDEFCRCELKLQKWYGDLRGKPFAIEAENSILDISGFSKQYNCAFIWQKDGVKKLNLYLIINYFKGGKLRFKKIKPEAFEANRFYTVINKKSGEIVPMEVNFNFDDPNLIILPLAFGKRQGREFIWNDLLSLETGSLKLANGRVIEKTLYNRRTRQDEPALFVALTFERREVLDSSNIKPMNLIGVDRGENIPAVIALTDPEGCPLSRFKDSLGNPTHILRIGESYKEKQRTIQAKKEVEQRRAGGYSRKYASKAKNLADDMVRNTARDLLYYAVTQDAMLIFENLSRGFGRQGKRTFMAERQYTRMEDWLTAKLAYEGLPSKTYLSKTLAQYTSKTCSNCGFTITSADYDRMLEKLKKTATGWMTTINGKELKVEGQITYYNRYKRQNVVKDLSVELDRLSEESVNNDISSWTKGRSGEALSLLKKRFSHRPVQEKFVCLNCGFETHADEQAALNIARSWLFLRSQEYKKYQTNKTTGNTDKRAFVETWQSFYRKKLKEVWKPAV

SEQ ID NO: 47395 - protein, 978 aa, synthetic construct
  REGION 1..978: note = engineered CasX variant
QEIKRINKIRRRLVKDSNTKKAGKTGPMKTLLVRVMTPDLRERLENLRKKPENIPQPISNTSRANLNKLLTDYTEMKKAILHVYWEEFQKDPVGLMSRVAQPASKKIDQNKLKPEMDEKGNLTTAGFACSQCGQPLFVYKLEQVSEKGKAYTNYFGRCNVAEHEKLIQLAQLKPEKDSDEAVTYSLGKFGQRALDFYSIHVTKESTHPVKPLAQIAGNRYASTPVGKALSDACMGTIASFLSKYQDIIIEHQKVVKGNQKRLESLRELAGKENLEYPSVTLPPQPHTKEGVDAYNEVIARVRMWVNLNLWQKLKLSRDDAKPLLRLKGFPSFPLVERQANEVDWWDMVCNVKKLINEKKEDGKVFWQNLAGYKRQEALRPYLSSEEDRKKGKKFARYQLGDLLLHLEKKHGEDWGKVYDEAWERIDKKVEGLSKHIKLEEERRSEDAQSKAALTDWLRAKASFVIEGLKEADKDEFCRCELKLQKWYGDLRGKPFAIEAENSILDISGFSKQYNCAFIWQKDGVKKLNLYLIINYFKGGKLRFKKIKPEAFEANRFYTVINKKSGEIVPMEVNFNFDDPNLIILPLAFGKRQGREFIWNDLLSLETGSLKLANGRVIEKTLYNRRTRQDEPALFVALTFERREVLDSSNIKPMNLIGVDRGENIPAVIALTDPEGCPLSRFKDSLGNPTHILRIGESYKEKQRTIQAKKEVEQRRAGGYSRKYASKAKNLADDMVRNTARDLLYYAVTQDAMLIFENLSRGFGRQGKRTFMAERQYTRMEDWLTAKLAYEGLPSKTYLSKTLAQYTSKTCSNCGFTITSADYDRMLEKLKKTATGWMTTINGKELKVEGQITYYNRYKRQNVVKDLSVELDRLSEESVNNDISSWTKGRSGEALSLLKKRFSHRPVQEKFVCLNCGFETHADEQAALNIARSWLFLRSQEYKKYQTNKTTGNTDKRAFVETWQSFYRKKLKEVWKPAV

SEQ ID NO: 47396 - protein, 978 aa, synthetic construct
  REGION 1..978: note = engineered CasX variant
QEIKRINKIRRRLVKDSNTKKAGKTGPMKTLLVRVMTPDLRERLENLRKKPENIPQPISNTSRANLNKLLTDYTEMKKAILHVYWEEFQKDPVGLMSRVAQPASKKIDQNKLKPEMDEKGNLTTAGFACSQCGQPLFVYKLEQVSEKGKAYTNYFGRCNVAEHEKLIQLAQLKPEKDSDEAVTYSLGKFGQRALDFYSIHVTKESTHPVKPLAQIAGNRYASAPVGKALSDACMGTIASFLSKYQDIIIEHQKVVKGNQKRLESLRELAGKENLEYPSVTLPPQPHTKEGVDAYNEVIARVRMWVNLNLWQKLKLSRDDAKPLLRLKGFPSFPLVERQANEVDWWDMVCNVKKLINEKKEDGKVFWQNLAGYKRQEALRPYLSSEEDRKKGKKFARYQLGDLLLHLEKKHGEDWGKVYDEAWERIDKKVEGLSKHIKLEEERRSEDAQSKAALTDWLRAKASFVIEGLKEADKDEFCRCELKLQKWYGDLRGKPFAIEAENSILDISGFSKQYNCAFIWQKDGVKKLNLYLIINYFKGGKLRFKKIKPEAFEANRFYTVINKKSGEIVPMEVNFNFDDPNLIILPLAFGKRQGREFIWNDLLSLETGSLKLANGRVIEKTLYNRRTRQDEPALFVALTFERREVLDSSNIKPMNLIGVDRGENIPAVIALTDPEGCPLSRFKDSLGNPTHILRIGESYKEKQRTIQAKKEVEQRRAGGYSRKYASKAKNLADDMVRNTARDLLYYAVTQDAMLIFENLSRGFGRQGKRTFMAERQYTRMEDWLTAKLAYEGLPSKTYLSKTLAQYTSKTCSNCGFTITSADYDRMLEKLKKTATGWMTTINGKELKVEGQITYYNRYKRQNVVKDLSVELDRLSEESVNNDISSWTKGRSGEALSLLKKRFSHRPVQEKFVCLNCGFETHADEQAALNIARSWLFLRSQEYKKYQTNKTTGNTDKRAFVETWQSFYRKKLKEVWKPAV

SEQ ID NO: 47397 - protein, 978 aa, synthetic construct
  REGION 1..978: note = engineered CasX variant
QEIKRINKIRRRLVKDSNTKKAGKTGPMKTLLVRVMTPDLRERLENLRKKPENIPQPISNTSRANLNKLLTDYTEMKKAILHVYWEEFQKDPVGLMSRVAQPASKKIDQNKLKPEMDEKGNLTTAGFACSQCGQPLFVYKLEQVSEKGKAYTNYFGRCNVAEHEKLIQLAQLKPEKDSDEAVTYSLGKFGQRALDFYSIHVTKESTHPVKPLAQIAGNRYASVPVGKALSDACMGTIASFLSKYQDIIIEHQKVVKGNQKRLESLRELAGKENLEYPSVTLPPQPHTKEGVDAYNEVIARVRMWVNLNLWQKLKLSRDDAKPLLRLKGFPSFPLVERQANEVDWWDMVCNVKKLINEKKEDGKVFWQNLAGYKRQEALRPYLSSEEDRKKGKKFARYQLGDLLLHLEKKHGEDWGKVYDEAWERIDKKVEGLSKHIKLEEERRSEDAQSKAALTDWLRAKASFVIEGLKEADKDEFCRCELKLQKWYGDLRGKPFAIEAENSILDISGFSKQYNCAFIWQKDGVKKLNLYLIINYFKGGKLRFKKIKPEAFEANRFYTVINKKSGEIVPMEVNFNFDDPNLIILPLAFGKRQGREFIWNDLLSLETGSLKLANGRVIEKTLYNRRTRQDEPALFVALTFERREVLDSSNIKPMNLIGVDRGENIPAVIALTDPEGCPLSRFKDSLGNPTHILRIGESYKEKQRTIQAKKEVEQRRAGGYSRKYASKAKNLADDMVRNTARDLLYYAVTQDAMLIFENLSRGFGRQGKRTFMAERQYTRMEDWLTAKLAYEGLPSKTYLSKTLAQYTSKTCSNCGFTITSADYDRMLEKLKKTATGWMTTINGKELKVEGQITYYNRYKRQNVVKDLSVELDRLSEESVNNDISSWTKGRSGEALSLLKKRFSHRPVQEKFVCLNCGFETHADEQAALNIARSWLFLRSQEYKKYQTNKTTGNTDKRAFVETWQSFYRKKLKEVWKPAV

SEQ ID NO: 47398 - protein, 979 aa, synthetic construct
  REGION 1..979: note = engineered CasX variant
QEIKRINKIRRRLVKDSNTKKAGKTGPMKTLLVRVMTPDLRERLENLRKKPENIPQPISNTSRANLNKLLTDYTEMKKAILHVYWEEFQKDPVGLMSRVAQPASKKIDQNKLKPEMDEKGNLTTAGFACSQCGQPLFVYKLEQVSEKGKAYTNYFGRCNVAEHEKLIQKLAQLKPEKDSDEAVTYSLGKFGQRALDFYSIHVTKESTHPVKPLAQIAGNRYASGPVGKALSDACMGTIASFLSKYQDIIIEHQKVVKGNQKRLESLRELAGKENLEYPSVTLPPQPHTKEGVDAYNEVIARVRMWVNLNLWQKLKLSRDDAKPLLRLKGFPSFPLVERQANEVDWWDMVCNVKKLINEKKEDGKVFWQNLAGYKRQEALRPYLSSEEDRKKGKKFARYQLGDLLLHLEKKHGEDWGKVYDEAWERIDKKVEGLSKHIKLEEERRSEDAQSKAALTDWLRAKASFVIEGLKEADKDEFCRCELKLQKWYGDLRGKPFAIEAENSILDISGFSKQYNCAFIWQKDGVKKLNLYLIINYFKGGKLRFKKIKPEAFEANRFYTVINKKSGEIVPMEVNFNFDDPNLIILPLAFGKRQGREFIWNDLLSLETGSLKLANGRVIEKTLYNRRTRQDEPALFVALTFERREVLDSSNIKPMNLIGVDRGENIPAVIALTDPEGCPLSRFKDSLGNPTHILRIGESYKEKQRTIQAKKEVEQRRAGGYSRKYASKAKNLADDMVRNTARDLLYYAVTQDAMLIFENLSRGFGRQGKRTFMAERQYTRMEDWLTAKLAYEGLPSKTYLSKTLAQYTSKTCSNCGFTITSADYDRMLEKLKKTATGWMTTINGKELKVEGQITYYNRYKRQNVVKDLSVELDRLSEESVNNDISSWTKGRSGEALSLLKKRFSHRPVQEKFVCLNCGFETHADEQAALNIARSWLFLRSQEYKKYQTNKTTGNTDKRAFVETWQSFYRKKLKEVWKPAV

SEQ ID NO: 47399 - protein, 977 aa, synthetic construct
  REGION 1..977: note = engineered CasX variant
QEIKRINKIRRRLVKDSNTKKAGKTGPMKTLLVRVMTPDLRERLENLRKKPENIPQPISNTSRANLNKLLTDYTEMKKAILHVYWEEFQKDPVGLMSRVAQPASKKIDQNKLKPEMDEKGNLTTAGFACSQCGQPLFVYKLEQVSEKGKAYTNYFGRCNVAEHEKLIQLAQLKPEKDSDEAVTYSLGKFGQRALDFYSIHVTKESTHPVKPLAQIAGNRYASPVGKALSDACMGTIASFLSKYQDIIIEHQKVVKGNQKRLESLRELAGKENLEYPSVTLPPQPHTKEGVDAYNEVIARVRMWVNLNLWQKLKLSRDDAKPLLRLKGFPSFPLVERQANEVDWWDMVCNVKKLINEKKEDGKVFWQNLAGYKRQEALRPYLSSEEDRKKGKKFARYQLGDLLLHLEKKHGEDWGKVYDEAWERIDKKVEGLSKHIKLEEERRSEDAQSKAALTDWLRAKASFVIEGLKEADKDEFCRCELKLQKWYGDLRGKPFAIEAENSILDISGFSKQYNCAFIWQKDGVKKLNLYLIINYFKGGKLRFKKIKPEAFEANRFYTVINKKSGEIVPMEVNFNFDDPNLIILPLAFGKRQGREFIWNDLLSLETGSLKLANGRVIEKTLYNRRTRQDEPALFVALTFERREVLDSSNIKPMNLIGVDRGENIPAVIALTDPEGCPLSRFKDSLGNPTHILRIGESYKEKQRTIQAKKEVEQRRAGGYSRKYASKAKNLADDMVRNTARDLLYYAVTQDAMLIFENLSRGFGRQGKRTFMAERQYTRMEDWLTAKLAYEGLPSKTYLSKTLAQYTSKTCSNCGFTITSADYDRMLEKLKKTATGWMTTINGKELKVEGQITYYNRYKRQNVVKDLSVELDRLSEESVNNDISSWTKGRSGEALSLLKKRFSHRPVQEKFVCLNCGFETHADEQAALNIARSWLFLRSQEYKKYQTNKTTGNTDKRAFVETWQSFYRKKLKEVWKPAV

SEQ ID NO: 47400 - protein, 978 aa, synthetic construct
  REGION 1..978: note = engineered CasX variant
QEIKRINKIRRRLVKDSNTKKAGKTGPMKTLLVRVMTPDLRERLENLRKKPENIPQPISNTSRANLNKLLTDYTEMKKAILHVYWEEFQKDPVGLMSRVAQPASKKIDQNKLKPEMDEKGNLTTAGFACSQCGQPLFVYKLEQVSEKGKAYTNYFGRCNVAEHEKLILLAQLKPEKDSDEAVTYSLGKFGQRALDFYSIHVTKESTHPVKPLAQIAGNRYASYPVGKALSDACMGTIASFLSKYQDIIIEHQKVVKGNQKRLESLRELAGKENLEYPSVTLPPQPHTKEGVDAYNEVIARVRMWVNLNLWQKLKLSRDDAKPLLRLKGFPSFPLVERQANEVDWWDMVCNVKKLINEKKEDGKVFWQNLAIYKRQEALRPYLSSEEDRKKGKKFARYQLGDLLLHLEKKHGEDWGKVYDEAWERIDKKVEGLSKHIKLEEERRSEDAQSKAALTDWLRAKASFVIEGLKEADKDEFCRCELKLQKWYGDLRGKPFAIEAENSILDISGFSKQYNCAFIWQKDGVKKLNLYLIINYFKGGKLRFKKIKPEAFEANRFYTVINKKSGEIVPMEVNFNFDDPNLIILPLAFGKRQGREFIWNDLLSLETGSLKLANGRVIEKTLYNRRTRQDEPALFVALTFERREVLDSSNIKPMNLIGVDRGENIPAVIALTDPEGCPLSRFKDSLGNPTHILRIGESYKEKQRTIQAKKEVEQRRAGGYSRKYASKAKNLADDMVRNTARDLLYYAVTQDAMLIFENLSRGFGRQGKRTFMAERQYTRMEDWLTAKLAYEGLPSKTYLSKTLAQYTSKTCSNCGFTITSADYDRMLEKLKKTATGWMTTINGKELKVEGQITYYNRYKRQNVVKDLSVELDRLSEESVNNDISSWTKGRSGEALSLLKKRFSHRPVQEKFVCLNCGFETHADEQAALNIARSWLFLRSQEYKKYQTNKTTGNTDKRAFVETWQSFYRKKLKEVWKPAV

SEQ ID NO: 47401 - protein, 978 aa, synthetic construct
  REGION 1..978: note = engineered CasX variant
QEIKRINKIRRRLVKDSNTKKAGKTGPMKTLLVRVMTPDLRERLENLRKKPENIPQPISNTSRANLNKLLTDYTEMKKAILHVYWEEFQKDPVGLMSRVAQPASKKIDQNKLKPEMDEKGNLTTAGFACSQCGQPLFVYKLEQVSEKGKAYTNYFGRCNVAEHEKLILLAQLKPEKDSDEAVTYSLGKFGQRALDFYSIHVTKESTHPVKPLAQIAGNRYASHPVGKALSDACMGTIASFLSKYQDIIIEHQKVVKGNQKRLESLRELAGKENLEYPSVTLPPQPHTKEGVDAYNEVIARVRMWVNLNLWQKLKLSRDDAKPLLRLKGFPSFPLVERQANEVDWWDMVCNVKKLINEKKEDGKVFWQNLAIYKRQEALRPYLSSEEDRKKGKKFARYQLGDLLLHLEKKHGEDWGKVYDEAWERIDKKVEGLSKHIKLEEERRSEDAQSKAALTDWLRAKASFVIEGLKEADKDEFCRCELKLQKWYGDLRGKPFAIEAENSILDISGFSKQYNCAFIWQKDGVKKLNLYLIINYFKGGKLRFKKIKPEAFEANRFYTVINKKSGEIVPMEVNFNFDDPNLIILPLAFGKRQGREFIWNDLLSLETGSLKLANGRVIEKTLYNRRTRQDEPALFVALTFERREVLDSSNIKPMNLIGVDRGENIPAVIALTDPEGCPLSRFKDSLGNPTHILRIGESYKEKQRTIQAKKEVEQRRAGGYSRKYASKAKNLADDMVRNTARDLLYYAVTQDAMLIFENLSRGFGRQGKRTFMAERQYTRMEDWLTAKLAYEGLPSKTYLSKTLAQYTSKTCSNCGFTITSADYDRMLEKLKKTATGWMTTINGKELKVEGQITYYNRYKRQNVVKDLSVELDRLSEESVNNDISSWTKGRSGEALSLLKKRFSHRPVQEKFVCLNCGFETHADEQAALNIARSWLFLRSQEYKKYQTNKTTGNTDKRAFVETWQSFYRKKLKEVWKPAV

SEQ ID NO: 47402 - protein, 978 aa, synthetic construct
  REGION 1..978: note = engineered CasX variant
QEIKRINKIRRRLVKDSNTKKAGKTGPMKTLLVRVMTPDLRERLENLRKKPENIPQPISNTSRANLNKLLTDYTEMKKAILHVYWEEFQKDPVGLMSRVAQPASKKIDQNKLKPEMDEKGNLTTAGFACSQCGQPLFVYKLEQVSEKGKAYTNYFGRCNVAEHEKLILLAQLKPEKDSDEAVTYSLGKFGQRALDFYSIHVTKESTHPVKPLAQIAGNRYASSPVGKALSDACMGTIASFLSKYQDIIIEHQKVVKGNQKRLESLRELAGKENLEYPSVTLPPQPHTKEGVDAYNEVIARVRMWVNLNLWQKLKLSRDDAKPLLRLKGFPSFPLVERQANEVDWWDMVCNVKKLINEKKEDGKVFWQNLAIYKRQEALRPYLSSEEDRKKGKKFARYQLGDLLLHLEKKHGEDWGKVYDEAWERIDKKVEGLSKHIKLEEERRSEDAQSKAALTDWLRAKASFVIEGLKEADKDEFCRCELKLQKWYGDLRGKPFAIEAENSILDISGFSKQYNCAFIWQKDGVKKLNLYLIINYFKGGKLRFKKIKPEAFEANRFYTVINKKSGEIVPMEVNFNFDDPNLIILPLAFGKRQGREFIWNDLLSLETGSLKLANGRVIEKTLYNRRTRQDEPALFVALTFERREVLDSSNIKPMNLIGVDRGENIPAVIALTDPEGCPLSRFKDSLGNPTHILRIGESYKEKQRTIQAKKEVEQRRAGGYSRKYASKAKNLADDMVRNTARDLLYYAVTQDAMLIFENLSRGFGRQGKRTFMAERQYTRMEDWLTAKLAYEGLPSKTYLSKTLAQYTSKTCSNCGFTITSADYDRMLEKLKKTATGWMTTINGKELKVEGQITYYNRYKRQNVVKDLSVELDRLSEESVNNDISSWTKGRSGEALSLLKKRFSHRPVQEKFVCLNCGFETHADEQAALNIARSWLFLRSQEYKKYQTNKTTGNTDKRAFVETWQSFYRKKLKEVWKPAV

SEQ ID NO: 47403 - protein, 978 aa, synthetic construct
  REGION 1..978: note = engineered CasX variant
QEIKRINKIRRRLVKDSNTKKAGKTGPMKTLLVRVMTPDLRERLENLRKKPENIPQPISNTSRANLNKLLTDYTEMKKAILHVYWEEFQKDPVGLMSRVAQPASKKIDQNKLKPEMDEKGNLTTAGFACSQCGQPLFVYKLEQVSEKGKAYTNYFGRCNVAEHEKLILLAQLKPEKDSDEAVTYSLGKFGQRALDFYSIHVTKESTHPVKPLAQIAGNRYASTPVGKALSDACMGTIASFLSKYQDIIIEHQKVVKGNQKRLESLRELAGKENLEYPSVTLPPQPHTKEGVDAYNEVIARVRMWVNLNLWQKLKLSRDDAKPLLRLKGFPSFPLVERQANEVDWWDMVCNVKKLINEKKEDGKVFWQNLAIYKRQEALRPYLSSEEDRKKGKKFARYQLGDLLLHLEKKHGEDWGKVYDEAWERIDKKVEGLSKHIKLEEERRSEDAQSKAALTDWLRAKASFVIEGLKEADKDEFCRCELKLQKWYGDLRGKPFAIEAENSILDISGFSKQYNCAFIWQKDGVKKLNLYLIINYFKGGKLRFKKIKPEAFEANRFYTVINKKSGEIVPMEVNFNFDDPNLIILPLAFGKRQGREFIWNDLLSLETGSLKLANGRVIEKTLYNRRTRQDEPALFVALTFERREVLDSSNIKPMNLIGVDRGENIPAVIALTDPEGCPLSRFKDSLGNPTHILRIGESYKEKQRTIQAKKEVEQRRAGGYSRKYASKAKNLADDMVRNTARDLLYYAVTQDAMLIFENLSRGFGRQGKRTFMAERQYTRMEDWLTAKLAYEGLPSKTYLSKTLAQYTSKTCSNCGFTITSADYDRMLEKLKKTATGWMTTINGKELKVEGQITYYNRYKRQNVVKDLSVELDRLSEESVNNDISSWTKGRSGEALSLLKKRFSHRPVQEKFVCLNCGFETHADEQAALNIARSWLFLRSQEYKKYQTNKTTGNTDKRAFVETWQSFYRKKLKEVWKPAV

SEQ ID NO: 47404 - protein, 978 aa, synthetic construct
  REGION 1..978: note = engineered CasX variant
QEIKRINKIRRRLVKDSNTKKAGKTGPMKTLLVRVMTPDLRERLENLRKKPENIPQPISNTSRANLNKLLTDYTEMKKAILHVYWEEFQKDPVGLMSRVAQPASKKIDQNKLKPEMDEKGNLTTAGFACSQCGQPLFVYKLEQVSEKGKAYTNYFGRCNVAEHEKLILLAQLKPEKDSDEAVTYSLGKFGQRALDFYSIHVTKESTHPVKPLAQIAGNRYASAPVGKALSDACMGTIASFLSKYQDIIIEHQKVVKGNQKRLESLRELAGKENLEYPSVTLPPQPHTKEGVDAYNEVIARVRMWVNLNLWQKLKLSRDDAKPLLRLKGFPSFPLVERQANEVDWWDMVCNVKKLINEKKEDGKVFWQNLAIYKRQEALRPYLSSEEDRKKGKKFARYQLGDLLLHLEKKHGEDWGKVYDEAWERIDKKVEGLSKHIKLEEERRSEDAQSKAALTDWLRAKASFVIEGLKEADKDEFCRCELKLQKWYGDLRGKPFAIEAENSILDISGFSKQYNCAFIWQKDGVKKLNLYLIINYFKGGKLRFKKIKPEAFEANRFYTVINKKSGEIVPMEVNFNFDDPNLIILPLAFGKRQGREFIWNDLLSLETGSLKLANGRVIEKTLYNRRTRQDEPALFVALTFERREVLDSSNIKPMNLIGVDRGENIPAVIALTDPEGCPLSRFKDSLGNPTHILRIGESYKEKQRTIQAKKEVEQRRAGGYSRKYASKAKNLADDMVRNTARDLLYYAVTQDAMLIFENLSRGFGRQGKRTFMAERQYTRMEDWLTAKLAYEGLPSKTYLSKTLAQYTSKTCSNCGFTITSADYDRMLEKLKKTATGWMTTINGKELKVEGQITYYNRYKRQNVVKDLSVELDRLSEESVNNDISSWTKGRSGEALSLLKKRFSHRPVQEKFVCLNCGFETHADEQAALNIARSWLFLRSQEYKKYQTNKTTGNTDKRAFVETWQSFYRKKLKEVWKPAV

SEQ ID NO: 47405 - protein, 978 aa, synthetic construct
  REGION 1..978: note = engineered CasX variant
QEIKRINKIRRRLVKDSNTKKAGKTGPMKTLLVRVMTPDLRERLENLRKKPENIPQPISNTSRANLNKLLTDYTEMKKAILHVYWEEFQKDPVGLMSRVAQPASKKIDQNKLKPEMDEKGNLTTAGFACSQCGQPLFVYKLEQVSEKGKAYTNYFGRCNVAEHEKLILLAQLKPEKDSDEAVTYSLGKFGQRALDFYSIHVTKESTHPVKPLAQIAGNRYASVPVGKALSDACMGTIASFLSKYQDIIIEHQKVVKGNQKRLESLRELAGKENLEYPSVTLPPQPHTKEGVDAYNEVIARVRMWVNLNLWQKLKLSRDDAKPLLRLKGFPSFPLVERQANEVDWWDMVCNVKKLINEKKEDGKVFWQNLAIYKRQEALRPYLSSEEDRKKGKKFARYQLGDLLLHLEKKHGEDWGKVYDEAWERIDKKVEGLSKHIKLEEERRSEDAQSKAALTDWLRAKASFVIEGLKEADKDEFCRCELKLQKWYGDLRGKPFAIEAENSILDISGFSKQYNCAFIWQKDGVKKLNLYLIINYFKGGKLRFKKIKPEAFEANRFYTVINKKSGEIVPMEVNFNFDDPNLIILPLAFGKRQGREFIWNDLLSLETGSLKLANGRVIEKTLYNRRTRQDEPALFVALTFERREVLDSSNIKPMNLIGVDRGENIPAVIALTDPEGCPLSRFKDSLGNPTHILRIGESYKEKQRTIQAKKEVEQRRAGGYSRKYASKAKNLADDMVRNTARDLLYYAVTQDAMLIFENLSRGFGRQGKRTFMAERQYTRMEDWLTAKLAYEGLPSKTYLSKTLAQYTSKTCSNCGFTITSADYDRMLEKLKKTATGWMTTINGKELKVEGQITYYNRYKRQNVVKDLSVELDRLSEESVNNDISSWTKGRSGEALSLLKKRFSHRPVQEKFVCLNCGFETHADEQAALNIARSWLFLRSQEYKKYQTNKTTGNTDKRAFVETWQSFYRKKLKEVWKPAV

SEQ ID NO: 47406 - protein, 978 aa, synthetic construct
  REGION 1..978: note = engineered CasX variant
QEIKRINKIRRRLVKDSNTKKAGKTGPMKTLLVRVMTPDLRERLENLRKKPENIPQPISNTSRANLNKLLTDYTEMKKAILHVYWEEFQKDPVGLMSRVAQPASKKIDQNKLKPEMDEKGNLTTAGFACSQCGQPLFVYKLEQVSEKGKAYTNYFGRCNVAEHEKLIKLAQLKPEKDSDEAVTYSLGKFGQRALDFYSIHVTKESTHPVKPLAQIAGNRYASGPVGKALSDACMGTIASFLSKYQDIIIEHQKVVKGNQKRLESLRELAGKENLEYPSVTLPPQPHTKEGVDAYNEVIARVRMWVNLNLWQKLKLSRDDAKPLLRLKGFPSFPLVERQANEVDWWDMVCNVKKLINEKKEDGKVFWQNLAIYKRQEALRPYLSSEEDRKKGKKFARYQLGDLLLHLEKKHGEDWGKVYDEAWERIDKKVEGLSKHIKLEEERRSEDAQSKAALTDWLRAKASFVIEGLKEADKDEFCRCELKLQKWYGDLRGKPFAIEAENSILDISGFSKQYNCAFIWQKDGVKKLNLYLIINYFKGGKLRFKKIKPEAFEANRFYTVINKKSGEIVPMEVNFNFDDPNLIILPLAFGKRQGREFIWNDLLSLETGSLKLANGRVIEKTLYNRRTRQDEPALFVALTFERREVLDSSNIKPMNLIGVDRGENIPAVIALTDPEGCPLSRFKDSLGNPTHILRIGESYKEKQRTIQAKKEVEQRRAGGYSRKYASKAKNLADDMVRNTARDLLYYAVTQDAMLIFENLSRGFGRQGKRTFMAERQYTRMEDWLTAKLAYEGLPSKTYLSKTLAQYTSKTCSNCGFTITSADYDRMLEKLKKTATGWMTTINGKELKVEGQITYYNRYKRQNVVKDLSVELDRLSEESVNNDISSWTKGRSGEALSLLKKRFSHRPVQEKFVCLNCGFETHADEQAALNIARSWLFLRSQEYKKYQTNKTTGNTDKRAFVETWQSFYRKKLKEVWKPAV

SEQ ID NO: 47407 - protein, 977 aa, synthetic construct
  REGION 1..977: note = engineered CasX variant
QEIKRINKIRRRLVKDSNTKKAGKTGPMKTLLVRVMTPDLRERLENLRKKPENIPQPISNTSRANLNKLLTDYTEMKKAILHVYWEEFQKDPVGLMSRVAQPASKKIDQNKLKPEMDEKGNLTTAGFACSQCGQPLFVYKLEQVSEKGKAYTNYFGRCNVAEHEKLILLAQLKPEKDSDEAVTYSLGKFGQRALDFYSIHVTKESTHPVKPLAQIAGNRYASPVGKALSDACMGTIASFLSKYQDIIIEHQKVVKGNQKRLESLRELAGKENLEYPSVTLPPQPHTKEGVDAYNEVIARVRMWVNLNLWQKLKLSRDDAKPLLRLKGFPSFPLVERQANEVDWWDMVCNVKKLINEKKEDGKVFWQNLAIYKRQEALRPYLSSEEDRKKGKKFARYQLGDLLLHLEKKHGEDWGKVYDEAWERIDKKVEGLSKHIKLEEERRSEDAQSKAALTDWLRAKASFVIEGLKEADKDEFCRCELKLQKWYGDLRGKPFAIEAENSILDISGFSKQYNCAFIWQKDGVKKLNLYLIINYFKGGKLRFKKIKPEAFEANRFYTVINKKSGEIVPMEVNFNFDDPNLIILPLAFGKRQGREFIWNDLLSLETGSLKLANGRVIEKTLYNRRTRQDEPALFVALTFERREVLDSSNIKPMNLIGVDRGENIPAVIALTDPEGCPLSRFKDSLGNPTHILRIGESYKEKQRTIQAKKEVEQRRAGGYSRKYASKAKNLADDMVRNTARDLLYYAVTQDAMLIFENLSRGFGRQGKRTFMAERQYTRMEDWLTAKLAYEGLPSKTYLSKTLAQYTSKTCSNCGFTITSADYDRMLEKLKKTATGWMTTINGKELKVEGQITYYNRYKRQNVVKDLSVELDRLSEESVNNDISSWTKGRSGEALSLLKKRFSHRPVQEKFVCLNCGFETHADEQAALNIARSWLFLRSQEYKKYQTNKTTGNTDKRAFVETWQSFYRKKLKEVWKPAV

SEQ ID NO: 47408 - protein, 978 aa, synthetic construct
  REGION 1..978: note = engineered CasX variant
QEIKRINKIRRRLVKDSNTKKAGKTGPMKTLLVRVMTPDLRERLENLRKKPENIPQPISNTSRANLNKLLTDYTEMKKAILHVYWEEFQKDPVGLMSRVAQPASKKIDQNKLKPEMDEKGNLTTAGFACSQCGQPLFVYKLEQVSEKGKAYTNYFGRCNVAEHEKLILLAQLKPEKDSDEAVTYSLGKFGQRALDFYSIHVTKESTHPVKPLAQIAGNRYASYPVGKALSDACMGTIASFLSKYQDIIIEHQKVVKGNQKRLESLRELAGKENLEYPSVTLPPQPHTKEGVDAYNEVIARVRMWVNLNLWQKLKLSRDDAKPLLRLKGFPSFPLVERQANEVDWWDMVCNVKKLINEKKEDGKVFWQNLAGYKRQEALRPYLSSEEDREKGKKFARYQLGDLLLHLEKKHGEDWGKVYDEAWERIDKKVEGLSKHIKLEEERRSEDAQSKAALTDWLRAKASFVIEGLKEADKDEFCRCELKLQKWYGDLRGKPFAIEAENSILDISGFSKQYNCAFIWQKDGVKKLNLYLIINYFKGGKLRFKKIKPEAFEANRFYTVINKKSGEIVPMEVNFNFDDPNLIILPLAFGKRQGREFIWNDLLSLETGSLKLANGRVIEKTLYNRRTRQDEPALFVALTFERREVLDSSNIKPMNLIGVDRGENIPAVIALTDPEGCPLSRFKDSLGNPTHILRIGESYKEKQRTIQAKKEVEQRRAGGYSRKYASKAKNLADDMVRNTARDLLYYAVTQDAMLIFENLSRGFGRQGKRTFMAERQYTRMEDWLTAKLAYEGLPSKTYLSKTLAQYTSKTCSNCGFTITSADYDRMLEKLKKTATGWMTTINGKELKVEGQITYYNRYKRQNVVKDLSVELDRLSEESVNNDISSWTKGRSGEALSLLKKRFSHRPVQEKFVCLNCGFETHADEQAALNIARSWLFLRSQEYKKYQTNKTTGNTDKRAFVETWQSFYRKKLKEVWKPAV

SEQ ID NO: 47409 - protein, 978 aa, synthetic construct
  REGION 1..978: note = engineered CasX variant
QEIKRINKIRRRLVKDSNTKKAGKTGPMKTLLVRVMTPDLRERLENLRKKPENIPQPISNTSRANLNKLLTDYTEMKKAILHVYWEEFQKDPVGLMSRVAQPASKKIDQNKLKPEMDEKGNLTTAGFACSQCGQPLFVYKLEQVSEKGKAYTNYFGRCNVAEHEKLILLAQLKPEKDSDEAVTYSLGKFGQRALDFYSIHVTKESTHPVKPLAQIAGNRYASHPVGKALSDACMGTIASFLSKYQDIIIEHQKVVKGNQKRLESLRELAGKENLEYPSVTLPPQPHTKEGVDAYNEVIARVRMWVNLNLWQKLKLSRDDAKPLLRLKGFPSFPLVERQANEVDWWDMVCNVKKLINEKKEDGKVFWQNLAGYKRQEALRPYLSSEEDREKGKKFARYQLGDLLLHLEKKHGEDWGKVYDEAWERIDKKVEGLSKHIKLEEERRSEDAQSKAALTDWLRAKASFVIEGLKEADKDEFCRCELKLQKWYGDLRGKPFAIEAENSILDISGFSKQYNCAFIWQKDGVKKLNLYLIINYFKGGKLRFKKIKPEAFEANRFYTVINKKSGEIVPMEVNFNFDDPNLIILPLAFGKRQGREFIWNDLLSLETGSLKLANGRVIEKTLYNRRTRQDEPALFVALTFERREVLDSSNIKPMNLIGVDRGENIPAVIALTDPEGCPLSRFKDSLGNPTHILRIGESYKEKQRTIQAKKEVEQRRAGGYSRKYASKAKNLADDMVRNTARDLLYYAVTQDAMLIFENLSRGFGRQGKRTFMAERQYTRMEDWLTAKLAYEGLPSKTYLSKTLAQYTSKTCSNCGFTITSADYDRMLEKLKKTATGWMTTINGKELKVEGQITYYNRYKRQNVVKDLSVELDRLSEESVNNDISSWTKGRSGEALSLLKKRFSHRPVQEKFVCLNCGFETHADEQAALNIARSWLFLRSQEYKKYQTNKTTGNTDKRAFVETWQSFYRKKLKEVWKPAV

SEQ ID NO: 47410 - protein, 978 aa, synthetic construct
  REGION 1..978: note = engineered CasX variant
QEIKRINKIRRRLVKDSNTKKAGKTGPMKTLLVRVMTPDLRERLENLRKKPENIPQPISNTSRANLNKLLTDYTEMKKAILHVYWEEFQKDPVGLMSRVAQPASKKIDQNKLKPEMDEKGNLTTAGFACSQCGQPLFVYKLEQVSEKGKAYTNYFGRCNVAEHEKLILLAQLKPEKDSDEAVTYSLGKFGQRALDFYSIHVTKESTHPVKPLAQIAGNRYASSPVGKALSDACMGTIASFLSKYQDIIIEHQKVVKGNQKRLESLRELAGKENLEYPSVTLPPQPHTKEGVDAYNEVIARVRMWVNLNLWQKLKLSRDDAKPLLRLKGFPSFPLVERQANEVDWWDMVCNVKKLINEKKEDGKVFWQNLAGYKRQEALRPYLSSEEDREKGKKFARYQLGDLLLHLEKKHGEDWGKVYDEAWERIDKKVEGLSKHIKLEEERRSEDAQSKAALTDWLRAKASFVIEGLKEADKDEFCRCELKLQKWYGDLRGKPFAIEAENSILDISGFSKQYNCAFIWQKDGVKKLNLYLIINYFKGGKLRFKKIKPEAFEANRFYTVINKKSGEIVPMEVNFNFDDPNLIILPLAFGKRQGREFIWNDLLSLETGSLKLANGRVIEKTLYNRRTRQDEPALFVALTFERREVLDSSNIKPMNLIGVDRGENIPAVIALTDPEGCPLSRFKDSLGNPTHILRIGESYKEKQRTIQAKKEVEQRRAGGYSRKYASKAKNLADDMVRNTARDLLYYAVTQDAMLIFENLSRGFGRQGKRTFMAERQYTRMEDWLTAKLAYEGLPSKTYLSKTLAQYTSKTCSNCGFTITSADYDRMLEKLKKTATGWMTTINGKELKVEGQITYYNRYKRQNVVKDLSVELDRLSEESVNNDISSWTKGRSGEALSLLKKRFSHRPVQEKFVCLNCGFETHADEQAALNIARSWLFLRSQEYKKYQTNKTTGNTDKRAFVETWQSFYRKKLKEVWKPAV

SEQ ID NO: 47411 - protein, 978 aa, synthetic construct
  REGION 1..978: note = engineered CasX variant
QEIKRINKIRRRLVKDSNTKKAGKTGPMKTLLVRVMTPDLRERLENLRKKPENIPQPISNTSRANLNKLLTDYTEMKKAILHVYWEEFQKDPVGLMSRVAQPASKKIDQNKLKPEMDEKGNLTTAGFACSQCGQPLFVYKLEQVSEKGKAYTNYFGRCNVAEHEKLILLAQLKPEKDSDEAVTYSLGKFGQRALDFYSIHVTKESTHPVKPLAQIAGNRYASTPVGKALSDACMGTIASFLSKYQDIIIEHQKVVKGNQKRLESLRELAGKENLEYPSVTLPPQPHTKEGVDAYNEVIARVRMWVNLNLWQKLKLSRDDAKPLLRLKGFPSFPLVERQANEVDWWDMVCNVKKLINEKKEDGKVFWQNLAGYKRQEALRPYLSSEEDREKGKKFARYQLGDLLLHLEKKHGEDWGKVYDEAWERIDKKVEGLSKHIKLEEERRSEDAQSKAALTDWLRAKASFVIEGLKEADKDEFCRCELKLQKWYGDLRGKPFAIEAENSILDISGFSKQYNCAFIWQKDGVKKLNLYLIINYFKGGKLRFKKIKPEAFEANRFYTVINKKSGEIVPMEVNFNFDDPNLIILPLAFGKRQGREFIWNDLLSLETGSLKLANGRVIEKTLYNRRTRQDEPALFVALTFERREVLDSSNIKPMNLIGVDRGENIPAVIALTDPEGCPLSRFKDSLGNPTHILRIGESYKEKQRTIQAKKEVEQRRAGGYSRKYASKAKNLADDMVRNTARDLLYYAVTQDAMLIFENLSRGFGRQGKRTFMAERQYTRMEDWLTAKLAYEGLPSKTYLSKTLAQYTSKTCSNCGFTITSADYDRMLEKLKKTATGWMTTINGKELKVEGQITYYNRYKRQNVVKDLSVELDRLSEESVNNDISSWTKGRSGEALSLLKKRFSHRPVQEKFVCLNCGFETHADEQAALNIARSWLFLRSQEYKKYQTNKTTGNTDKRAFVETWQSFYRKKLKEVWKPAV

SEQ ID NO: 47412 - protein, 978 aa, synthetic construct
  REGION 1..978: note = engineered CasX variant
QEIKRINKIRRRLVKDSNTKKAGKTGPMKTLLVRVMTPDLRERLENLRKKPENIPQPISNTSRANLNKLLTDYTEMKKAILHVYWEEFQKDPVGLMSRVAQPASKKIDQNKLKPEMDEKGNLTTAGFACSQCGQPLFVYKLEQVSEKGKAYTNYFGRCNVAEHEKLILLAQLKPEKDSDEAVTYSLGKFGQRALDFYSIHVTKESTHPVKPLAQIAGNRYASAPVGKALSDACMGTIASFLSKYQDIIIEHQKVVKGNQKRLESLRELAGKENLEYPSVTLPPQPHTKEGVDAYNEVIARVRMWVNLNLWQKLKLSRDDAKPLLRLKGFPSFPLVERQANEVDWWDMVCNVKKLINEKKEDGKVFWQNLAGYKRQEALRPYLSSEEDREKGKKFARYQLGDLLLHLEKKHGEDWGKVYDEAWERIDKKVEGLSKHIKLEEERRSEDAQSKAALTDWLRAKASFVIEGLKEADKDEFCRCELKLQKWYGDLRGKPFAIEAENSILDISGFSKQYNCAFIWQKDGVKKLNLYLIINYFKGGKLRFKKIKPEAFEANRFYTVINKKSGEIVPMEVNFNFDDPNLIILPLAFGKRQGREFIWNDLLSLETGSLKLANGRVIEKTLYNRRTRQDEPALFVALTFERREVLDSSNIKPMNLIGVDRGENIPAVIALTDPEGCPLSRFKDSLGNPTHILRIGESYKEKQRTIQAKKEVEQRRAGGYSRKYASKAKNLADDMVRNTARDLLYYAVTQDAMLIFENLSRGFGRQGKRTFMAERQYTRMEDWLTAKLAYEGLPSKTYLSKTLAQYTSKTCSNCGFTITSADYDRMLEKLKKTATGWMTTINGKELKVEGQITYYNRYKRQNVVKDLSVELDRLSEESVNNDISSWTKGRSGEALSLLKKRFSHRPVQEKFVCLNCGFETHADEQAALNIARSWLFLRSQEYKKYQTNKTTGNTDKRAFVETWQSFYRKKLKEVWKPAV

SEQ ID NO: 47413 - protein, 978 aa, synthetic construct
  REGION 1..978: note = engineered CasX variant
QEIKRINKIRRRLVKDSNTKKAGKTGPMKTLLVRVMTPDLRERLENLRKKPENIPQPISNTSRANLNKLLTDYTEMKKAILHVYWEEFQKDPVGLMSRVAQPASKKIDQNKLKPEMDEKGNLTTAGFACSQCGQPLFVYKLEQVSEKGKAYTNYFGRCNVAEHEKLILLAQLKPEKDSDEAVTYSLGKFGQRALDFYSIHVTKESTHPVKPLAQIAGNRYASVPVGKALSDACMGTIASFLSKYQDIIIEHQKVVKGNQKRLESLRELAGKENLEYPSVTLPPQPHTKEGVDAYNEVIARVRMWVNLNLWQKLKLSRDDAKPLLRLKGFPSFPLVERQANEVDWWDMVCNVKKLINEKKEDGKVFWQNLAGYKRQEALRPYLSSEEDREKGKKFARYQLGDLLLHLEKKHGEDWGKVYDEAWERIDKKVEGLSKHIKLEEERRSEDAQSKAALTDWLRAKASFVIEGLKEADKDEFCRCELKLQKWYGDLRGKPFAIEAENSILDISGFSKQYNCAFIWQKDGVKKLNLYLIINYFKGGKLRFKKIKPEAFEANRFYTVINKKSGEIVPMEVNFNFDDPNLIILPLAFGKRQGREFIWNDLLSLETGSLKLANGRVIEKTLYNRRTRQDEPALFVALTFERREVLDSSNIKPMNLIGVDRGENIPAVIALTDPEGCPLSRFKDSLGNPTHILRIGESYKEKQRTIQAKKEVEQRRAGGYSRKYASKAKNLADDMVRNTARDLLYYAVTQDAMLIFENLSRGFGRQGKRTFMAERQYTRMEDWLTAKLAYEGLPSKTYLSKTLAQYTSKTCSNCGFTITSADYDRMLEKLKKTATGWMTTINGKELKVEGQITYYNRYKRQNVVKDLSVELDRLSEESVNNDISSWTKGRSGEALSLLKKRFSHRPVQEKFVCLNCGFETHADEQAALNIARSWLFLRSQEYKKYQTNKTTGNTDKRAFVETWQSFYRKKLKEVWKPAV

SEQ ID NO: 47414 - protein, 978 aa, synthetic construct
  REGION 1..978: note = engineered CasX variant
QEIKRINKIRRRLVKDSNTKKAGKTGPMKTLLVRVMTPDLRERLENLRKKPENIPQPISNTSRANLNKLLTDYTEMKKAILHVYWEEFQKDPVGLMSRVAQPASKKIDQNKLKPEMDEKGNLTTAGFACSQCGQPLFVYKLEQVSEKGKAYTNYFGRCNVAEHEKLIKLAQLKPEKDSDEAVTYSLGKFGQRALDFYSIHVTKESTHPVKPLAQIAGNRYASGPVGKALSDACMGTIASFLSKYQDIIIEHQKVVKGNQKRLESLRELAGKENLEYPSVTLPPQPHTKEGVDAYNEVIARVRMWVNLNLWQKLKLSRDDAKPLLRLKGFPSFPLVERQANEVDWWDMVCNVKKLINEKKEDGKVFWQNLAGYKRQEALRPYLSSEEDREKGKKFARYQLGDLLLHLEKKHGEDWGKVYDEAWERIDKKVEGLSKHIKLEEERRSEDAQSKAALTDWLRAKASFVIEGLKEADKDEFCRCELKLQKWYGDLRGKPFAIEAENSILDISGFSKQYNCAFIWQKDGVKKLNLYLIINYFKGGKLRFKKIKPEAFEANRFYTVINKKSGEIVPMEVNFNFDDPNLIILPLAFGKRQGREFIWNDLLSLETGSLKLANGRVIEKTLYNRRTRQDEPALFVALTFERREVLDSSNIKPMNLIGVDRGENIPAVIALTDPEGCPLSRFKDSLGNPTHILRIGESYKEKQRTIQAKKEVEQRRAGGYSRKYASKAKNLADDMVRNTARDLLYYAVTQDAMLIFENLSRGFGRQGKRTFMAERQYTRMEDWLTAKLAYEGLPSKTYLSKTLAQYTSKTCSNCGFTITSADYDRMLEKLKKTATGWMTTINGKELKVEGQITYYNRYKRQNVVKDLSVELDRLSEESVNNDISSWTKGRSGEALSLLKKRFSHRPVQEKFVCLNCGFETHADEQAALNIARSWLFLRSQEYKKYQTNKTTGNTDKRAFVETWQSFYRKKLKEVWKPAV

SEQ ID NO: 47415 - protein, 977 aa, synthetic construct
  REGION 1..977: note = engineered CasX variant
QEIKRINKIRRRLVKDSNTKKAGKTGPMKTLLVRVMTPDLRERLENLRKKPENIPQPISNTSRANLNKLLTDYTEMKKAILHVYWEEFQKDPVGLMSRVAQPASKKIDQNKLKPEMDEKGNLTTAGFACSQCGQPLFVYKLEQVSEKGKAYTNYFGRCNVAEHEKLILLAQLKPEKDSDEAVTYSLGKFGQRALDFYSIHVTKESTHPVKPLAQIAGNRYASPVGKALSDACMGTIASFLSKYQDIIIEHQKVVKGNQKRLESLRELAGKENLEYPSVTLPPQPHTKEGVDAYNEVIARVRMWVNLNLWQKLKLSRDDAKPLLRLKGFPSFPLVERQANEVDWWDMVCNVKKLINEKKEDGKVFWQNLAGYKRQEALRPYLSSEEDREKGKKFARYQLGDLLLHLEKKHGEDWGKVYDEAWERIDKKVEGLSKHIKLEEERRSEDAQSKAALTDWLRAKASFVIEGLKEADKDEFCRCELKLQKWYGDLRGKPFAIEAENSILDISGFSKQYNCAFIWQKDGVKKLNLYLIINYFKGGKLRFKKIKPEAFEANRFYTVINKKSGEIVPMEVNFNFDDPNLIILPLAFGKRQGREFIWNDLLSLETGSLKLANGRVIEKTLYNRRTRQDEPALFVALTFERREVLDSSNIKPMNLIGVDRGENIPAVIALTDPEGCPLSRFKDSLGNPTHILRIGESYKEKQRTIQAKKEVEQRRAGGYSRKYASKAKNLADDMVRNTARDLLYYAVTQDAMLIFENLSRGFGRQGKRTFMAERQYTRMEDWLTAKLAYEGLPSKTYLSKTLAQYTSKTCSNCGFTITSADYDRMLEKLKKTATGWMTTINGKELKVEGQITYYNRYKRQNVVKDLSVELDRLSEESVNNDISSWTKGRSGEALSLLKKRFSHRPVQEKFVCLNCGFETHADEQAALNIARSWLFLRSQEYKKYQTNKTTGNTDKRAFVETWQSFYRKKLKEVWKPAV

SEQ ID NO: 47416 - protein, 978 aa, synthetic construct
  REGION 1..978: note = engineered CasX variant
QEIKRINKIRRRLVKDSNTKKAGKTGPMKTLLVRVMTPDLRERLENLRKKPENIPQPISNTSRANLNKLLTDYTEMKKAILHVYWEEFQKDPVGLMSRVAQPASKKIDQNKLKPEMDEKGNLTTAGFACSQCGQPLFVYKLEQVSEKGKAYTNYFGRCNVAEHEKLILLAQLKPEKDSDEAVTYSLGKFGQRALDFYSIHVTKESTHPVKPLAQIAGNRYASYPVGKALSDACMGTIASFLSKYQDIIIEHQKVVKGNQKRLESLRELAGKENLEYPSVTLPPQPHTKEGVDAYNEVIARVRMWVNLNLWQKLKLSRDDAKPLLRLKGFPSFPLVERQANEVDWWDMVCNVKKLINEKKEDGKVFWQNLAGYKRQEALRPYLSSEEDRKKGKKFARYQLGDLLLHLEKKHGEDWGKVYDEAWERIDKKVEGLSKHIKLEEERRSEDAQSKAALTDWLRAKASFVIEGLKEADKDEFCRCELKLQKWYGDLRGKPFAIEAENSILDISGFSKQYNCAFIWQKDGVKKLNLYLIINYFKGGKLRFKKIKPEAFEANRFYTVINKKSGEIVIMEVNFNFDDPNLIILPLAFGKRQGREFIWNDLLSLETGSLKLANGRVIEKTLYNRRTRQDEPALFVALTFERREVLDSSNIKPMNLIGVDRGENIPAVIALTDPEGCPLSRFKDSLGNPTHILRIGESYKEKQRTIQAKKEVEQRRAGGYSRKYASKAKNLADDMVRNTARDLLYYAVTQDAMLIFENLSRGFGRQGKRTFMAERQYTRMEDWLTAKLAYEGLPSKTYLSKTLAQYTSKTCSNCGFTITSADYDRMLEKLKKTATGWMTTINGKELKVEGQITYYNRYKRQNVVKDLSVELDRLSEESVNNDISSWTKGRSGEALSLLKKRFSHRPVQEKFVCLNCGFETHADEQAALNIARSWLFLRSQEYKKYQTNKTTGNTDKRAFVETWQSFYRKKLKEVWKPAV

SEQ ID NO: 47417 - protein, 978 aa, synthetic construct
  REGION 1..978: note = engineered CasX variant
QEIKRINKIRRRLVKDSNTKKAGKTGPMKTLLVRVMTPDLRERLENLRKKPENIPQPISNTSRANLNKLLTDYTEMKKAILHVYWEEFQKDPVGLMSRVAQPASKKIDQNKLKPEMDEKGNLTTAGFACSQCGQPLFVYKLEQVSEKGKAYTNYFGRCNVAEHEKLILLAQLKPEKDSDEAVTYSLGKFGQRALDFYSIHVTKESTHPVKPLAQIAGNRYASHPVGKALSDACMGTIASFLSKYQDIIIEHQKVVKGNQKRLESLRELAGKENLEYPSVTLPPQPHTKEGVDAYNEVIARVRMWVNLNLWQKLKLSRDDAKPLLRLKGFPSFPLVERQANEVDWWDMVCNVKKLINEKKEDGKVFWQNLAGYKRQEALRPYLSSEEDRKKGKKFARYQLGDLLLHLEKKHGEDWGKVYDEAWERIDKKVEGLSKHIKLEEERRSEDAQSKAALTDWLRAKASFVIEGLKEADKDEFCRCELKLQKWYGDLRGKPFAIEAENSILDISGFSKQYNCAFIWQKDGVKKLNLYLIINYFKGGKLRFKKIKPEAFEANRFYTVINKKSGEIVIMEVNFNFDDPNLIILPLAFGKRQGREFIWNDLLSLETGSLKLANGRVIEKTLYNRRTRQDEPALFVALTFERREVLDSSNIKPMNLIGVDRGENIPAVIALTDPEGCPLSRFKDSLGNPTHILRIGESYKEKQRTIQAKKEVEQRRAGGYSRKYASKAKNLADDMVRNTARDLLYYAVTQDAMLIFENLSRGFGRQGKRTFMAERQYTRMEDWLTAKLAYEGLPSKTYLSKTLAQYTSKTCSNCGFTITSADYDRMLEKLKKTATGWMTTINGKELKVEGQITYYNRYKRQNVVKDLSVELDRLSEESVNNDISSWTKGRSGEALSLLKKRFSHRPVQEKFVCLNCGFETHADEQAALNIARSWLFLRSQEYKKYQTNKTTGNTDKRAFVETWQSFYRKKLKEVWKPAV

SEQ ID NO: 47418 - protein, 978 aa, synthetic construct
  REGION 1..978: note = engineered CasX variant
QEIKRINKIRRRLVKDSNTKKAGKTGPMKTLLVRVMTPDLRERLENLRKKPENIPQPISNTSRANLNKLLTDYTEMKKAILHVYWEEFQKDPVGLMSRVAQPASKKIDQNKLKPEMDEKGNLTTAGFACSQCGQPLFVYKLEQVSEKGKAYTNYFGRCNVAEHEKLILLAQLKPEKDSDEAVTYSLGKFGQRALDFYSIHVTKESTHPVKPLAQIAGNRYASSPVGKALSDACMGTIASFLSKYQDIIIEHQKVVKGNQKRLESLRELAGKENLEYPSVTLPPQPHTKEGVDAYNEVIARVRMWVNLNLWQKLKLSRDDAKPLLRLKGFPSFPLVERQANEVDWWDMVCNVKKLINEKKEDGKVFWQNLAGYKRQEALRPYLSSEEDRKKGKKFARYQLGDLLLHLEKKHGEDWGKVYDEAWERIDKKVEGLSKHIKLEEERRSEDAQSKAALTDWLRAKASFVIEGLKEADKDEFCRCELKLQKWYGDLRGKPFAIEAENSILDISGFSKQYNCAFIWQKDGVKKLNLYLIINYFKGGKLRFKKIKPEAFEANRFYTVINKKSGEIVIMEVNFNFDDPNLIILPLAFGKRQGREFIWNDLLSLETGSLKLANGRVIEKTLYNRRTRQDEPALFVALTFERREVLDSSNIKPMNLIGVDRGENIPAVIALTDPEGCPLSRFKDSLGNPTHILRIGESYKEKQRTIQAKKEVEQRRAGGYSRKYASKAKNLADDMVRNTARDLLYYAVTQDAMLIFENLSRGFGRQGKRTFMAERQYTRMEDWLTAKLAYEGLPSKTYLSKTLAQYTSKTCSNCGFTITSADYDRMLEKLKKTATGWMTTINGKELKVEGQITYYNRYKRQNVVKDLSVELDRLSEESVNNDISSWTKGRSGEALSLLKKRFSHRPVQEKFVCLNCGFETHADEQAALNIARSWLFLRSQEYKKYQTNKTTGNTDKRAFVETWQSFYRKKLKEVWKPAV

SEQ ID NO: 47419 - protein, 978 aa, synthetic construct
  REGION 1..978: note = engineered CasX variant
QEIKRINKIRRRLVKDSNTKKAGKTGPMKTLLVRVMTPDLRERLENLRKKPENIPQPISNTSRANLNKLLTDYTEMKKAILHVYWEEFQKDPVGLMSRVAQPASKKIDQNKLKPEMDEKGNLTTAGFACSQCGQPLFVYKLEQVSEKGKAYTNYFGRCNVAEHEKLILLAQLKPEKDSDEAVTYSLGKFGQRALDFYSIHVTKESTHPVKPLAQIAGNRYASTPVGKALSDACMGTIASFLSKYQDIIIEHQKVVKGNQKRLESLRELAGKENLEYPSVTLPPQPHTKEGVDAYNEVIARVRMWVNLNLWQKLKLSRDDAKPLLRLKGFPSFPLVERQANEVDWWDMVCNVKKLINEKKEDGKVFWQNLAGYKRQEALRPYLSSEEDRKKGKKFARYQLGDLLLHLEKKHGEDWGKVYDEAWERIDKKVEGLSKHIKLEEERRSEDAQSKAALTDWLRAKASFVIEGLKEADKDEFCRCELKLQKWYGDLRGKPFAIEAENSILDISGFSKQYNCAFIWQKDGVKKLNLYLIINYFKGGKLRFKKIKPEAFEANRFYTVINKKSGEIVIMEVNFNFDDPNLIILPLAFGKRQGREFIWNDLLSLETGSLKLANGRVIEKTLYNRRTRQDEPALFVALTFERREVLDSSNIKPMNLIGVDRGENIPAVIALTDPEGCPLSRFKDSLGNPTHILRIGESYKEKQRTIQAKKEVEQRRAGGYSRKYASKAKNLADDMVRNTARDLLYYAVTQDAMLIFENLSRGFGRQGKRTFMAERQYTRMEDWLTAKLAYEGLPSKTYLSKTLAQYTSKTCSNCGFTITSADYDRMLEKLKKTATGWMTTINGKELKVEGQITYYNRYKRQNVVKDLSVELDRLSEESVNNDISSWTKGRSGEALSLLKKRFSHRPVQEKFVCLNCGFETHADEQAALNIARSWLFLRSQEYKKYQTNKTTGNTDKRAFVETWQSFYRKKLKEVWKPAV

SEQ ID NO: 47420 - protein, 978 aa, synthetic construct
  REGION 1..978: note = engineered CasX variant
QEIKRINKIRRRLVKDSNTKKAGKTGPMKTLLVRVMTPDLRERLENLRKKPENIPQPISNTSRANLNKLLTDYTEMKKAILHVYWEEFQKDPVGLMSRVAQPASKKIDQNKLKPEMDEKGNLTTAGFACSQCGQPLFVYKLEQVSEKGKAYTNYFGRCNVAEHEKLILLAQLKPEKDSDEAVTYSLGKFGQRALDFYSIHVTKESTHPVKPLAQIAGNRYASAPVGKALSDACMGTIASFLSKYQDIIIEHQKVVKGNQKRLESLRELAGKENLEYPSVTLPPQPHTKEGVDAYNEVIARVRMWVNLNLWQKLKLSRDDAKPLLRLKGFPSFPLVERQANEVDWWDMVCNVKKLINEKKEDGKVFWQNLAGYKRQEALRPYLSSEEDRKKGKKFARYQLGDLLLHLEKKHGEDWGKVYDEAWERIDKKVEGLSKHIKLEEERRSEDAQSKAALTDWLRAKASFVIEGLKEADKDEFCRCELKLQKWYGDLRGKPFAIEAENSILDISGFSKQYNCAFIWQKDGVKKLNLYLIINYFKGGKLRFKKIKPEAFEANRFYTVINKKSGEIVIMEVNFNFDDPNLIILPLAFGKRQGREFIWNDLLSLETGSLKLANGRVIEKTLYNRRTRQDEPALFVALTFERREVLDSSNIKPMNLIGVDRGENIPAVIALTDPEGCPLSRFKDSLGNPTHILRIGESYKEKQRTIQAKKEVEQRRAGGYSRKYASKAKNLADDMVRNTARDLLYYAVTQDAMLIFENLSRGFGRQGKRTFMAERQYTRMEDWLTAKLAYEGLPSKTYLSKTLAQYTSKTCSNCGFTITSADYDRMLEKLKKTATGWMTTINGKELKVEGQITYYNRYKRQNVVKDLSVELDRLSEESVNNDISSWTKGRSGEALSLLKKRFSHRPVQEKFVCLNCGFETHADEQAALNIARSWLFLRSQEYKKYQTNKTTGNTDKRAFVETWQSFYRKKLKEVWKPAV

SEQ ID NO: 47421 - protein, 978 aa, synthetic construct
  REGION 1..978: note = engineered CasX variant
QEIKRINKIRRRLVKDSNTKKAGKTGPMKTLLVRVMTPDLRERLENLRKKPENIPQPISNTSRANLNKLLTDYTEMKKAILHVYWEEFQKDPVGLMSRVAQPASKKIDQNKLKPEMDEKGNLTTAGFACSQCGQPLFVYKLEQVSEKGKAYTNYFGRCNVAEHEKLILLAQLKPEKDSDEAVTYSLGKFGQRALDFYSIHVTKESTHPVKPLAQIAGNRYASVPVGKALSDACMGTIASFLSKYQDIIIEHQKVVKGNQKRLESLRELAGKENLEYPSVTLPPQPHTKEGVDAYNEVIARVRMWVNLNLWQKLKLSRDDAKPLLRLKGFPSFPLVERQANEVDWWDMVCNVKKLINEKKEDGKVFWQNLAGYKRQEALRPYLSSEEDRKKGKKFARYQLGDLLLHLEKKHGEDWGKVYDEAWERIDKKVEGLSKHIKLEEERRSEDAQSKAALTDWLRAKASFVIEGLKEADKDEFCRCELKLQKWYGDLRGKPFAIEAENSILDISGFSKQYNCAFIWQKDGVKKLNLYLIINYFKGGKLRFKKIKPEAFEANRFYTVINKKSGEIVIMEVNFNFDDPNLIILPLAFGKRQGREFIWNDLLSLETGSLKLANGRVIEKTLYNRRTRQDEPALFVALTFERREVLDSSNIKPMNLIGVDRGENIPAVIALTDPEGCPLSRFKDSLGNPTHILRIGESYKEKQRTIQAKKEVEQRRAGGYSRKYASKAKNLADDMVRNTARDLLYYAVTQDAMLIFENLSRGFGRQGKRTFMAERQYTRMEDWLTAKLAYEGLPSKTYLSKTLAQYTSKTCSNCGFTITSADYDRMLEKLKKTATGWMTTINGKELKVEGQITYYNRYKRQNVVKDLSVELDRLSEESVNNDISSWTKGRSGEALSLLKKRFSHRPVQEKFVCLNCGFETHADEQAALNIARSWLFLRSQEYKKYQTNKTTGNTDKRAFVETWQSFYRKKLKEVWKPAV

SEQ ID NO: 47422 - protein, 978 aa, synthetic construct
  REGION 1..978: note = engineered CasX variant
QEIKRINKIRRRLVKDSNTKKAGKTGPMKTLLVRVMTPDLRERLENLRKKPENIPQPISNTSRANLNKLLTDYTEMKKAILHVYWEEFQKDPVGLMSRVAQPASKKIDQNKLKPEMDEKGNLTTAGFACSQCGQPLFVYKLEQVSEKGKAYTNYFGRCNVAEHEKLIKLAQLKPEKDSDEAVTYSLGKFGQRALDFYSIHVTKESTHPVKPLAQIAGNRYASGPVGKALSDACMGTIASFLSKYQDIIIEHQKVVKGNQKRLESLRELAGKENLEYPSVTLPPQPHTKEGVDAYNEVIARVRMWVNLNLWQKLKLSRDDAKPLLRLKGFPSFPLVERQANEVDWWDMVCNVKKLINEKKEDGKVFWQNLAGYKRQEALRPYLSSEEDRKKGKKFARYQLGDLLLHLEKKHGEDWGKVYDEAWERIDKKVEGLSKHIKLEEERRSEDAQSKAALTDWLRAKASFVIEGLKEADKDEFCRCELKLQKWYGDLRGKPFAIEAENSILDISGFSKQYNCAFIWQKDGVKKLNLYLIINYFKGGKLRFKKIKPEAFEANRFYTVINKKSGEIVIMEVNFNFDDPNLIILPLAFGKRQGREFIWNDLLSLETGSLKLANGRVIEKTLYNRRTRQDEPALFVALTFERREVLDSSNIKPMNLIGVDRGENIPAVIALTDPEGCPLSRFKDSLGNPTHILRIGESYKEKQRTIQAKKEVEQRRAGGYSRKYASKAKNLADDMVRNTARDLLYYAVTQDAMLIFENLSRGFGRQGKRTFMAERQYTRMEDWLTAKLAYEGLPSKTYLSKTLAQYTSKTCSNCGFTITSADYDRMLEKLKKTATGWMTTINGKELKVEGQITYYNRYKRQNVVKDLSVELDRLSEESVNNDISSWTKGRSGEALSLLKKRFSHRPVQEKFVCLNCGFETHADEQAALNIARSWLFLRSQEYKKYQTNKTTGNTDKRAFVETWQSFYRKKLKEVWKPAV

SEQ ID NO: 47423 - protein, 977 aa, synthetic construct
  REGION 1..977: note = engineered CasX variant
QEIKRINKIRRRLVKDSNTKKAGKTGPMKTLLVRVMTPDLRERLENLRKKPENIPQPISNTSRANLNKLLTDYTEMKKAILHVYWEEFQKDPVGLMSRVAQPASKKIDQNKLKPEMDEKGNLTTAGFACSQCGQPLFVYKLEQVSEKGKAYTNYFGRCNVAEHEKLILLAQLKPEKDSDEAVTYSLGKFGQRALDFYSIHVTKESTHPVKPLAQIAGNRYASPVGKALSDACMGTIASFLSKYQDIIIEHQKVVKGNQKRLESLRELAGKENLEYPSVTLPPQPHTKEGVDAYNEVIARVRMWVNLNLWQKLKLSRDDAKPLLRLKGFPSFPLVERQANEVDWWDMVCNVKKLINEKKEDGKVFWQNLAGYKRQEALRPYLSSEEDRKKGKKFARYQLGDLLLHLEKKHGEDWGKVYDEAWERIDKKVEGLSKHIKLEEERRSEDAQSKAALTDWLRAKASFVIEGLKEADKDEFCRCELKLQKWYGDLRGKPFAIEAENSILDISGFSKQYNCAFIWQKDGVKKLNLYLIINYFKGGKLRFKKIKPEAFEANRFYTVINKKSGEIVIMEVNFNFDDPNLIILPLAFGKRQGREFIWNDLLSLETGSLKLANGRVIEKTLYNRRTRQDEPALFVALTFERREVLDSSNIKPMNLIGVDRGENIPAVIALTDPEGCPLSRFKDSLGNPTHILRIGESYKEKQRTIQAKKEVEQRRAGGYSRKYASKAKNLADDMVRNTARDLLYYAVTQDAMLIFENLSRGFGRQGKRTFMAERQYTRMEDWLTAKLAYEGLPSKTYLSKTLAQYTSKTCSNCGFTITSADYDRMLEKLKKTATGWMTTINGKELKVEGQITYYNRYKRQNVVKDLSVELDRLSEESVNNDISSWTKGRSGEALSLLKKRFSHRPVQEKFVCLNCGFETHADEQAALNIARSWLFLRSQEYKKYQTNKTTGNTDKRAFVETWQSFYRKKLKEVWKPAV

SEQ ID NO: 47424 - protein, 978 aa, synthetic construct
  REGION 1..978: note = engineered CasX variant
QEIKRINKIRRRLVKDSNTKKAGKTGPMKTLLVRVMTPDLRERLENLRKKPENIPQPISNTSRANLNKLLTDYTEMKKAILHVYWEEFQKDPVGLMSRVAQPASKKIDQNKLKPEMDEKGNLTTAGFACSQCGQPLFVYKLEQVSEKGKAYTNYFGRCNVAEHEKLILLAQLKPEKDSDEAVTYSLGKFGQRALDFYSIHVTKESTHPVKPLAQIAGNRYASYPVGKALSGACMGTIASFLSKYQDIIIEHQKVVKGNQKRLESLRELAGKENLEYPSVTLPPQPHTKEGVDAYNEVIARVRMWVNLNLWQKLKLSRDDAKPLLRLKGFPSFPLVERQANEVDWWDMVCNVKKLINEKKEDGKVFWQNLAGYKRQEALRPYLSSEEDRKKGKKFARYQLGDLLLHLEKKHGEDWGKVYDEAWERIDKKVEGLSKHIKLEEERRSEDAQSKAALTDWLRAKASFVIEGLKEADKDEFCRCELKLQKWYGDLRGKPFAIEAENSILDISGFSKQYNCAFIWQKDGVKKLNLYLIINYFKGGKLRFKKIKPEAFEANRFYTVINKKSGEIVPMEVNFNFDDPNLIILPLAFGKRQGREFIWNDLLSLETGSLKLANGRVIEKTLYNRRTRQDEPALFVALTFERREVLDSSNIKPMNLIGVDRGENIPAVIALTDPEGCPLSRFKDSLGNPTHILRIGESYKEKQRTIQAKKEVEQRRAGGYSRKYASKAKNLADDMVRNTARDLLYYAVTQDAMLIFENLSRGFGRQGKRTFMAERQYTRMEDWLTAKLAYEGLPSKTYLSKTLAQYTSKTCSNCGFTITSADYDRVLEKLKKTATGWMTTINGKELKVEGQITYYNRYKRQNVVKDLSVELDRLSEESVNNDISSWTKGRQGEALSLLKKRFSHRPVQEKFVCLNCGFETHADEQAALNIARSWLFLRSQEYKKYQTNKTTGNTDKRAFVETWQSFYRKKLKEVWKPAV

SEQ ID NO: 47425 - protein, 978 aa, synthetic construct
  REGION 1..978: note = engineered CasX variant
QEIKRINKIRRRLVKDSNTKKAGKTGPMKTLLVRVMTPDLRERLENLRKKPENIPQPISNTSRANLNKLLTDYTEMKKAILHVYWEEFQKDPVGLMSRVAQPASKKIDQNKLKPEMDEKGNLTTAGFACSQCGQPLFVYKLEQVSEKGKAYTNYFGRCNVAEHEKLILLAQLKPEKDSDEAVTYSLGKFGQRALDFYSIHVTKESTHPVKPLAQIAGNRYASHPVGKALSGACMGTIASFLSKYQDIIIEHQKVVKGNQKRLESLRELAGKENLEYPSVTLPPQPHTKEGVDAYNEVIARVRMWVNLNLWQKLKLSRDDAKPLLRLKGFPSFPLVERQANEVDWWDMVCNVKKLINEKKEDGKVFWQNLAGYKRQEALRPYLSSEEDRKKGKKFARYQLGDLLLHLEKKHGEDWGKVYDEAWERIDKKVEGLSKHIKLEEERRSEDAQSKAALTDWLRAKASFVIEGLKEADKDEFCRCELKLQKWYGDLRGKPFAIEAENSILDISGFSKQYNCAFIWQKDGVKKLNLYLIINYFKGGKLRFKKIKPEAFEANRFYTVINKKSGEIVPMEVNFNFDDPNLIILPLAFGKRQGREFIWNDLLSLETGSLKLANGRVIEKTLYNRRTRQDEPALFVALTFERREVLDSSNIKPMNLIGVDRGENIPAVIALTDPEGCPLSRFKDSLGNPTHILRIGESYKEKQRTIQAKKEVEQRRAGGYSRKYASKAKNLADDMVRNTARDLLYYAVTQDAMLIFENLSRGFGRQGKRTFMAERQYTRMEDWLTAKLAYEGLPSKTYLSKTLAQYTSKTCSNCGFTITSADYDRVLEKLKKTATGWMTTINGKELKVEGQITYYNRYKRQNVVKDLSVELDRLSEESVNNDISSWTKGRQGEALSLLKKRFSHRPVQEKFVCLNCGFETHADEQAALNIARSWLFLRSQEYKKYQTNKTTGNTDKRAFVETWQSFYRKKLKEVWKPAV

SEQ ID NO: 47426 - protein, 978 aa, synthetic construct
  REGION 1..978: note = engineered CasX variant
QEIKRINKIRRRLVKDSNTKKAGKTGPMKTLLVRVMTPDLRERLENLRKKPENIPQPISNTSRANLNKLLTDYTEMKKAILHVYWEEFQKDPVGLMSRVAQPASKKIDQNKLKPEMDEKGNLTTAGFACSQCGQPLFVYKLEQVSEKGKAYTNYFGRCNVAEHEKLILLAQLKPEKDSDEAVTYSLGKFGQRALDFYSIHVTKESTHPVKPLAQIAGNRYASSPVGKALSGACMGTIASFLSKYQDIIIEHQKVVKGNQKRLESLRELAGKENLEYPSVTLPPQPHTKEGVDAYNEVIARVRMWVNLNLWQKLKLSRDDAKPLLRLKGFPSFPLVERQANEVDWWDMVCNVKKLINEKKEDGKVFWQNLAGYKRQEALRPYLSSEEDRKKGKKFARYQLGDLLLHLEKKHGEDWGKVYDEAWERIDKKVEGLSKHIKLEEERRSEDAQSKAALTDWLRAKASFVIEGLKEADKDEFCRCELKLQKWYGDLRGKPFAIEAENSILDISGFSKQYNCAFIWQKDGVKKLNLYLIINYFKGGKLRFKKIKPEAFEANRFYTVINKKSGEIVPMEVNFNFDDPNLIILPLAFGKRQGREFIWNDLLSLETGSLKLANGRVIEKTLYNRRTRQDEPALFVALTFERREVLDSSNIKPMNLIGVDRGENIPAVIALTDPEGCPLSRFKDSLGNPTHILRIGESYKEKQRTIQAKKEVEQRRAGGYSRKYASKAKNLADDMVRNTARDLLYYAVTQDAMLIFENLSRGFGRQGKRTFMAERQYTRMEDWLTAKLAYEGLPSKTYLSKTLAQYTSKTCSNCGFTITSADYDRVLEKLKKTATGWMTTINGKELKVEGQITYYNRYKRQNVVKDLSVELDRLSEESVNNDISSWTKGRQGEALSLLKKRFSHRPVQEKFVCLNCGFETHADEQAALNIARSWLFLRSQEYKKYQTNKTTGNTDKRAFVETWQSFYRKKLKEVWKPAV

SEQ ID NO: 47427 - protein, 978 aa, synthetic construct
  REGION 1..978: note = engineered CasX variant
QEIKRINKIRRRLVKDSNTKKAGKTGPMKTLLVRVMTPDLRERLENLRKKPENIPQPISNTSRANLNKLLTDYTEMKKAILHVYWEEFQKDPVGLMSRVAQPASKKIDQNKLKPEMDEKGNLTTAGFACSQCGQPLFVYKLEQVSEKGKAYTNYFGRCNVAEHEKLILLAQLKPEKDSDEAVTYSLGKFGQRALDFYSIHVTKESTHPVKPLAQIAGNRYASTPVGKALSGACMGTIASFLSKYQDIIIEHQKVVKGNQKRLESLRELAGKENLEYPSVTLPPQPHTKEGVDAYNEVIARVRMWVNLNLWQKLKLSRDDAKPLLRLKGFPSFPLVERQANEVDWWDMVCNVKKLINEKKEDGKVFWQNLAGYKRQEALRPYLSSEEDRKKGKKFARYQLGDLLLHLEKKHGEDWGKVYDEAWERIDKKVEGLSKHIKLEEERRSEDAQSKAALTDWLRAKASFVIEGLKEADKDEFCRCELKLQKWYGDLRGKPFAIEAENSILDISGFSKQYNCAFIWQKDGVKKLNLYLIINYFKGGKLRFKKIKPEAFEANRFYTVINKKSGEIVPMEVNFNFDDPNLIILPLAFGKRQGREFIWNDLLSLETGSLKLANGRVIEKTLYNRRTRQDEPALFVALTFERREVLDSSNIKPMNLIGVDRGENIPAVIALTDPEGCPLSRFKDSLGNPTHILRIGESYKEKQRTIQAKKEVEQRRAGGYSRKYASKAKNLADDMVRNTARDLLYYAVTQDAMLIFENLSRGFGRQGKRTFMAERQYTRMEDWLTAKLAYEGLPSKTYLSKTLAQYTSKTCSNCGFTITSADYDRVLEKLKKTATGWMTTINGKELKVEGQITYYNRYKRQNVVKDLSVELDRLSEESVNNDISSWTKGRQGEALSLLKKRFSHRPVQEKFVCLNCGFETHADEQAALNIARSWLFLRSQEYKKYQTNKTTGNTDKRAFVETWQSFYRKKLKEVWKPAV

SEQ ID NO: 47428 - protein, 978 aa, synthetic construct
  REGION 1..978: note = engineered CasX variant
QEIKRINKIRRRLVKDSNTKKAGKTGPMKTLLVRVMTPDLRERLENLRKKPENIPQPISNTSRANLNKLLTDYTEMKKAILHVYWEEFQKDPVGLMSRVAQPASKKIDQNKLKPEMDEKGNLTTAGFACSQCGQPLFVYKLEQVSEKGKAYTNYFGRCNVAEHEKLILLAQLKPEKDSDEAVTYSLGKFGQRALDFYSIHVTKESTHPVKPLAQIAGNRYASAPVGKALSGACMGTIASFLSKYQDIIIEHQKVVKGNQKRLESLRELAGKENLEYPSVTLPPQPHTKEGVDAYNEVIARVRMWVNLNLWQKLKLSRDDAKPLLRLKGFPSFPLVERQANEVDWWDMVCNVKKLINEKKEDGKVFWQNLAGYKRQEALRPYLSSEEDRKKGKKFARYQLGDLLLHLEKKHGEDWGKVYDEAWERIDKKVEGLSKHIKLEEERRSEDAQSKAALTDWLRAKASFVIEGLKEADKDEFCRCELKLQKWYGDLRGKPFAIEAENSILDISGFSKQYNCAFIWQKDGVKKLNLYLIINYFKGGKLRFKKIKPEAFEANRFYTVINKKSGEIVPMEVNFNFDDPNLIILPLAFGKRQGREFIWNDLLSLETGSLKLANGRVIEKTLYNRRTRQDEPALFVALTFERREVLDSSNIKPMNLIGVDRGENIPAVIALTDPEGCPLSRFKDSLGNPTHILRIGESYKEKQRTIQAKKEVEQRRAGGYSRKYASKAKNLADDMVRNTARDLLYYAVTQDAMLIFENLSRGFGRQGKRTFMAERQYTRMEDWLTAKLAYEGLPSKTYLSKTLAQYTSKTCSNCGFTITSADYDRVLEKLKKTATGWMTTINGKELKVEGQITYYNRYKRQNVVKDLSVELDRLSEESVNNDISSWTKGRQGEALSLLKKRFSHRPVQEKFVCLNCGFETHADEQAALNIARSWLFLRSQEYKKYQTNKTTGNTDKRAFVETWQSFYRKKLKEVWKPAV

SEQ ID NO: 47429 - protein, 978 aa, synthetic construct
  REGION 1..978: note = engineered CasX variant
QEIKRINKIRRRLVKDSNTKKAGKTGPMKTLLVRVMTPDLRERLENLRKKPENIPQPISNTSRANLNKLLTDYTEMKKAILHVYWEEFQKDPVGLMSRVAQPASKKIDQNKLKPEMDEKGNLTTAGFACSQCGQPLFVYKLEQVSEKGKAYTNYFGRCNVAEHEKLILLAQLKPEKDSDEAVTYSLGKFGQRALDFYSIHVTKESTHPVKPLAQIAGNRYASVPVGKALSGACMGTIASFLSKYQDIIIEHQKVVKGNQKRLESLRELAGKENLEYPSVTLPPQPHTKEGVDAYNEVIARVRMWVNLNLWQKLKLSRDDAKPLLRLKGFPSFPLVERQANEVDWWDMVCNVKKLINEKKEDGKVFWQNLAGYKRQEALRPYLSSEEDRKKGKKFARYQLGDLLLHLEKKHGEDWGKVYDEAWERIDKKVEGLSKHIKLEEERRSEDAQSKAALTDWLRAKASFVIEGLKEADKDEFCRCELKLQKWYGDLRGKPFAIEAENSILDISGFSKQYNCAFIWQKDGVKKLNLYLIINYFKGGKLRFKKIKPEAFEANRFYTVINKKSGEIVPMEVNFNFDDPNLIILPLAFGKRQGREFIWNDLLSLETGSLKLANGRVIEKTLYNRRTRQDEPALFVALTFERREVLDSSNIKPMNLIGVDRGENIPAVIALTDPEGCPLSRFKDSLGNPTHILRIGESYKEKQRTIQAKKEVEQRRAGGYSRKYASKAKNLADDMVRNTARDLLYYAVTQDAMLIFENLSRGFGRQGKRTFMAERQYTRMEDWLTAKLAYEGLPSKTYLSKTLAQYTSKTCSNCGFTITSADYDRVLEKLKKTATGWMTTINGKELKVEGQITYYNRYKRQNVVKDLSVELDRLSEESVNNDISSWTKGRQGEALSLLKKRFSHRPVQEKFVCLNCGFETHADEQAALNIARSWLFLRSQEYKKYQTNKTTGNTDKRAFVETWQSFYRKKLKEVWKPAV

SEQ ID NO: 47430 - protein, 978 aa, synthetic construct
  REGION 1..978: note = engineered CasX variant
QEIKRINKIRRRLVKDSNTKKAGKTGPMKTLLVRVMTPDLRERLENLRKKPENIPQPISNTSRANLNKLLTDYTEMKKAILHVYWEEFQKDPVGLMSRVAQPASKKIDQNKLKPEMDEKGNLTTAGFACSQCGQPLFVYKLEQVSEKGKAYTNYFGRCNVAEHEKLIKLAQLKPEKDSDEAVTYSLGKFGQRALDFYSIHVTKESTHPVKPLAQIAGNRYASGPVGKALSGACMGTIASFLSKYQDIIIEHQKVVKGNQKRLESLRELAGKENLEYPSVTLPPQPHTKEGVDAYNEVIARVRMWVNLNLWQKLKLSRDDAKPLLRLKGFPSFPLVERQANEVDWWDMVCNVKKLINEKKEDGKVFWQNLAGYKRQEALRPYLSSEEDRKKGKKFARYQLGDLLLHLEKKHGEDWGKVYDEAWERIDKKVEGLSKHIKLEEERRSEDAQSKAALTDWLRAKASFVIEGLKEADKDEFCRCELKLQKWYGDLRGKPFAIEAENSILDISGFSKQYNCAFIWQKDGVKKLNLYLIINYFKGGKLRFKKIKPEAFEANRFYTVINKKSGEIVPMEVNFNFDDPNLIILPLAFGKRQGREFIWNDLLSLETGSLKLANGRVIEKTLYNRRTRQDEPALFVALTFERREVLDSSNIKPMNLIGVDRGENIPAVIALTDPEGCPLSRFKDSLGNPTHILRIGESYKEKQRTIQAKKEVEQRRAGGYSRKYASKAKNLADDMVRNTARDLLYYAVTQDAMLIFENLSRGFGRQGKRTFMAERQYTRMEDWLTAKLAYEGLPSKTYLSKTLAQYTSKTCSNCGFTITSADYDRVLEKLKKTATGWMTTINGKELKVEGQITYYNRYKRQNVVKDLSVELDRLSEESVNNDISSWTKGRQGEALSLLKKRFSHRPVQEKFVCLNCGFETHADEQAALNIARSWLFLRSQEYKKYQTNKTTGNTDKRAFVETWQSFYRKKLKEVWKPAV

SEQ ID NO: 47431 - protein, 977 aa, synthetic construct
  REGION 1..977: note = engineered CasX variant
QEIKRINKIRRRLVKDSNTKKAGKTGPMKTLLVRVMTPDLRERLENLRKKPENIPQPISNTSRANLNKLLTDYTEMKKAILHVYWEEFQKDPVGLMSRVAQPASKKIDQNKLKPEMDEKGNLTTAGFACSQCGQPLFVYKLEQVSEKGKAYTNYFGRCNVAEHEKLILLAQLKPEKDSDEAVTYSLGKFGQRALDFYSIHVTKESTHPVKPLAQIAGNRYASPVGKALSGACMGTIASFLSKYQDIIIEHQKVVKGNQKRLESLRELAGKENLEYPSVTLPPQPHTKEGVDAYNEVIARVRMWVNLNLWQKLKLSRDDAKPLLRLKGFPSFPLVERQANEVDWWDMVCNVKKLINEKKEDGKVFWQNLAGYKRQEALRPYLSSEEDRKKGKKFARYQLGDLLLHLEKKHGEDWGKVYDEAWERIDKKVEGLSKHIKLEEERRSEDAQSKAALTDWLRAKASFVIEGLKEADKDEFCRCELKLQKWYGDLRGKPFAIEAENSILDISGFSKQYNCAFIWQKDGVKKLNLYLIINYFKGGKLRFKKIKPEAFEANRFYTVINKKSGEIVPMEVNFNFDDPNLIILPLAFGKRQGREFIWNDLLSLETGSLKLANGRVIEKTLYNRRTRQDEPALFVALTFERREVLDSSNIKPMNLIGVDRGENIPAVIALTDPEGCPLSRFKDSLGNPTHILRIGESYKEKQRTIQAKKEVEQRRAGGYSRKYASKAKNLADDMVRNTARDLLYYAVTQDAMLIFENLSRGFGRQGKRTFMAERQYTRMEDWLTAKLAYEGLPSKTYLSKTLAQYTSKTCSNCGFTITSADYDRVLEKLKKTATGWMTTINGKELKVEGQITYYNRYKRQNVVKDLSVELDRLSEESVNNDISSWTKGRQGEALSLLKKRFSHRPVQEKFVCLNCGFETHADEQAALNIARSWLFLRSQEYKKYQTNKTTGNTDKRAFVETWQSFYRKKLKEVWKPAV

SEQ ID NO: 47432 - protein, 978 aa, synthetic construct
  REGION 1..978: note = engineered CasX variant
QEIKRINKIRRRLVKDSNTKKAGKTGPMKTLLVRVMTPDLRERLENLRKKPENIPQPISNTSRANLNKLLTDYTEMKKAILHVYWEEFQKDPVGLMSRVAQPASKKIDQNKLKPEMDEKGNLTTAGFACSQCGQPLFVYKLEQVSEKGKAYTNYFGRCNVAEHEKLILLAQLKPEKDSDEAVTYSLGKFGQRALDFYSIHVTKESTHPVKPLAQIAGNRYASYPVGKALSDACMGTIASFLSKYQDIIIEHQKVVKGNQKRLESLRELAGKENLEYPSVTLPPQPHTKEGVDAYNEVIARVRMWVNLNLWQKLKLSRDDAKPLLRLKNFPSFPLVERQANEVDWWDMVCNVKKLINEKKEDGKVFWQNLAGYKRQEALRPYLSSEEDRKKGKKFARYQLGDLLLHLEKKHGEDWGKVYDEAWERIDKKVEGLSKHIKLEEERRSEDAQSKAALTDWLRAKASFVIEGLKEADKDEFCRCELKLQKWYGDLRGKPFAIEAENSILDISGFSKQYNCAFIWQKDGVKKLNLYLIINYFKGGKLRFKKIKPEAFEANRFYTVINKKSGEIVPMEVNFNFDDPNLIILPLAFGKRQGREFIWNDLLSLETGSLKLANGRVIEKTLYNRRTRQDEPALFVALTFERREVLDSSNIKPMNLIGVDRGENIPAVIALTDPEGCPLSRFKDSLGNPTHILRIGESYKEKQRTIQAKKEVEQRRAGGYSRKYASKAKNLADDMVRNTARDLLYYAVTQDAMLIFENLSRGFGRQGKRTFMAERQYTRMEDWLTAKLAYEGLPSKTYLSKTLAQYTSKTCSNCGFTITSADYDRVLEKLKKTATGWMTTINGKELKVEGQITYYNRYKRQNVVKDLSVELDRLSEESVNNDISSWTKGRQGEALSLLKKRFSHRPVQEKFVCLNCGFETHADEQAALNIARSWLFLRSQEYKKYQTNKTTGNTDKRAFVETWQSFYRKKLKEVWKPAV

SEQ ID NO: 47433 - protein, 978 aa, synthetic construct
  REGION 1..978: note = engineered CasX variant
QEIKRINKIRRRLVKDSNTKKAGKTGPMKTLLVRVMTPDLRERLENLRKKPENIPQPISNTSRANLNKLLTDYTEMKKAILHVYWEEFQKDPVGLMSRVAQPASKKIDQNKLKPEMDEKGNLTTAGFACSQCGQPLFVYKLEQVSEKGKAYTNYFGRCNVAEHEKLILLAQLKPEKDSDEAVTYSLGKFGQRALDFYSIHVTKESTHPVKPLAQIAGNRYASHPVGKALSDACMGTIASFLSKYQDIIIEHQKVVKGNQKRLESLRELAGKENLEYPSVTLPPQPHTKEGVDAYNEVIARVRMWVNLNLWQKLKLSRDDAKPLLRLKNFPSFPLVERQANEVDWWDMVCNVKKLINEKKEDGKVFWQNLAGYKRQEALRPYLSSEEDRKKGKKFARYQLGDLLLHLEKKHGEDWGKVYDEAWERIDKKVEGLSKHIKLEEERRSEDAQSKAALTDWLRAKASFVIEGLKEADKDEFCRCELKLQKWYGDLRGKPFAIEAENSILDISGFSKQYNCAFIWQKDGVKKLNLYLIINYFKGGKLRFKKIKPEAFEANRFYTVINKKSGEIVPMEVNFNFDDPNLIILPLAFGKRQGREFIWNDLLSLETGSLKLANGRVIEKTLYNRRTRQDEPALFVALTFERREVLDSSNIKPMNLIGVDRGENIPAVIALTDPEGCPLSRFKDSLGNPTHILRIGESYKEKQRTIQAKKEVEQRRAGGYSRKYASKAKNLADDMVRNTARDLLYYAVTQDAMLIFENLSRGFGRQGKRTFMAERQYTRMEDWLTAKLAYEGLPSKTYLSKTLAQYTSKTCSNCGFTITSADYDRVLEKLKKTATGWMTTINGKELKVEGQITYYNRYKRQNVVKDLSVELDRLSEESVNNDISSWTKGRQGEALSLLKKRFSHRPVQEKFVCLNCGFETHADEQAALNIARSWLFLRSQEYKKYQTNKTTGNTDKRAFVETWQSFYRKKLKEVWKPAV

SEQ ID NO: 47434 - protein, 978 aa, synthetic construct
  REGION 1..978: note = engineered CasX variant
QEIKRINKIRRRLVKDSNTKKAGKTGPMKTLLVRVMTPDLRERLENLRKKPENIPQPISNTSRANLNKLLTDYTEMKKAILHVYWEEFQKDPVGLMSRVAQPASKKIDQNKLKPEMDEKGNLTTAGFACSQCGQPLFVYKLEQVSEKGKAYTNYFGRCNVAEHEKLILLAQLKPEKDSDEAVTYSLGKFGQRALDFYSIHVTKESTHPVKPLAQIAGNRYASSPVGKALSDACMGTIASFLSKYQDIIIEHQKVVKGNQKRLESLRELAGKENLEYPSVTLPPQPHTKEGVDAYNEVIARVRMWVNLNLWQKLKLSRDDAKPLLRLKNFPSFPLVERQANEVDWWDMVCNVKKLINEKKEDGKVFWQNLAGYKRQEALRPYLSSEEDRKKGKKFARYQLGDLLLHLEKKHGEDWGKVYDEAWERIDKKVEGLSKHIKLEEERRSEDAQSKAALTDWLRAKASFVIEGLKEADKDEFCRCELKLQKWYGDLRGKPFAIEAENSILDISGFSKQYNCAFIWQKDGVKKLNLYLIINYFKGGKLRFKKIKPEAFEANRFYTVINKKSGEIVPMEVNFNFDDPNLIILPLAFGKRQGREFIWNDLLSLETGSLKLANGRVIEKTLYNRRTRQDEPALFVALTFERREVLDSSNIKPMNLIGVDRGENIPAVIALTDPEGCPLSRFKDSLGNPTHILRIGESYKEKQRTIQAKKEVEQRRAGGYSRKYASKAKNLADDMVRNTARDLLYYAVTQDAMLIFENLSRGFGRQGKRTFMAERQYTRMEDWLTAKLAYEGLPSKTYLSKTLAQYTSKTCSNCGFTITSADYDRVLEKLKKTATGWMTTINGKELKVEGQITYYNRYKRQNVVKDLSVELDRLSEESVNNDISSWTKGRQGEALSLLKKRFSHRPVQEKFVCLNCGFETHADEQAALNIARSWLFLRSQEYKKYQTNKTTGNTDKRAFVETWQSFYRKKLKEVWKPAV

SEQ ID NO: 47435 - protein, 978 aa, synthetic construct
  REGION 1..978: note = engineered CasX variant
QEIKRINKIRRRLVKDSNTKKAGKTGPMKTLLVRVMTPDLRERLENLRKKPENIPQPISNTSRANLNKLLTDYTEMKKAILHVYWEEFQKDPVGLMSRVAQPASKKIDQNKLKPEMDEKGNLTTAGFACSQCGQPLFVYKLEQVSEKGKAYTNYFGRCNVAEHEKLILLAQLKPEKDSDEAVTYSLGKFGQRALDFYSIHVTKESTHPVKPLAQIAGNRYASTPVGKALSDACMGTIASFLSKYQDIIIEHQKVVKGNQKRLESLRELAGKENLEYPSVTLPPQPHTKEGVDAYNEVIARVRMWVNLNLWQKLKLSRDDAKPLLRLKNFPSFPLVERQANEVDWWDMVCNVKKLINEKKEDGKVFWQNLAGYKRQEALRPYLSSEEDRKKGKKFARYQLGDLLLHLEKKHGEDWGKVYDEAWERIDKKVEGLSKHIKLEEERRSEDAQSKAALTDWLRAKASFVIEGLKEADKDEFCRCELKLQKWYGDLRGKPFAIEAENSILDISGFSKQYNCAFIWQKDGVKKLNLYLIINYFKGGKLRFKKIKPEAFEANRFYTVINKKSGEIVPMEVNFNFDDPNLIILPLAFGKRQGREFIWNDLLSLETGSLKLANGRVIEKTLYNRRTRQDEPALFVALTFERREVLDSSNIKPMNLIGVDRGENIPAVIALTDPEGCPLSRFKDSLGNPTHILRIGESYKEKQRTIQAKKEVEQRRAGGYSRKYASKAKNLADDMVRNTARDLLYYAVTQDAMLIFENLSRGFGRQGKRTFMAERQYTRMEDWLTAKLAYEGLPSKTYLSKTLAQYTSKTCSNCGFTITSADYDRVLEKLKKTATGWMTTINGKELKVEGQITYYNRYKRQNVVKDLSVELDRLSEESVNNDISSWTKGRQGEALSLLKKRFSHRPVQEKFVCLNCGFETHADEQAALNIARSWLFLRSQEYKKYQTNKTTGNTDKRAFVETWQSFYRKKLKEVWKPAV

SEQ ID NO: 47436 - protein, 978 aa, synthetic construct
  REGION 1..978: note = engineered CasX variant
QEIKRINKIRRRLVKDSNTKKAGKTGPMKTLLVRVMTPDLRERLENLRKKPENIPQPISNTSRANLNKLLTDYTEMKKAILHVYWEEFQKDPVGLMSRVAQPASKKIDQNKLKPEMDEKGNLTTAGFACSQCGQPLFVYKLEQVSEKGKAYTNYFGRCNVAEHEKLILLAQLKPEKDSDEAVTYSLGKFGQRALDFYSIHVTKESTHPVKPLAQIAGNRYASAPVGKALSDACMGTIASFLSKYQDIIIEHQKVVKGNQKRLESLRELAGKENLEYPSVTLPPQPHTKEGVDAYNEVIARVRMWVNLNLWQKLKLSRDDAKPLLRLKNFPSFPLVERQANEVDWWDMVCNVKKLINEKKEDGKVFWQNLAGYKRQEALRPYLSSEEDRKKGKKFARYQLGDLLLHLEKKHGEDWGKVYDEAWERIDKKVEGLSKHIKLEEERRSEDAQSKAALTDWLRAKASFVIEGLKEADKDEFCRCELKLQKWYGDLRGKPFAIEAENSILDISGFSKQYNCAFIWQKDGVKKLNLYLIINYFKGGKLRFKKIKPEAFEANRFYTVINKKSGEIVPMEVNFNFDDPNLIILPLAFGKRQGREFIWNDLLSLETGSLKLANGRVIEKTLYNRRTRQDEPALFVALTFERREVLDSSNIKPMNLIGVDRGENIPAVIALTDPEGCPLSRFKDSLGNPTHILRIGESYKEKQRTIQAKKEVEQRRAGGYSRKYASKAKNLADDMVRNTARDLLYYAVTQDAMLIFENLSRGFGRQGKRTFMAERQYTRMEDWLTAKLAYEGLPSKTYLSKTLAQYTSKTCSNCGFTITSADYDRVLEKLKKTATGWMTTINGKELKVEGQITYYNRYKRQNVVKDLSVELDRLSEESVNNDISSWTKGRQGEALSLLKKRFSHRPVQEKFVCLNCGFETHADEQAALNIARSWLFLRSQEYKKYQTNKTTGNTDKRAFVETWQSFYRKKLKEVWKPAV

SEQ ID NO: 47437 - protein, 978 aa, synthetic construct
  REGION 1..978: note = engineered CasX variant
QEIKRINKIRRRLVKDSNTKKAGKTGPMKTLLVRVMTPDLRERLENLRKKPENIPQPISNTSRANLNKLLTDYTEMKKAILHVYWEEFQKDPVGLMSRVAQPASKKIDQNKLKPEMDEKGNLTTAGFACSQCGQPLFVYKLEQVSEKGKAYTNYFGRCNVAEHEKLILLAQLKPEKDSDEAVTYSLGKFGQRALDFYSIHVTKESTHPVKPLAQIAGNRYASVPVGKALSDACMGTIASFLSKYQDIIIEHQKVVKGNQKRLESLRELAGKENLEYPSVTLPPQPHTKEGVDAYNEVIARVRMWVNLNLWQKLKLSRDDAKPLLRLKNFPSFPLVERQANEVDWWDMVCNVKKLINEKKEDGKVFWQNLAGYKRQEALRPYLSSEEDRKKGKKFARYQLGDLLLHLEKKHGEDWGKVYDEAWERIDKKVEGLSKHIKLEEERRSEDAQSKAALTDWLRAKASFVIEGLKEADKDEFCRCELKLQKWYGDLRGKPFAIEAENSILDISGFSKQYNCAFIWQKDGVKKLNLYLIINYFKGGKLRFKKIKPEAFEANRFYTVINKKSGEIVPMEVNFNFDDPNLIILPLAFGKRQGREFIWNDLLSLETGSLKLANGRVIEKTLYNRRTRQDEPALFVALTFERREVLDSSNIKPMNLIGVDRGENIPAVIALTDPEGCPLSRFKDSLGNPTHILRIGESYKEKQRTIQAKKEVEQRRAGGYSRKYASKAKNLADDMVRNTARDLLYYAVTQDAMLIFENLSRGFGRQGKRTFMAERQYTRMEDWLTAKLAYEGLPSKTYLSKTLAQYTSKTCSNCGFTITSADYDRVLEKLKKTATGWMTTINGKELKVEGQITYYNRYKRQNVVKDLSVELDRLSEESVNNDISSWTKGRQGEALSLLKKRFSHRPVQEKFVCLNCGFETHADEQAALNIARSWLFLRSQEYKKYQTNKTTGNTDKRAFVETWQSFYRKKLKEVWKPAV

SEQ ID NO: 47438 - protein, 978 aa, synthetic construct
  REGION 1..978: note = engineered CasX variant
QEIKRINKIRRRLVKDSNTKKAGKTGPMKTLLVRVMTPDLRERLENLRKKPENIPQPISNTSRANLNKLLTDYTEMKKAILHVYWEEFQKDPVGLMSRVAQPASKKIDQNKLKPEMDEKGNLTTAGFACSQCGQPLFVYKLEQVSEKGKAYTNYFGRCNVAEHEKLIKLAQLKPEKDSDEAVTYSLGKFGQRALDFYSIHVTKESTHPVKPLAQIAGNRYASGPVGKALSDACMGTIASFLSKYQDIIIEHQKVVKGNQKRLESLRELAGKENLEYPSVTLPPQPHTKEGVDAYNEVIARVRMWVNLNLWQKLKLSRDDAKPLLRLKNFPSFPLVERQANEVDWWDMVCNVKKLINEKKEDGKVFWQNLAGYKRQEALRPYLSSEEDRKKGKKFARYQLGDLLLHLEKKHGEDWGKVYDEAWERIDKKVEGLSKHIKLEEERRSEDAQSKAALTDWLRAKASFVIEGLKEADKDEFCRCELKLQKWYGDLRGKPFAIEAENSILDISGFSKQYNCAFIWQKDGVKKLNLYLIINYFKGGKLRFKKIKPEAFEANRFYTVINKKSGEIVPMEVNFNFDDPNLIILPLAFGKRQGREFIWNDLLSLETGSLKLANGRVIEKTLYNRRTRQDEPALFVALTFERREVLDSSNIKPMNLIGVDRGENIPAVIALTDPEGCPLSRFKDSLGNPTHILRIGESYKEKQRTIQAKKEVEQRRAGGYSRKYASKAKNLADDMVRNTARDLLYYAVTQDAMLIFENLSRGFGRQGKRTFMAERQYTRMEDWLTAKLAYEGLPSKTYLSKTLAQYTSKTCSNCGFTITSADYDRVLEKLKKTATGWMTTINGKELKVEGQITYYNRYKRQNVVKDLSVELDRLSEESVNNDISSWTKGRQGEALSLLKKRFSHRPVQEKFVCLNCGFETHADEQAALNIARSWLFLRSQEYKKYQTNKTTGNTDKRAFVETWQSFYRKKLKEVWKPAV

SEQ ID NO: 47439 - protein, 977 aa, synthetic construct
  REGION 1..977: note = engineered CasX variant
QEIKRINKIRRRLVKDSNTKKAGKTGPMKTLLVRVMTPDLRERLENLRKKPENIPQPISNTSRANLNKLLTDYTEMKKAILHVYWEEFQKDPVGLMSRVAQPASKKIDQNKLKPEMDEKGNLTTAGFACSQCGQPLFVYKLEQVSEKGKAYTNYFGRCNVAEHEKLILLAQLKPEKDSDEAVTYSLGKFGQRALDFYSIHVTKESTHPVKPLAQIAGNRYASPVGKALSDACMGTIASFLSKYQDIIIEHQKVVKGNQKRLESLRELAGKENLEYPSVTLPPQPHTKEGVDAYNEVIARVRMWVNLNLWQKLKLSRDDAKPLLRLKNFPSFPLVERQANEVDWWDMVCNVKKLINEKKEDGKVFWQNLAGYKRQEALRPYLSSEEDRKKGKKFARYQLGDLLLHLEKKHGEDWGKVYDEAWERIDKKVEGLSKHIKLEEERRSEDAQSKAALTDWLRAKASFVIEGLKEADKDEFCRCELKLQKWYGDLRGKPFAIEAENSILDISGFSKQYNCAFIWQKDGVKKLNLYLIINYFKGGKLRFKKIKPEAFEANRFYTVINKKSGEIVPMEVNFNFDDPNLIILPLAFGKRQGREFIWNDLLSLETGSLKLANGRVIEKTLYNRRTRQDEPALFVALTFERREVLDSSNIKPMNLIGVDRGENIPAVIALTDPEGCPLSRFKDSLGNPTHILRIGESYKEKQRTIQAKKEVEQRRAGGYSRKYASKAKNLADDMVRNTARDLLYYAVTQDAMLIFENLSRGFGRQGKRTFMAERQYTRMEDWLTAKLAYEGLPSKTYLSKTLAQYTSKTCSNCGFTITSADYDRVLEKLKKTATGWMTTINGKELKVEGQITYYNRYKRQNVVKDLSVELDRLSEESVNNDISSWTKGRQGEALSLLKKRFSHRPVQEKFVCLNCGFETHADEQAALNIARSWLFLRSQEYKKYQTNKTTGNTDKRAFVETWQSFYRKKLKEVWKPAV

SEQ ID NO: 47440 - protein, 978 aa, synthetic construct
  REGION 1..978: note = engineered CasX variant
QEIKRINKIRRRLVKDSNTKKAGKTGPMKTLLVRVMTPDLRERLENLRKKPENIPQPISNTSRANLNKLLTDYTEMKKAILHVYWEEFQKDPVGLMSRVAQPASKKIDQNKLKPEMDEKGNLTTAGFACSQCGQPLFVYKLEQVSEKGKAYTNYFGRCNVAEHEKLILLAQLKPEKDSDEAVTYSLGKFGQRALDFYSIHVTKESTHPVKPLAQIAGNRYASYPVGKALSDACMGTIASFLSKYQDIIIEHQKVVKGNQKRLESLRELAGKENLEYPSVTLPPQPHTKEGVDAYNEVIARVRMWVNLNLWQKLKLSRDDAKPLLRLKGFPSFPLVERQANEVDWWDMVCNVKKLINEKKEDGKVFWQNLAGYKRQEALRPYLSSEEDRKKGKKFARYQLGDLLNHLEKKHGEDWGKVYDEAWERIDKKVEGLSKHIKLEEERRSEDAQSKAALTDWLRAKASFVIEGLKEADKDEFCRCELKLQKWYGDLRGKPFAIEAENSILDISGFSKQYNCAFIWQKDGVKKLNLYLIINYFKGGKLRFKKIKPEAFEANRFYTVINKKSGEIVPMEVNFNFDDPNLIILPLAFGKRQGREFIWNDLLSLETGSLKLANGRVIEKTLYNRRTRQDEPALFVALTFERREVLDSSNIKPMNLIGVDRGENIPAVIALTDPEGCPLSRFKDSLGNPTHILRIGESYKEKQRTIQAKKEVEQRRAGGYSRKYASKAKNLADDMVRNTARDLLYYAVTQDAMLIFENLSRGFGRQGKRTFMAERQYTRMEDWLTAKLAYEGLPSKTYLSKTLAQYTSKTCSNCGFTITSADYDRVLEKLKKTATGWMTTINGKELKVEGQITYYNRYKRQNVVKDLSVELDRLSEESVNNDISSWTKGRQGEALSLLKKRFSHRPVQEKFVCLNCGFETHADEQAALNIARSWLFLRSQEYKKYQTNKTTGNTDKRAFVETWQSFYRKKLKEVWKPAV

SEQ ID NO: 47441 - protein, 978 aa, synthetic construct
  REGION 1..978: note = engineered CasX variant
QEIKRINKIRRRLVKDSNTKKAGKTGPMKTLLVRVMTPDLRERLENLRKKPENIPQPISNTSRANLNKLLTDYTEMKKAILHVYWEEFQKDPVGLMSRVAQPASKKIDQNKLKPEMDEKGNLTTAGFACSQCGQPLFVYKLEQVSEKGKAYTNYFGRCNVAEHEKLILLAQLKPEKDSDEAVTYSLGKFGQRALDFYSIHVTKESTHPVKPLAQIAGNRYASHPVGKALSDACMGTIASFLSKYQDIIIEHQKVVKGNQKRLESLRELAGKENLEYPSVTLPPQPHTKEGVDAYNEVIARVRMWVNLNLWQKLKLSRDDAKPLLRLKGFPSFPLVERQANEVDWWDMVCNVKKLINEKKEDGKVFWQNLAGYKRQEALRPYLSSEEDRKKGKKFARYQLGDLLNHLEKKHGEDWGKVYDEAWERIDKKVEGLSKHIKLEEERRSEDAQSKAALTDWLRAKASFVIEGLKEADKDEFCRCELKLQKWYGDLRGKPFAIEAENSILDISGFSKQYNCAFIWQKDGVKKLNLYLIINYFKGGKLRFKKIKPEAFEANRFYTVINKKSGEIVPMEVNFNFDDPNLIILPLAFGKRQGREFIWNDLLSLETGSLKLANGRVIEKTLYNRRTRQDEPALFVALTFERREVLDSSNIKPMNLIGVDRGENIPAVIALTDPEGCPLSRFKDSLGNPTHILRIGESYKEKQRTIQAKKEVEQRRAGGYSRKYASKAKNLADDMVRNTARDLLYYAVTQDAMLIFENLSRGFGRQGKRTFMAERQYTRMEDWLTAKLAYEGLPSKTYLSKTLAQYTSKTCSNCGFTITSADYDRVLEKLKKTATGWMTTINGKELKVEGQITYYNRYKRQNVVKDLSVELDRLSEESVNNDISSWTKGRQGEALSLLKKRFSHRPVQEKFVCLNCGFETHADEQAALNIARSWLFLRSQEYKKYQTNKTTGNTDKRAFVETWQSFYRKKLKEVWKPAV

SEQ ID NO: 47442 - protein, 978 aa, synthetic construct
  REGION 1..978: note = engineered CasX variant
QEIKRINKIRRRLVKDSNTKKAGKTGPMKTLLVRVMTPDLRERLENLRKKPENIPQPISNTSRANLNKLLTDYTEMKKAILHVYWEEFQKDPVGLMSRVAQPASKKIDQNKLKPEMDEKGNLTTAGFACSQCGQPLFVYKLEQVSEKGKAYTNYFGRCNVAEHEKLILLAQLKPEKDSDEAVTYSLGKFGQRALDFYSIHVTKESTHPVKPLAQIAGNRYASSPVGKALSDACMGTIASFLSKYQDIIIEHQKVVKGNQKRLESLRELAGKENLEYPSVTLPPQPHTKEGVDAYNEVIARVRMWVNLNLWQKLKLSRDDAKPLLRLKGFPSFPLVERQANEVDWWDMVCNVKKLINEKKEDGKVFWQNLAGYKRQEALRPYLSSEEDRKKGKKFARYQLGDLLNHLEKKHGEDWGKVYDEAWERIDKKVEGLSKHIKLEEERRSEDAQSKAALTDWLRAKASFVIEGLKEADKDEFCRCELKLQKWYGDLRGKPFAIEAENSILDISGFSKQYNCAFIWQKDGVKKLNLYLIINYFKGGKLRFKKIKPEAFEANRFYTVINKKSGEIVPMEVNFNFDDPNLIILPLAFGKRQGREFIWNDLLSLETGSLKLANGRVIEKTLYNRRTRQDEPALFVALTFERREVLDSSNIKPMNLIGVDRGENIPAVIALTDPEGCPLSRFKDSLGNPTHILRIGESYKEKQRTIQAKKEVEQRRAGGYSRKYASKAKNLADDMVRNTARDLLYYAVTQDAMLIFENLSRGFGRQGKRTFMAERQYTRMEDWLTAKLAYEGLPSKTYLSKTLAQYTSKTCSNCGFTITSADYDRVLEKLKKTATGWMTTINGKELKVEGQITYYNRYKRQNVVKDLSVELDRLSEESVNNDISSWTKGRQGEALSLLKKRFSHRPVQEKFVCLNCGFETHADEQAALNIARSWLFLRSQEYKKYQTNKTTGNTDKRAFVETWQSFYRKKLKEVWKPAV

SEQ ID NO: 47443 - protein, 978 aa, synthetic construct
  REGION 1..978: note = engineered CasX variant
QEIKRINKIRRRLVKDSNTKKAGKTGPMKTLLVRVMTPDLRERLENLRKKPENIPQPISNTSRANLNKLLTDYTEMKKAILHVYWEEFQKDPVGLMSRVAQPASKKIDQNKLKPEMDEKGNLTTAGFACSQCGQPLFVYKLEQVSEKGKAYTNYFGRCNVAEHEKLILLAQLKPEKDSDEAVTYSLGKFGQRALDFYSIHVTKESTHPVKPLAQIAGNRYASTPVGKALSDACMGTIASFLSKYQDIIIEHQKVVKGNQKRLESLRELAGKENLEYPSVTLPPQPHTKEGVDAYNEVIARVRMWVNLNLWQKLKLSRDDAKPLLRLKGFPSFPLVERQANEVDWWDMVCNVKKLINEKKEDGKVFWQNLAGYKRQEALRPYLSSEEDRKKGKKFARYQLGDLLNHLEKKHGEDWGKVYDEAWERIDKKVEGLSKHIKLEEERRSEDAQSKAALTDWLRAKASFVIEGLKEADKDEFCRCELKLQKWYGDLRGKPFAIEAENSILDISGFSKQYNCAFIWQKDGVKKLNLYLIINYFKGGKLRFKKIKPEAFEANRFYTVINKKSGEIVPMEVNFNFDDPNLIILPLAFGKRQGREFIWNDLLSLETGSLKLANGRVIEKTLYNRRTRQDEPALFVALTFERREVLDSSNIKPMNLIGVDRGENIPAVIALTDPEGCPLSRFKDSLGNPTHILRIGESYKEKQRTIQAKKEVEQRRAGGYSRKYASKAKNLADDMVRNTARDLLYYAVTQDAMLIFENLSRGFGRQGKRTFMAERQYTRMEDWLTAKLAYEGLPSKTYLSKTLAQYTSKTCSNCGFTITSADYDRVLEKLKKTATGWMTTINGKELKVEGQITYYNRYKRQNVVKDLSVELDRLSEESVNNDISSWTKGRQGEALSLLKKRFSHRPVQEKFVCLNCGFETHADEQAALNIARSWLFLRSQEYKKYQTNKTTGNTDKRAFVETWQSFYRKKLKEVWKPAV

SEQ ID NO: 47444 - protein, 978 aa, synthetic construct
  REGION 1..978: note = engineered CasX variant
QEIKRINKIRRRLVKDSNTKKAGKTGPMKTLLVRVMTPDLRERLENLRKKPENIPQPISNTSRANLNKLLTDYTEMKKAILHVYWEEFQKDPVGLMSRVAQPASKKIDQNKLKPEMDEKGNLTTAGFACSQCGQPLFVYKLEQVSEKGKAYTNYFGRCNVAEHEKLILLAQLKPEKDSDEAVTYSLGKFGQRALDFYSIHVTKESTHPVKPLAQIAGNRYASAPVGKALSDACMGTIASFLSKYQDIIIEHQKVVKGNQKRLESLRELAGKENLEYPSVTLPPQPHTKEGVDAYNEVIARVRMWVNLNLWQKLKLSRDDAKPLLRLKGFPSFPLVERQANEVDWWDMVCNVKKLINEKKEDGKVFWQNLAGYKRQEALRPYLSSEEDRKKGKKFARYQLGDLLNHLEKKHGEDWGKVYDEAWERIDKKVEGLSKHIKLEEERRSEDAQSKAALTDWLRAKASFVIEGLKEADKDEFCRCELKLQKWYGDLRGKPFAIEAENSILDISGFSKQYNCAFIWQKDGVKKLNLYLIINYFKGGKLRFKKIKPEAFEANRFYTVINKKSGEIVPMEVNFNFDDPNLIILPLAFGKRQGREFIWNDLLSLETGSLKLANGRVIEKTLYNRRTRQDEPALFVALTFERREVLDSSNIKPMNLIGVDRGENIPAVIALTDPEGCPLSRFKDSLGNPTHILRIGESYKEKQRTIQAKKEVEQRRAGGYSRKYASKAKNLADDMVRNTARDLLYYAVTQDAMLIFENLSRGFGRQGKRTFMAERQYTRMEDWLTAKLAYEGLPSKTYLSKTLAQYTSKTCSNCGFTITSADYDRVLEKLKKTATGWMTTINGKELKVEGQITYYNRYKRQNVVKDLSVELDRLSEESVNNDISSWTKGRQGEALSLLKKRFSHRPVQEKFVCLNCGFETHADEQAALNIARSWLFLRSQEYKKYQTNKTTGNTDKRAFVETWQSFYRKKLKEVWKPAV

SEQ ID NO: 47445 - protein, 978 aa, synthetic construct
  REGION 1..978: note = engineered CasX variant
QEIKRINKIRRRLVKDSNTKKAGKTGPMKTLLVRVMTPDLRERLENLRKKPENIPQPISNTSRANLNKLLTDYTEMKKAILHVYWEEFQKDPVGLMSRVAQPASKKIDQNKLKPEMDEKGNLTTAGFACSQCGQPLFVYKLEQVSEKGKAYTNYFGRCNVAEHEKLILLAQLKPEKDSDEAVTYSLGKFGQRALDFYSIHVTKESTHPVKPLAQIAGNRYASVPVGKALSDACMGTIASFLSKYQDIIIEHQKVVKGNQKRLESLRELAGKENLEYPSVTLPPQPHTKEGVDAYNEVIARVRMWVNLNLWQKLKLSRDDAKPLLRLKGFPSFPLVERQANEVDWWDMVCNVKKLINEKKEDGKVFWQNLAGYKRQEALRPYLSSEEDRKKGKKFARYQLGDLLNHLEKKHGEDWGKVYDEAWERIDKKVEGLSKHIKLEEERRSEDAQSKAALTDWLRAKASFVIEGLKEADKDEFCRCELKLQKWYGDLRGKPFAIEAENSILDISGFSKQYNCAFIWQKDGVKKLNLYLIINYFKGGKLRFKKIKPEAFEANRFYTVINKKSGEIVPMEVNFNFDDPNLIILPLAFGKRQGREFIWNDLLSLETGSLKLANGRVIEKTLYNRRTRQDEPALFVALTFERREVLDSSNIKPMNLIGVDRGENIPAVIALTDPEGCPLSRFKDSLGNPTHILRIGESYKEKQRTIQAKKEVEQRRAGGYSRKYASKAKNLADDMVRNTARDLLYYAVTQDAMLIFENLSRGFGRQGKRTFMAERQYTRMEDWLTAKLAYEGLPSKTYLSKTLAQYTSKTCSNCGFTITSADYDRVLEKLKKTATGWMTTINGKELKVEGQITYYNRYKRQNVVKDLSVELDRLSEESVNNDISSWTKGRQGEALSLLKKRFSHRPVQEKFVCLNCGFETHADEQAALNIARSWLFLRSQEYKKYQTNKTTGNTDKRAFVETWQSFYRKKLKEVWKPAV

SEQ ID NO: 47446 - protein, 978 aa, synthetic construct
  REGION 1..978: note = engineered CasX variant
QEIKRINKIRRRLVKDSNTKKAGKTGPMKTLLVRVMTPDLRERLENLRKKPENIPQPISNTSRANLNKLLTDYTEMKKAILHVYWEEFQKDPVGLMSRVAQPASKKIDQNKLKPEMDEKGNLTTAGFACSQCGQPLFVYKLEQVSEKGKAYTNYFGRCNVAEHEKLIKLAQLKPEKDSDEAVTYSLGKFGQRALDFYSIHVTKESTHPVKPLAQIAGNRYASGPVGKALSDACMGTIASFLSKYQDIIIEHQKVVKGNQKRLESLRELAGKENLEYPSVTLPPQPHTKEGVDAYNEVIARVRMWVNLNLWQKLKLSRDDAKPLLRLKGFPSFPLVERQANEVDWWDMVCNVKKLINEKKEDGKVFWQNLAGYKRQEALRPYLSSEEDRKKGKKFARYQLGDLLNHLEKKHGEDWGKVYDEAWERIDKKVEGLSKHIKLEEERRSEDAQSKAALTDWLRAKASFVIEGLKEADKDEFCRCELKLQKWYGDLRGKPFAIEAENSILDISGFSKQYNCAFIWQKDGVKKLNLYLIINYFKGGKLRFKKIKPEAFEANRFYTVINKKSGEIVPMEVNFNFDDPNLIILPLAFGKRQGREFIWNDLLSLETGSLKLANGRVIEKTLYNRRTRQDEPALFVALTFERREVLDSSNIKPMNLIGVDRGENIPAVIALTDPEGCPLSRFKDSLGNPTHILRIGESYKEKQRTIQAKKEVEQRRAGGYSRKYASKAKNLADDMVRNTARDLLYYAVTQDAMLIFENLSRGFGRQGKRTFMAERQYTRMEDWLTAKLAYEGLPSKTYLSKTLAQYTSKTCSNCGFTITSADYDRVLEKLKKTATGWMTTINGKELKVEGQITYYNRYKRQNVVKDLSVELDRLSEESVNNDISSWTKGRQGEALSLLKKRFSHRPVQEKFVCLNCGFETHADEQAALNIARSWLFLRSQEYKKYQTNKTTGNTDKRAFVETWQSFYRKKLKEVWKPAV

SEQ ID NO: 47447 - protein, 977 aa, synthetic construct
  REGION 1..977: note = engineered CasX variant
QEIKRINKIRRRLVKDSNTKKAGKTGPMKTLLVRVMTPDLRERLENLRKKPENIPQPISNTSRANLNKLLTDYTEMKKAILHVYWEEFQKDPVGLMSRVAQPASKKIDQNKLKPEMDEKGNLTTAGFACSQCGQPLFVYKLEQVSEKGKAYTNYFGRCNVAEHEKLILLAQLKPEKDSDEAVTYSLGKFGQRALDFYSIHVTKESTHPVKPLAQIAGNRYASPVGKALSDACMGTIASFLSKYQDIIIEHQKVVKGNQKRLESLRELAGKENLEYPSVTLPPQPHTKEGVDAYNEVIARVRMWVNLNLWQKLKLSRDDAKPLLRLKGFPSFPLVERQANEVDWWDMVCNVKKLINEKKEDGKVFWQNLAGYKRQEALRPYLSSEEDRKKGKKFARYQLGDLLNHLEKKHGEDWGKVYDEAWERIDKKVEGLSKHIKLEEERRSEDAQSKAALTDWLRAKASFVIEGLKEADKDEFCRCELKLQKWYGDLRGKPFAIEAENSILDISGFSKQYNCAFIWQKDGVKKLNLYLIINYFKGGKLRFKKIKPEAFEANRFYTVINKKSGEIVPMEVNFNFDDPNLIILPLAFGKRQGREFIWNDLLSLETGSLKLANGRVIEKTLYNRRTRQDEPALFVALTFERREVLDSSNIKPMNLIGVDRGENIPAVIALTDPEGCPLSRFKDSLGNPTHILRIGESYKEKQRTIQAKKEVEQRRAGGYSRKYASKAKNLADDMVRNTARDLLYYAVTQDAMLIFENLSRGFGRQGKRTFMAERQYTRMEDWLTAKLAYEGLPSKTYLSKTLAQYTSKTCSNCGFTITSADYDRVLEKLKKTATGWMTTINGKELKVEGQITYYNRYKRQNVVKDLSVELDRLSEESVNNDISSWTKGRQGEALSLLKKRFSHRPVQEKFVCLNCGFETHADEQAALNIARSWLFLRSQEYKKYQTNKTTGNTDKRAFVETWQSFYRKKLKEVWKPAV

SEQ ID NO: 47448 - protein, 978 aa, synthetic construct
  REGION 1..978: note = engineered CasX variant
QEIKRINKIRRRLVKDSNTKKAGKTGPMKTLLVRVMTPDLRERLENLRKKPENIPQPISNTSRANLNKLLTDYTEMKKAILHVYWEEFQKDPVGLMSRVAQPASKKIDQNKLKPEMDEKGNLTTAGFACSQCGQPLFVYKLEQVSEKGKAYTNYFGRCNVAEHEKLILLAQLKPEKDSDEAVTYSLGKFGQRALDFYSIHVTKESTHPVKPLAQIAGNRYASYPVGKALSDACMGTIASFLSKYQDIIIEHQKVVKGNQKRLESLRELAGKENLEYPSVTLPPQPHTKEGVDAYNEVIARVRMWVNLNLWQKLKLSRDDAKPLLRLKGFPSFPLVERQANEVDWWDMVCNVKKLINEKKEDGKVFWQNLAGYKRQEALRPYLSSEEDRKKGKKFARYQLGDLLWHLEKKHGEDWGKVYDEAWERIDKKVEGLSKHIKLEEERRSEDAQSKAALTDWLRAKASFVIEGLKEADKDEFCRCELKLQKWYGDLRGKPFAIEAENSILDISGFSKQYNCAFIWQKDGVKKLNLYLIINYFKGGKLRFKKIKPEAFEANRFYTVINKKSGEIVPMEVNFNFDDPNLIILPLAFGKRQGREFIWNDLLSLETGSLKLANGRVIEKTLYNRRTRQDEPALFVALTFERREVLDSSNIKPMNLIGVDRGENIPAVIALTDPEGCPLSRFKDSLGNPTHILRIGESYKEKQRTIQAKKEVEQRRAGGYSRKYASKAKNLADDMVRNTARDLLYYAVTQDAMLIFENLSRGFGRQGKRTFMAERQYTRMEDWLTAKLAYEGLPSKTYLSKTLAQYTSKTCSNCGFTITSADYDRVLEKLKKTATGWMTTINGKELKVEGQITYYNRYKRQNVVKDLSVELDRLSEESVNNDISSWTKGRQGEALSLLKKRFSHRPVQEKFVCLNCGFETHADEQAALNIARSWLFLRSQEYKKYQTNKTTGNTDKRAFVETWQSFYRKKLKEVWKPAV

SEQ ID NO: 47449 - protein, 978 aa, synthetic construct
  REGION 1..978: note = engineered CasX variant
QEIKRINKIRRRLVKDSNTKKAGKTGPMKTLLVRVMTPDLRERLENLRKKPENIPQPISNTSRANLNKLLTDYTEMKKAILHVYWEEFQKDPVGLMSRVAQPASKKIDQNKLKPEMDEKGNLTTAGFACSQCGQPLFVYKLEQVSEKGKAYTNYFGRCNVAEHEKLILLAQLKPEKDSDEAVTYSLGKFGQRALDFYSIHVTKESTHPVKPLAQIAGNRYASHPVGKALSDACMGTIASFLSKYQDIIIEHQKVVKGNQKRLESLRELAGKENLEYPSVTLPPQPHTKEGVDAYNEVIARVRMWVNLNLWQKLKLSRDDAKPLLRLKGFPSFPLVERQANEVDWWDMVCNVKKLINEKKEDGKVFWQNLAGYKRQEALRPYLSSEEDRKKGKKFARYQLGDLLWHLEKKHGEDWGKVYDEAWERIDKKVEGLSKHIKLEEERRSEDAQSKAALTDWLRAKASFVIEGLKEADKDEFCRCELKLQKWYGDLRGKPFAIEAENSILDISGFSKQYNCAFIWQKDGVKKLNLYLIINYFKGGKLRFKKIKPEAFEANRFYTVINKKSGEIVPMEVNFNFDDPNLIILPLAFGKRQGREFIWNDLLSLETGSLKLANGRVIEKTLYNRRTRQDEPALFVALTFERREVLDSSNIKPMNLIGVDRGENIPAVIALTDPEGCPLSRFKDSLGNPTHILRIGESYKEKQRTIQAKKEVEQRRAGGYSRKYASKAKNLADDMVRNTARDLLYYAVTQDAMLIFENLSRGFGRQGKRTFMAERQYTRMEDWLTAKLAYEGLPSKTYLSKTLAQYTSKTCSNCGFTITSADYDRVLEKLKKTATGWMTTINGKELKVEGQITYYNRYKRQNVVKDLSVELDRLSEESVNNDISSWTKGRQGEALSLLKKRFSHRPVQEKFVCLNCGFETHADEQAALNIARSWLFLRSQEYKKYQTNKTTGNTDKRAFVETWQSFYRKKLKEVWKPAV

SEQ ID NO: 47450 - protein, 978 aa, synthetic construct
  REGION 1..978: note = engineered CasX variant
QEIKRINKIRRRLVKDSNTKKAGKTGPMKTLLVRVMTPDLRERLENLRKKPENIPQPISNTSRANLNKLLTDYTEMKKAILHVYWEEFQKDPVGLMSRVAQPASKKIDQNKLKPEMDEKGNLTTAGFACSQCGQPLFVYKLEQVSEKGKAYTNYFGRCNVAEHEKLILLAQLKPEKDSDEAVTYSLGKFGQRALDFYSIHVTKESTHPVKPLAQIAGNRYASSPVGKALSDACMGTIASFLSKYQDIIIEHQKVVKGNQKRLESLRELAGKENLEYPSVTLPPQPHTKEGVDAYNEVIARVRMWVNLNLWQKLKLSRDDAKPLLRLKGFPSFPLVERQANEVDWWDMVCNVKKLINEKKEDGKVFWQNLAGYKRQEALRPYLSSEEDRKKGKKFARYQLGDLLWHLEKKHGEDWGKVYDEAWERIDKKVEGLSKHIKLEEERRSEDAQSKAALTDWLRAKASFVIEGLKEADKDEFCRCELKLQKWYGDLRGKPFAIEAENSILDISGFSKQYNCAFIWQKDGVKKLNLYLIINYFKGGKLRFKKIKPEAFEANRFYTVINKKSGEIVPMEVNFNFDDPNLIILPLAFGKRQGREFIWNDLLSLETGSLKLANGRVIEKTLYNRRTRQDEPALFVALTFERREVLDSSNIKPMNLIGVDRGENIPAVIALTDPEGCPLSRFKDSLGNPTHILRIGESYKEKQRTIQAKKEVEQRRAGGYSRKYASKAKNLADDMVRNTARDLLYYAVTQDAMLIFENLSRGFGRQGKRTFMAERQYTRMEDWLTAKLAYEGLPSKTYLSKTLAQYTSKTCSNCGFTITSADYDRVLEKLKKTATGWMTTINGKELKVEGQITYYNRYKRQNVVKDLSVELDRLSEESVNNDISSWTKGRQGEALSLLKKRFSHRPVQEKFVCLNCGFETHADEQAALNIARSWLFLRSQEYKKYQTNKTTGNTDKRAFVETWQSFYRKKLKEVWKPAV

SEQ ID NO: 47451 - protein, 978 aa, synthetic construct
  REGION 1..978: note = engineered CasX variant
QEIKRINKIRRRLVKDSNTKKAGKTGPMKTLLVRVMTPDLRERLENLRKKPENIPQPISNTSRANLNKLLTDYTEMKKAILHVYWEEFQKDPVGLMSRVAQPASKKIDQNKLKPEMDEKGNLTTAGFACSQCGQPLFVYKLEQVSEKGKAYTNYFGRCNVAEHEKLILLAQLKPEKDSDEAVTYSLGKFGQRALDFYSIHVTKESTHPVKPLAQIAGNRYASTPVGKALSDACMGTIASFLSKYQDIIIEHQKVVKGNQKRLESLRELAGKENLEYPSVTLPPQPHTKEGVDAYNEVIARVRMWVNLNLWQKLKLSRDDAKPLLRLKGFPSFPLVERQANEVDWWDMVCNVKKLINEKKEDGKVFWQNLAGYKRQEALRPYLSSEEDRKKGKKFARYQLGDLLWHLEKKHGEDWGKVYDEAWERIDKKVEGLSKHIKLEEERRSEDAQSKAALTDWLRAKASFVIEGLKEADKDEFCRCELKLQKWYGDLRGKPFAIEAENSILDISGFSKQYNCAFIWQKDGVKKLNLYLIINYFKGGKLRFKKIKPEAFEANRFYTVINKKSGEIVPMEVNFNFDDPNLIILPLAFGKRQGREFIWNDLLSLETGSLKLANGRVIEKTLYNRRTRQDEPALFVALTFERREVLDSSNIKPMNLIGVDRGENIPAVIALTDPEGCPLSRFKDSLGNPTHILRIGESYKEKQRTIQAKKEVEQRRAGGYSRKYASKAKNLADDMVRNTARDLLYYAVTQDAMLIFENLSRGFGRQGKRTFMAERQYTRMEDWLTAKLAYEGLPSKTYLSKTLAQYTSKTCSNCGFTITSADYDRVLEKLKKTATGWMTTINGKELKVEGQITYYNRYKRQNVVKDLSVELDRLSEESVNNDISSWTKGRQGEALSLLKKRFSHRPVQEKFVCLNCGFETHADEQAALNIARSWLFLRSQEYKKYQTNKTTGNTDKRAFVETWQSFYRKKLKEVWKPAV

SEQ ID NO: 47452 - protein, 978 aa, synthetic construct
  REGION 1..978: note = engineered CasX variant
QEIKRINKIRRRLVKDSNTKKAGKTGPMKTLLVRVMTPDLRERLENLRKKPENIPQPISNTSRANLNKLLTDYTEMKKAILHVYWEEFQKDPVGLMSRVAQPASKKIDQNKLKPEMDEKGNLTTAGFACSQCGQPLFVYKLEQVSEKGKAYTNYFGRCNVAEHEKLILLAQLKPEKDSDEAVTYSLGKFGQRALDFYSIHVTKESTHPVKPLAQIAGNRYASAPVGKALSDACMGTIASFLSKYQDIIIEHQKVVKGNQKRLESLRELAGKENLEYPSVTLPPQPHTKEGVDAYNEVIARVRMWVNLNLWQKLKLSRDDAKPLLRLKGFPSFPLVERQANEVDWWDMVCNVKKLINEKKEDGKVFWQNLAGYKRQEALRPYLSSEEDRKKGKKFARYQLGDLLWHLEKKHGEDWGKVYDEAWERIDKKVEGLSKHIKLEEERRSEDAQSKAALTDWLRAKASFVIEGLKEADKDEFCRCELKLQKWYGDLRGKPFAIEAENSILDISGFSKQYNCAFIWQKDGVKKLNLYLIINYFKGGKLRFKKIKPEAFEANRFYTVINKKSGEIVPMEVNFNFDDPNLIILPLAFGKRQGREFIWNDLLSLETGSLKLANGRVIEKTLYNRRTRQDEPALFVALTFERREVLDSSNIKPMNLIGVDRGENIPAVIALTDPEGCPLSRFKDSLGNPTHILRIGESYKEKQRTIQAKKEVEQRRAGGYSRKYASKAKNLADDMVRNTARDLLYYAVTQDAMLIFENLSRGFGRQGKRTFMAERQYTRMEDWLTAKLAYEGLPSKTYLSKTLAQYTSKTCSNCGFTITSADYDRVLEKLKKTATGWMTTINGKELKVEGQITYYNRYKRQNVVKDLSVELDRLSEESVNNDISSWTKGRQGEALSLLKKRFSHRPVQEKFVCLNCGFETHADEQAALNIARSWLFLRSQEYKKYQTNKTTGNTDKRAFVETWQSFYRKKLKEVWKPAV

SEQ ID NO: 47453 - protein, 978 aa, synthetic construct
  REGION 1..978: note = engineered CasX variant
QEIKRINKIRRRLVKDSNTKKAGKTGPMKTLLVRVMTPDLRERLENLRKKPENIPQPISNTSRANLNKLLTDYTEMKKAILHVYWEEFQKDPVGLMSRVAQPASKKIDQNKLKPEMDEKGNLTTAGFACSQCGQPLFVYKLEQVSEKGKAYTNYFGRCNVAEHEKLILLAQLKPEKDSDEAVTYSLGKFGQRALDFYSIHVTKESTHPVKPLAQIAGNRYASVPVGKALSDACMGTIASFLSKYQDIIIEHQKVVKGNQKRLESLRELAGKENLEYPSVTLPPQPHTKEGVDAYNEVIARVRMWVNLNLWQKLKLSRDDAKPLLRLKGFPSFPLVERQANEVDWWDMVCNVKKLINEKKEDGKVFWQNLAGYKRQEALRPYLSSEEDRKKGKKFARYQLGDLLWHLEKKHGEDWGKVYDEAWERIDKKVEGLSKHIKLEEERRSEDAQSKAALTDWLRAKASFVIEGLKEADKDEFCRCELKLQKWYGDLRGKPFAIEAENSILDISGFSKQYNCAFIWQKDGVKKLNLYLIINYFKGGKLRFKKIKPEAFEANRFYTVINKKSGEIVPMEVNFNFDDPNLIILPLAFGKRQGREFIWNDLLSLETGSLKLANGRVIEKTLYNRRTRQDEPALFVALTFERREVLDSSNIKPMNLIGVDRGENIPAVIALTDPEGCPLSRFKDSLGNPTHILRIGESYKEKQRTIQAKKEVEQRRAGGYSRKYASKAKNLADDMVRNTARDLLYYAVTQDAMLIFENLSRGFGRQGKRTFMAERQYTRMEDWLTAKLAYEGLPSKTYLSKTLAQYTSKTCSNCGFTITSADYDRVLEKLKKTATGWMTTINGKELKVEGQITYYNRYKRQNVVKDLSVELDRLSEESVNNDISSWTKGRQGEALSLLKKRFSHRPVQEKFVCLNCGFETHADEQAALNIARSWLFLRSQEYKKYQTNKTTGNTDKRAFVETWQSFYRKKLKEVWKPAV

SEQ ID NO: 47454 - protein, 978 aa, synthetic construct
  REGION 1..978: note = engineered CasX variant
QEIKRINKIRRRLVKDSNTKKAGKTGPMKTLLVRVMTPDLRERLENLRKKPENIPQPISNTSRANLNKLLTDYTEMKKAILHVYWEEFQKDPVGLMSRVAQPASKKIDQNKLKPEMDEKGNLTTAGFACSQCGQPLFVYKLEQVSEKGKAYTNYFGRCNVAEHEKLIKLAQLKPEKDSDEAVTYSLGKFGQRALDFYSIHVTKESTHPVKPLAQIAGNRYASGPVGKALSDACMGTIASFLSKYQDIIIEHQKVVKGNQKRLESLRELAGKENLEYPSVTLPPQPHTKEGVDAYNEVIARVRMWVNLNLWQKLKLSRDDAKPLLRLKGFPSFPLVERQANEVDWWDMVCNVKKLINEKKEDGKVFWQNLAGYKRQEALRPYLSSEEDRKKGKKFARYQLGDLLWHLEKKHGEDWGKVYDEAWERIDKKVEGLSKHIKLEEERRSEDAQSKAALTDWLRAKASFVIEGLKEADKDEFCRCELKLQKWYGDLRGKPFAIEAENSILDISGFSKQYNCAFIWQKDGVKKLNLYLIINYFKGGKLRFKKIKPEAFEANRFYTVINKKSGEIVPMEVNFNFDDPNLIILPLAFGKRQGREFIWNDLLSLETGSLKLANGRVIEKTLYNRRTRQDEPALFVALTFERREVLDSSNIKPMNLIGVDRGENIPAVIALTDPEGCPLSRFKDSLGNPTHILRIGESYKEKQRTIQAKKEVEQRRAGGYSRKYASKAKNLADDMVRNTARDLLYYAVTQDAMLIFENLSRGFGRQGKRTFMAERQYTRMEDWLTAKLAYEGLPSKTYLSKTLAQYTSKTCSNCGFTITSADYDRVLEKLKKTATGWMTTINGKELKVEGQITYYNRYKRQNVVKDLSVELDRLSEESVNNDISSWTKGRQGEALSLLKKRFSHRPVQEKFVCLNCGFETHADEQAALNIARSWLFLRSQEYKKYQTNKTTGNTDKRAFVETWQSFYRKKLKEVWKPAV

SEQ ID NO: 47455 - protein, 977 aa, synthetic construct
  REGION 1..977: note = engineered CasX variant
QEIKRINKIRRRLVKDSNTKKAGKTGPMKTLLVRVMTPDLRERLENLRKKPENIPQPISNTSRANLNKLLTDYTEMKKAILHVYWEEFQKDPVGLMSRVAQPASKKIDQNKLKPEMDEKGNLTTAGFACSQCGQPLFVYKLEQVSEKGKAYTNYFGRCNVAEHEKLILLAQLKPEKDSDEAVTYSLGKFGQRALDFYSIHVTKESTHPVKPLAQIAGNRYASPVGKALSDACMGTIASFLSKYQDIIIEHQKVVKGNQKRLESLRELAGKENLEYPSVTLPPQPHTKEGVDAYNEVIARVRMWVNLNLWQKLKLSRDDAKPLLRLKGFPSFPLVERQANEVDWWDMVCNVKKLINEKKEDGKVFWQNLAGYKRQEALRPYLSSEEDRKKGKKFARYQLGDLLWHLEKKHGEDWGKVYDEAWERIDKKVEGLSKHIKLEEERRSEDAQSKAALTDWLRAKASFVIEGLKEADKDEFCRCELKLQKWYGDLRGKPFAIEAENSILDISGFSKQYNCAFIWQKDGVKKLNLYLIINYFKGGKLRFKKIKPEAFEANRFYTVINKKSGEIVPMEVNFNFDDPNLIILPLAFGKRQGREFIWNDLLSLETGSLKLANGRVIEKTLYNRRTRQDEPALFVALTFERREVLDSSNIKPMNLIGVDRGENIPAVIALTDPEGCPLSRFKDSLGNPTHILRIGESYKEKQRTIQAKKEVEQRRAGGYSRKYASKAKNLADDMVRNTARDLLYYAVTQDAMLIFENLSRGFGRQGKRTFMAERQYTRMEDWLTAKLAYEGLPSKTYLSKTLAQYTSKTCSNCGFTITSADYDRVLEKLKKTATGWMTTINGKELKVEGQITYYNRYKRQNVVKDLSVELDRLSEESVNNDISSWTKGRQGEALSLLKKRFSHRPVQEKFVCLNCGFETHADEQAALNIARSWLFLRSQEYKKYQTNKTTGNTDKRAFVETWQSFYRKKLKEVWKPAV

SEQ ID NO: 47456 - protein, 978 aa, synthetic construct
  REGION 1..978: note = engineered CasX variant
QEIKRINKIRRRLVKDSNTKKAGKTGPMKTLLVRVMTPDLRERLENLRKKPENIPQPISNTSRANLNKLLTDYTEMKKAILHVYWEEFQKDPVGLMSRVAQPASKKIDQNKLKPEMDEKGNLTTAGFACSQCGQPLFVYKLEQVSEKGKAYTNYFGRCNVAEHEKLILLAQLKPEKDSDEAVTYSLGKFGQRALDFYSIHVTKESTHPVKPLAQIAGNRYASYPVGKALSDACMGTIASFLSKYQDIIIEHQKVVKGNQKRLESLRELAGKENLEYPSVTLPPQPHTKEGVDAYNEVIARVRMWVNLNLWQKLKLSRDDAKPLLRLKGFPSFPLVERQANEVDWWDMVCNVKKLINEKKEDGKVFWQNLAGYKRQEALRPYLSSEEDRKKGKKFARYQLGDLLLHLYKKHGEDWGKVYDEAWERIDKKVEGLSKHIKLEEERRSEDAQSKAALTDWLRAKASFVIEGLKEADKDEFCRCELKLQKWYGDLRGKPFAIEAENSILDISGFSKQYNCAFIWQKDGVKKLNLYLIINYFKGGKLRFKKIKPEAFEANRFYTVINKKSGEIVPMEVNFNFDDPNLIILPLAFGKRQGREFIWNDLLSLETGSLKLANGRVIEKTLYNRRTRQDEPALFVALTFERREVLDSSNIKPMNLIGVDRGENIPAVIALTDPEGCPLSRFKDSLGNPTHILRIGESYKEKQRTIQAKKEVEQRRAGGYSRKYASKAKNLADDMVRNTARDLLYYAVTQDAMLIFENLSRGFGRQGKRTFMAERQYTRMEDWLTAKLAYEGLPSKTYLSKTLAQYTSKTCSNCGFTITSADYDRVLEKLKKTATGWMTTINGKELKVEGQITYYNRYKRQNVVKDLSVELDRLSEESVNNDISSWTKGRQGEALSLLKKRFSHRPVQEKFVCLNCGFETHADEQAALNIARSWLFLRSQEYKKYQTNKTTGNTDKRAFVETWQSFYRKKLKEVWKPAV

SEQ ID NO: 47457 - protein, 978 aa, synthetic construct
  REGION 1..978: note = engineered CasX variant
QEIKRINKIRRRLVKDSNTKKAGKTGPMKTLLVRVMTPDLRERLENLRKKPENIPQPISNTSRANLNKLLTDYTEMKKAILHVYWEEFQKDPVGLMSRVAQPASKKIDQNKLKPEMDEKGNLTTAGFACSQCGQPLFVYKLEQVSEKGKAYTNYFGRCNVAEHEKLILLAQLKPEKDSDEAVTYSLGKFGQRALDFYSIHVTKESTHPVKPLAQIAGNRYASHPVGKALSDACMGTIASFLSKYQDIIIEHQKVVKGNQKRLESLRELAGKENLEYPSVTLPPQPHTKEGVDAYNEVIARVRMWVNLNLWQKLKLSRDDAKPLLRLKGFPSFPLVERQANEVDWWDMVCNVKKLINEKKEDGKVFWQNLAGYKRQEALRPYLSSEEDRKKGKKFARYQLGDLLLHLYKKHGEDWGKVYDEAWERIDKKVEGLSKHIKLEEERRSEDAQSKAALTDWLRAKASFVIEGLKEADKDEFCRCELKLQKWYGDLRGKPFAIEAENSILDISGFSKQYNCAFIWQKDGVKKLNLYLIINYFKGGKLRFKKIKPEAFEANRFYTVINKKSGEIVPMEVNFNFDDPNLIILPLAFGKRQGREFIWNDLLSLETGSLKLANGRVIEKTLYNRRTRQDEPALFVALTFERREVLDSSNIKPMNLIGVDRGENIPAVIALTDPEGCPLSRFKDSLGNPTHILRIGESYKEKQRTIQAKKEVEQRRAGGYSRKYASKAKNLADDMVRNTARDLLYYAVTQDAMLIFENLSRGFGRQGKRTFMAERQYTRMEDWLTAKLAYEGLPSKTYLSKTLAQYTSKTCSNCGFTITSADYDRVLEKLKKTATGWMTTINGKELKVEGQITYYNRYKRQNVVKDLSVELDRLSEESVNNDISSWTKGRQGEALSLLKKRFSHRPVQEKFVCLNCGFETHADEQAALNIARSWLFLRSQEYKKYQTNKTTGNTDKRAFVETWQSFYRKKLKEVWKPAV

SEQ ID NO: 47458 - protein, 978 aa, synthetic construct
  REGION 1..978: note = engineered CasX variant
QEIKRINKIRRRLVKDSNTKKAGKTGPMKTLLVRVMTPDLRERLENLRKKPENIPQPISNTSRANLNKLLTDYTEMKKAILHVYWEEFQKDPVGLMSRVAQPASKKIDQNKLKPEMDEKGNLTTAGFACSQCGQPLFVYKLEQVSEKGKAYTNYFGRCNVAEHEKLILLAQLKPEKDSDEAVTYSLGKFGQRALDFYSIHVTKESTHPVKPLAQIAGNRYASSPVGKALSDACMGTIASFLSKYQDIIIEHQKVVKGNQKRLESLRELAGKENLEYPSVTLPPQPHTKEGVDAYNEVIARVRMWVNLNLWQKLKLSRDDAKPLLRLKGFPSFPLVERQANEVDWWDMVCNVKKLINEKKEDGKVFWQNLAGYKRQEALRPYLSSEEDRKKGKKFARYQLGDLLLHLYKKHGEDWGKVYDEAWERIDKKVEGLSKHIKLEEERRSEDAQSKAALTDWLRAKASFVIEGLKEADKDEFCRCELKLQKWYGDLRGKPFAIEAENSILDISGFSKQYNCAFIWQKDGVKKLNLYLIINYFKGGKLRFKKIKPEAFEANRFYTVINKKSGEIVPMEVNFNFDDPNLIILPLAFGKRQGREFIWNDLLSLETGSLKLANGRVIEKTLYNRRTRQDEPALFVALTFERREVLDSSNIKPMNLIGVDRGENIPAVIALTDPEGCPLSRFKDSLGNPTHILRIGESYKEKQRTIQAKKEVEQRRAGGYSRKYASKAKNLADDMVRNTARDLLYYAVTQDAMLIFENLSRGFGRQGKRTFMAERQYTRMEDWLTAKLAYEGLPSKTYLSKTLAQYTSKTCSNCGFTITSADYDRVLEKLKKTATGWMTTINGKELKVEGQITYYNRYKRQNVVKDLSVELDRLSEESVNNDISSWTKGRQGEALSLLKKRFSHRPVQEKFVCLNCGFETHADEQAALNIARSWLFLRSQEYKKYQTNKTTGNTDKRAFVETWQSFYRKKLKEVWKPAV

SEQ ID NO: 47459 - protein, 978 aa, synthetic construct
  REGION 1..978: note = engineered CasX variant
QEIKRINKIRRRLVKDSNTKKAGKTGPMKTLLVRVMTPDLRERLENLRKKPENIPQPISNTSRANLNKLLTDYTEMKKAILHVYWEEFQKDPVGLMSRVAQPASKKIDQNKLKPEMDEKGNLTTAGFACSQCGQPLFVYKLEQVSEKGKAYTNYFGRCNVAEHEKLILLAQLKPEKDSDEAVTYSLGKFGQRALDFYSIHVTKESTHPVKPLAQIAGNRYASTPVGKALSDACMGTIASFLSKYQDIIIEHQKVVKGNQKRLESLRELAGKENLEYPSVTLPPQPHTKEGVDAYNEVIARVRMWVNLNLWQKLKLSRDDAKPLLRLKGFPSFPLVERQANEVDWWDMVCNVKKLINEKKEDGKVFWQNLAGYKRQEALRPYLSSEEDRKKGKKFARYQLGDLLLHLYKKHGEDWGKVYDEAWERIDKKVEGLSKHIKLEEERRSEDAQSKAALTDWLRAKASFVIEGLKEADKDEFCRCELKLQKWYGDLRGKPFAIEAENSILDISGFSKQYNCAFIWQKDGVKKLNLYLIINYFKGGKLRFKKIKPEAFEANRFYTVINKKSGEIVPMEVNFNFDDPNLIILPLAFGKRQGREFIWNDLLSLETGSLKLANGRVIEKTLYNRRTRQDEPALFVALTFERREVLDSSNIKPMNLIGVDRGENIPAVIALTDPEGCPLSRFKDSLGNPTHILRIGESYKEKQRTIQAKKEVEQRRAGGYSRKYASKAKNLADDMVRNTARDLLYYAVTQDAMLIFENLSRGFGRQGKRTFMAERQYTRMEDWLTAKLAYEGLPSKTYLSKTLAQYTSKTCSNCGFTITSADYDRVLEKLKKTATGWMTTINGKELKVEGQITYYNRYKRQNVVKDLSVELDRLSEESVNNDISSWTKGRQGEALSLLKKRFSHRPVQEKFVCLNCGFETHADEQAALNIARSWLFLRSQEYKKYQTNKTTGNTDKRAFVETWQSFYRKKLKEVWKPAV

SEQ ID NO: 47460 - protein, 978 aa, synthetic construct
  REGION 1..978: note = engineered CasX variant
QEIKRINKIRRRLVKDSNTKKAGKTGPMKTLLVRVMTPDLRERLENLRKKPENIPQPISNTSRANLNKLLTDYTEMKKAILHVYWEEFQKDPVGLMSRVAQPASKKIDQNKLKPEMDEKGNLTTAGFACSQCGQPLFVYKLEQVSEKGKAYTNYFGRCNVAEHEKLILLAQLKPEKDSDEAVTYSLGKFGQRALDFYSIHVTKESTHPVKPLAQIAGNRYASAPVGKALSDACMGTIASFLSKYQDIIIEHQKVVKGNQKRLESLRELAGKENLEYPSVTLPPQPHTKEGVDAYNEVIARVRMWVNLNLWQKLKLSRDDAKPLLRLKGFPSFPLVERQANEVDWWDMVCNVKKLINEKKEDGKVFWQNLAGYKRQEALRPYLSSEEDRKKGKKFARYQLGDLLLHLYKKHGEDWGKVYDEAWERIDKKVEGLSKHIKLEEERRSEDAQSKAALTDWLRAKASFVIEGLKEADKDEFCRCELKLQKWYGDLRGKPFAIEAENSILDISGFSKQYNCAFIWQKDGVKKLNLYLIINYFKGGKLRFKKIKPEAFEANRFYTVINKKSGEIVPMEVNFNFDDPNLIILPLAFGKRQGREFIWNDLLSLETGSLKLANGRVIEKTLYNRRTRQDEPALFVALTFERREVLDSSNIKPMNLIGVDRGENIPAVIALTDPEGCPLSRFKDSLGNPTHILRIGESYKEKQRTIQAKKEVEQRRAGGYSRKYASKAKNLADDMVRNTARDLLYYAVTQDAMLIFENLSRGFGRQGKRTFMAERQYTRMEDWLTAKLAYEGLPSKTYLSKTLAQYTSKTCSNCGFTITSADYDRVLEKLKKTATGWMTTINGKELKVEGQITYYNRYKRQNVVKDLSVELDRLSEESVNNDISSWTKGRQGEALSLLKKRFSHRPVQEKFVCLNCGFETHADEQAALNIARSWLFLRSQEYKKYQTNKTTGNTDKRAFVETWQSFYRKKLKEVWKPAV

SEQ ID NO: 47461 - protein, 978 aa, synthetic construct
  REGION 1..978: note = engineered CasX variant
QEIKRINKIRRRLVKDSNTKKAGKTGPMKTLLVRVMTPDLRERLENLRKKPENIPQPISNTSRANLNKLLTDYTEMKKAILHVYWEEFQKDPVGLMSRVAQPASKKIDQNKLKPEMDEKGNLTTAGFACSQCGQPLFVYKLEQVSEKGKAYTNYFGRCNVAEHEKLILLAQLKPEKDSDEAVTYSLGKFGQRALDFYSIHVTKESTHPVKPLAQIAGNRYASVPVGKALSDACMGTIASFLSKYQDIIIEHQKVVKGNQKRLESLRELAGKENLEYPSVTLPPQPHTKEGVDAYNEVIARVRMWVNLNLWQKLKLSRDDAKPLLRLKGFPSFPLVERQANEVDWWDMVCNVKKLINEKKEDGKVFWQNLAGYKRQEALRPYLSSEEDRKKGKKFARYQLGDLLLHLYKKHGEDWGKVYDEAWERIDKKVEGLSKHIKLEEERRSEDAQSKAALTDWLRAKASFVIEGLKEADKDEFCRCELKLQKWYGDLRGKPFAIEAENSILDISGFSKQYNCAFIWQKDGVKKLNLYLIINYFKGGKLRFKKIKPEAFEANRFYTVINKKSGEIVPMEVNFNFDDPNLIILPLAFGKRQGREFIWNDLLSLETGSLKLANGRVIEKTLYNRRTRQDEPALFVALTFERREVLDSSNIKPMNLIGVDRGENIPAVIALTDPEGCPLSRFKDSLGNPTHILRIGESYKEKQRTIQAKKEVEQRRAGGYSRKYASKAKNLADDMVRNTARDLLYYAVTQDAMLIFENLSRGFGRQGKRTFMAERQYTRMEDWLTAKLAYEGLPSKTYLSKTLAQYTSKTCSNCGFTITSADYDRVLEKLKKTATGWMTTINGKELKVEGQITYYNRYKRQNVVKDLSVELDRLSEESVNNDISSWTKGRQGEALSLLKKRFSHRPVQEKFVCLNCGFETHADEQAALNIARSWLFLRSQEYKKYQTNKTTGNTDKRAFVETWQSFYRKKLKEVWKPAV

SEQ ID NO: 47462 - protein, 978 aa, synthetic construct
  REGION 1..978: note = engineered CasX variant
QEIKRINKIRRRLVKDSNTKKAGKTGPMKTLLVRVMTPDLRERLENLRKKPENIPQPISNTSRANLNKLLTDYTEMKKAILHVYWEEFQKDPVGLMSRVAQPASKKIDQNKLKPEMDEKGNLTTAGFACSQCGQPLFVYKLEQVSEKGKAYTNYFGRCNVAEHEKLIKLAQLKPEKDSDEAVTYSLGKFGQRALDFYSIHVTKESTHPVKPLAQIAGNRYASGPVGKALSDACMGTIASFLSKYQDIIIEHQKVVKGNQKRLESLRELAGKENLEYPSVTLPPQPHTKEGVDAYNEVIARVRMWVNLNLWQKLKLSRDDAKPLLRLKGFPSFPLVERQANEVDWWDMVCNVKKLINEKKEDGKVFWQNLAGYKRQEALRPYLSSEEDRKKGKKFARYQLGDLLLHLYKKHGEDWGKVYDEAWERIDKKVEGLSKHIKLEEERRSEDAQSKAALTDWLRAKASFVIEGLKEADKDEFCRCELKLQKWYGDLRGKPFAIEAENSILDISGFSKQYNCAFIWQKDGVKKLNLYLIINYFKGGKLRFKKIKPEAFEANRFYTVINKKSGEIVPMEVNFNFDDPNLIILPLAFGKRQGREFIWNDLLSLETGSLKLANGRVIEKTLYNRRTRQDEPALFVALTFERREVLDSSNIKPMNLIGVDRGENIPAVIALTDPEGCPLSRFKDSLGNPTHILRIGESYKEKQRTIQAKKEVEQRRAGGYSRKYASKAKNLADDMVRNTARDLLYYAVTQDAMLIFENLSRGFGRQGKRTFMAERQYTRMEDWLTAKLAYEGLPSKTYLSKTLAQYTSKTCSNCGFTITSADYDRVLEKLKKTATGWMTTINGKELKVEGQITYYNRYKRQNVVKDLSVELDRLSEESVNNDISSWTKGRQGEALSLLKKRFSHRPVQEKFVCLNCGFETHADEQAALNIARSWLFLRSQEYKKYQTNKTTGNTDKRAFVETWQSFYRKKLKEVWKPAV

SEQ ID NO: 47463 - protein, 977 aa, synthetic construct
  REGION 1..977: note = engineered CasX variant
QEIKRINKIRRRLVKDSNTKKAGKTGPMKTLLVRVMTPDLRERLENLRKKPENIPQPISNTSRANLNKLLTDYTEMKKAILHVYWEEFQKDPVGLMSRVAQPASKKIDQNKLKPEMDEKGNLTTAGFACSQCGQPLFVYKLEQVSEKGKAYTNYFGRCNVAEHEKLILLAQLKPEKDSDEAVTYSLGKFGQRALDFYSIHVTKESTHPVKPLAQIAGNRYASPVGKALSDACMGTIASFLSKYQDIIIEHQKVVKGNQKRLESLRELAGKENLEYPSVTLPPQPHTKEGVDAYNEVIARVRMWVNLNLWQKLKLSRDDAKPLLRLKGFPSFPLVERQANEVDWWDMVCNVKKLINEKKEDGKVFWQNLAGYKRQEALRPYLSSEEDRKKGKKFARYQLGDLLLHLYKKHGEDWGKVYDEAWERIDKKVEGLSKHIKLEEERRSEDAQSKAALTDWLRAKASFVIEGLKEADKDEFCRCELKLQKWYGDLRGKPFAIEAENSILDISGFSKQYNCAFIWQKDGVKKLNLYLIINYFKGGKLRFKKIKPEAFEANRFYTVINKKSGEIVPMEVNFNFDDPNLIILPLAFGKRQGREFIWNDLLSLETGSLKLANGRVIEKTLYNRRTRQDEPALFVALTFERREVLDSSNIKPMNLIGVDRGENIPAVIALTDPEGCPLSRFKDSLGNPTHILRIGESYKEKQRTIQAKKEVEQRRAGGYSRKYASKAKNLADDMVRNTARDLLYYAVTQDAMLIFENLSRGFGRQGKRTFMAERQYTRMEDWLTAKLAYEGLPSKTYLSKTLAQYTSKTCSNCGFTITSADYDRVLEKLKKTATGWMTTINGKELKVEGQITYYNRYKRQNVVKDLSVELDRLSEESVNNDISSWTKGRQGEALSLLKKRFSHRPVQEKFVCLNCGFETHADEQAALNIARSWLFLRSQEYKKYQTNKTTGNTDKRAFVETWQSFYRKKLKEVWKPAV

SEQ ID NO: 47464 - protein, 978 aa, synthetic construct
  REGION 1..978: note = engineered CasX variant
QEIKRINKIRRRLVKDSNTKKAGKTGPMKTLLVRVMTPDLRERLENLRKKPENIPQPISNTSRANLNKLLTDYTEMKKAILHVYWEEFQKDPVGLMSRVAQPASKKIDQNKLKPEMDEKGNLTTAGFACSQCGQPLFVYKLEQVSEKGKAYTNYFGRCNVAEHEKLILLAQLKPEKDSDEAVTYSLGKFGQRALDFYSIHVTKESTHPVKPLAQIAGNRYASYPVGKALSDACMGTIASFLSKYQDIIIEHQKVVKGNQKRLESLRELAGKENLEYPSVTLPPQPHTKEGVDAYNEVIARVRMWVNLNLWQKLKLSRDDAKPLLRLKGFPSFPLVERQANEVDWWDMVCNVKKLINEKKEDGKVFWQNLAGYKRQEALRPYLSSEEDRKKGKKFARYQLGDLLLHLEKKHPEDWGKVYDEAWERIDKKVEGLSKHIKLEEERRSEDAQSKAALTDWLRAKASFVIEGLKEADKDEFCRCELKLQKWYGDLRGKPFAIEAENSILDISGFSKQYNCAFIWQKDGVKKLNLYLIINYFKGGKLRFKKIKPEAFEANRFYTVINKKSGEIVPMEVNFNFDDPNLIILPLAFGKRQGREFIWNDLLSLETGSLKLANGRVIEKTLYNRRTRQDEPALFVALTFERREVLDSSNIKPMNLIGVDRGENIPAVIALTDPEGCPLSRFKDSLGNPTHILRIGESYKEKQRTIQAKKEVEQRRAGGYSRKYASKAKNLADDMVRNTARDLLYYAVTQDAMLIFENLSRGFGRQGKRTFMAERQYTRMEDWLTAKLAYEGLPSKTYLSKTLAQYTSKTCSNCGFTITSADYDRVLEKLKKTATGWMTTINGKELKVEGQITYYNRYKRQNVVKDLSVELDRLSEESVNNDISSWTKGRQGEALSLLKKRFSHRPVQEKFVCLNCGFETHADEQAALNIARSWLFLRSQEYKKYQTNKTTGNTDKRAFVETWQSFYRKKLKEVWKPAV

SEQ ID NO: 47465 - protein, 978 aa, synthetic construct
  REGION 1..978: note = engineered CasX variant
QEIKRINKIRRRLVKDSNTKKAGKTGPMKTLLVRVMTPDLRERLENLRKKPENIPQPISNTSRANLNKLLTDYTEMKKAILHVYWEEFQKDPVGLMSRVAQPASKKIDQNKLKPEMDEKGNLTTAGFACSQCGQPLFVYKLEQVSEKGKAYTNYFGRCNVAEHEKLILLAQLKPEKDSDEAVTYSLGKFGQRALDFYSIHVTKESTHPVKPLAQIAGNRYASHPVGKALSDACMGTIASFLSKYQDIIIEHQKVVKGNQKRLESLRELAGKENLEYPSVTLPPQPHTKEGVDAYNEVIARVRMWVNLNLWQKLKLSRDDAKPLLRLKGFPSFPLVERQANEVDWWDMVCNVKKLINEKKEDGKVFWQNLAGYKRQEALRPYLSSEEDRKKGKKFARYQLGDLLLHLEKKHPEDWGKVYDEAWERIDKKVEGLSKHIKLEEERRSEDAQSKAALTDWLRAKASFVIEGLKEADKDEFCRCELKLQKWYGDLRGKPFAIEAENSILDISGFSKQYNCAFIWQKDGVKKLNLYLIINYFKGGKLRFKKIKPEAFEANRFYTVINKKSGEIVPMEVNFNFDDPNLIILPLAFGKRQGREFIWNDLLSLETGSLKLANGRVIEKTLYNRRTRQDEPALFVALTFERREVLDSSNIKPMNLIGVDRGENIPAVIALTDPEGCPLSRFKDSLGNPTHILRIGESYKEKQRTIQAKKEVEQRRAGGYSRKYASKAKNLADDMVRNTARDLLYYAVTQDAMLIFENLSRGFGRQGKRTFMAERQYTRMEDWLTAKLAYEGLPSKTYLSKTLAQYTSKTCSNCGFTITSADYDRVLEKLKKTATGWMTTINGKELKVEGQITYYNRYKRQNVVKDLSVELDRLSEESVNNDISSWTKGRQGEALSLLKKRFSHRPVQEKFVCLNCGFETHADEQAALNIARSWLFLRSQEYKKYQTNKTTGNTDKRAFVETWQSFYRKKLKEVWKPAV

SEQ ID NO: 47466 - protein, 978 aa, synthetic construct
  REGION 1..978: note = engineered CasX variant
QEIKRINKIRRRLVKDSNTKKAGKTGPMKTLLVRVMTPDLRERLENLRKKPENIPQPISNTSRANLNKLLTDYTEMKKAILHVYWEEFQKDPVGLMSRVAQPASKKIDQNKLKPEMDEKGNLTTAGFACSQCGQPLFVYKLEQVSEKGKAYTNYFGRCNVAEHEKLILLAQLKPEKDSDEAVTYSLGKFGQRALDFYSIHVTKESTHPVKPLAQIAGNRYASSPVGKALSDACMGTIASFLSKYQDIIIEHQKVVKGNQKRLESLRELAGKENLEYPSVTLPPQPHTKEGVDAYNEVIARVRMWVNLNLWQKLKLSRDDAKPLLRLKGFPSFPLVERQANEVDWWDMVCNVKKLINEKKEDGKVFWQNLAGYKRQEALRPYLSSEEDRKKGKKFARYQLGDLLLHLEKKHPEDWGKVYDEAWERIDKKVEGLSKHIKLEEERRSEDAQSKAALTDWLRAKASFVIEGLKEADKDEFCRCELKLQKWYGDLRGKPFAIEAENSILDISGFSKQYNCAFIWQKDGVKKLNLYLIINYFKGGKLRFKKIKPEAFEANRFYTVINKKSGEIVPMEVNFNFDDPNLIILPLAFGKRQGREFIWNDLLSLETGSLKLANGRVIEKTLYNRRTRQDEPALFVALTFERREVLDSSNIKPMNLIGVDRGENIPAVIALTDPEGCPLSRFKDSLGNPTHILRIGESYKEKQRTIQAKKEVEQRRAGGYSRKYASKAKNLADDMVRNTARDLLYYAVTQDAMLIFENLSRGFGRQGKRTFMAERQYTRMEDWLTAKLAYEGLPSKTYLSKTLAQYTSKTCSNCGFTITSADYDRVLEKLKKTATGWMTTINGKELKVEGQITYYNRYKRQNVVKDLSVELDRLSEESVNNDISSWTKGRQGEALSLLKKRFSHRPVQEKFVCLNCGFETHADEQAALNIARSWLFLRSQEYKKYQTNKTTGNTDKRAFVETWQSFYRKKLKEVWKPAV

SEQ ID NO: 47467 - protein, 978 aa, synthetic construct
  REGION 1..978: note = engineered CasX variant
QEIKRINKIRRRLVKDSNTKKAGKTGPMKTLLVRVMTPDLRERLENLRKKPENIPQPISNTSRANLNKLLTDYTEMKKAILHVYWEEFQKDPVGLMSRVAQPASKKIDQNKLKPEMDEKGNLTTAGFACSQCGQPLFVYKLEQVSEKGKAYTNYFGRCNVAEHEKLILLAQLKPEKDSDEAVTYSLGKFGQRALDFYSIHVTKESTHPVKPLAQIAGNRYASTPVGKALSDACMGTIASFLSKYQDIIIEHQKVVKGNQKRLESLRELAGKENLEYPSVTLPPQPHTKEGVDAYNEVIARVRMWVNLNLWQKLKLSRDDAKPLLRLKGFPSFPLVERQANEVDWWDMVCNVKKLINEKKEDGKVFWQNLAGYKRQEALRPYLSSEEDRKKGKKFARYQLGDLLLHLEKKHPEDWGKVYDEAWERIDKKVEGLSKHIKLEEERRSEDAQSKAALTDWLRAKASFVIEGLKEADKDEFCRCELKLQKWYGDLRGKPFAIEAENSILDISGFSKQYNCAFIWQKDGVKKLNLYLIINYFKGGKLRFKKIKPEAFEANRFYTVINKKSGEIVPMEVNFNFDDPNLIILPLAFGKRQGREFIWNDLLSLETGSLKLANGRVIEKTLYNRRTRQDEPALFVALTFERREVLDSSNIKPMNLIGVDRGENIPAVIALTDPEGCPLSRFKDSLGNPTHILRIGESYKEKQRTIQAKKEVEQRRAGGYSRKYASKAKNLADDMVRNTARDLLYYAVTQDAMLIFENLSRGFGRQGKRTFMAERQYTRMEDWLTAKLAYEGLPSKTYLSKTLAQYTSKTCSNCGFTITSADYDRVLEKLKKTATGWMTTINGKELKVEGQITYYNRYKRQNVVKDLSVELDRLSEESVNNDISSWTKGRQGEALSLLKKRFSHRPVQEKFVCLNCGFETHADEQAALNIARSWLFLRSQEYKKYQTNKTTGNTDKRAFVETWQSFYRKKLKEVWKPAV

SEQ ID NO: 47468 - protein, 978 aa, synthetic construct
  REGION 1..978: note = engineered CasX variant
QEIKRINKIRRRLVKDSNTKKAGKTGPMKTLLVRVMTPDLRERLENLRKKPENIPQPISNTSRANLNKLLTDYTEMKKAILHVYWEEFQKDPVGLMSRVAQPASKKIDQNKLKPEMDEKGNLTTAGFACSQCGQPLFVYKLEQVSEKGKAYTNYFGRCNVAEHEKLILLAQLKPEKDSDEAVTYSLGKFGQRALDFYSIHVTKESTHPVKPLAQIAGNRYASAPVGKALSDACMGTIASFLSKYQDIIIEHQKVVKGNQKRLESLRELAGKENLEYPSVTLPPQPHTKEGVDAYNEVIARVRMWVNLNLWQKLKLSRDDAKPLLRLKGFPSFPLVERQANEVDWWDMVCNVKKLINEKKEDGKVFWQNLAGYKRQEALRPYLSSEEDRKKGKKFARYQLGDLLLHLEKKHPEDWGKVYDEAWERIDKKVEGLSKHIKLEEERRSEDAQSKAALTDWLRAKASFVIEGLKEADKDEFCRCELKLQKWYGDLRGKPFAIEAENSILDISGFSKQYNCAFIWQKDGVKKLNLYLIINYFKGGKLRFKKIKPEAFEANRFYTVINKKSGEIVPMEVNFNFDDPNLIILPLAFGKRQGREFIWNDLLSLETGSLKLANGRVIEKTLYNRRTRQDEPALFVALTFERREVLDSSNIKPMNLIGVDRGENIPAVIALTDPEGCPLSRFKDSLGNPTHILRIGESYKEKQRTIQAKKEVEQRRAGGYSRKYASKAKNLADDMVRNTARDLLYYAVTQDAMLIFENLSRGFGRQGKRTFMAERQYTRMEDWLTAKLAYEGLPSKTYLSKTLAQYTSKTCSNCGFTITSADYDRVLEKLKKTATGWMTTINGKELKVEGQITYYNRYKRQNVVKDLSVELDRLSEESVNNDISSWTKGRQGEALSLLKKRFSHRPVQEKFVCLNCGFETHADEQAALNIARSWLFLRSQEYKKYQTNKTTGNTDKRAFVETWQSFYRKKLKEVWKPAV

SEQ ID NO: 47469 - protein, 978 aa, synthetic construct
  REGION 1..978: note = engineered CasX variant
QEIKRINKIRRRLVKDSNTKKAGKTGPMKTLLVRVMTPDLRERLENLRKKPENIPQPISNTSRANLNKLLTDYTEMKKAILHVYWEEFQKDPVGLMSRVAQPASKKIDQNKLKPEMDEKGNLTTAGFACSQCGQPLFVYKLEQVSEKGKAYTNYFGRCNVAEHEKLILLAQLKPEKDSDEAVTYSLGKFGQRALDFYSIHVTKESTHPVKPLAQIAGNRYASVPVGKALSDACMGTIASFLSKYQDIIIEHQKVVKGNQKRLESLRELAGKENLEYPSVTLPPQPHTKEGVDAYNEVIARVRMWVNLNLWQKLKLSRDDAKPLLRLKGFPSFPLVERQANEVDWWDMVCNVKKLINEKKEDGKVFWQNLAGYKRQEALRPYLSSEEDRKKGKKFARYQLGDLLLHLEKKHPEDWGKVYDEAWERIDKKVEGLSKHIKLEEERRSEDAQSKAALTDWLRAKASFVIEGLKEADKDEFCRCELKLQKWYGDLRGKPFAIEAENSILDISGFSKQYNCAFIWQKDGVKKLNLYLIINYFKGGKLRFKKIKPEAFEANRFYTVINKKSGEIVPMEVNFNFDDPNLIILPLAFGKRQGREFIWNDLLSLETGSLKLANGRVIEKTLYNRRTRQDEPALFVALTFERREVLDSSNIKPMNLIGVDRGENIPAVIALTDPEGCPLSRFKDSLGNPTHILRIGESYKEKQRTIQAKKEVEQRRAGGYSRKYASKAKNLADDMVRNTARDLLYYAVTQDAMLIFENLSRGFGRQGKRTFMAERQYTRMEDWLTAKLAYEGLPSKTYLSKTLAQYTSKTCSNCGFTITSADYDRVLEKLKKTATGWMTTINGKELKVEGQITYYNRYKRQNVVKDLSVELDRLSEESVNNDISSWTKGRQGEALSLLKKRFSHRPVQEKFVCLNCGFETHADEQAALNIARSWLFLRSQEYKKYQTNKTTGNTDKRAFVETWQSFYRKKLKEVWKPAV

SEQ ID NO: 47470 - protein, 978 aa, synthetic construct
  REGION 1..978: note = engineered CasX variant
QEIKRINKIRRRLVKDSNTKKAGKTGPMKTLLVRVMTPDLRERLENLRKKPENIPQPISNTSRANLNKLLTDYTEMKKAILHVYWEEFQKDPVGLMSRVAQPASKKIDQNKLKPEMDEKGNLTTAGFACSQCGQPLFVYKLEQVSEKGKAYTNYFGRCNVAEHEKLIKLAQLKPEKDSDEAVTYSLGKFGQRALDFYSIHVTKESTHPVKPLAQIAGNRYASGPVGKALSDACMGTIASFLSKYQDIIIEHQKVVKGNQKRLESLRELAGKENLEYPSVTLPPQPHTKEGVDAYNEVIARVRMWVNLNLWQKLKLSRDDAKPLLRLKGFPSFPLVERQANEVDWWDMVCNVKKLINEKKEDGKVFWQNLAGYKRQEALRPYLSSEEDRKKGKKFARYQLGDLLLHLEKKHPEDWGKVYDEAWERIDKKVEGLSKHIKLEEERRSEDAQSKAALTDWLRAKASFVIEGLKEADKDEFCRCELKLQKWYGDLRGKPFAIEAENSILDISGFSKQYNCAFIWQKDGVKKLNLYLIINYFKGGKLRFKKIKPEAFEANRFYTVINKKSGEIVPMEVNFNFDDPNLIILPLAFGKRQGREFIWNDLLSLETGSLKLANGRVIEKTLYNRRTRQDEPALFVALTFERREVLDSSNIKPMNLIGVDRGENIPAVIALTDPEGCPLSRFKDSLGNPTHILRIGESYKEKQRTIQAKKEVEQRRAGGYSRKYASKAKNLADDMVRNTARDLLYYAVTQDAMLIFENLSRGFGRQGKRTFMAERQYTRMEDWLTAKLAYEGLPSKTYLSKTLAQYTSKTCSNCGFTITSADYDRVLEKLKKTATGWMTTINGKELKVEGQITYYNRYKRQNVVKDLSVELDRLSEESVNNDISSWTKGRQGEALSLLKKRFSHRPVQEKFVCLNCGFETHADEQAALNIARSWLFLRSQEYKKYQTNKTTGNTDKRAFVETWQSFYRKKLKEVWKPAV

SEQ ID NO: 47471 - protein, 977 aa, synthetic construct
  REGION 1..977: note = engineered CasX variant
QEIKRINKIRRRLVKDSNTKKAGKTGPMKTLLVRVMTPDLRERLENLRKKPENIPQPISNTSRANLNKLLTDYTEMKKAILHVYWEEFQKDPVGLMSRVAQPASKKIDQNKLKPEMDEKGNLTTAGFACSQCGQPLFVYKLEQVSEKGKAYTNYFGRCNVAEHEKLILLAQLKPEKDSDEAVTYSLGKFGQRALDFYSIHVTKESTHPVKPLAQIAGNRYASPVGKALSDACMGTIASFLSKYQDIIIEHQKVVKGNQKRLESLRELAGKENLEYPSVTLPPQPHTKEGVDAYNEVIARVRMWVNLNLWQKLKLSRDDAKPLLRLKGFPSFPLVERQANEVDWWDMVCNVKKLINEKKEDGKVFWQNLAGYKRQEALRPYLSSEEDRKKGKKFARYQLGDLLLHLEKKHPEDWGKVYDEAWERIDKKVEGLSKHIKLEEERRSEDAQSKAALTDWLRAKASFVIEGLKEADKDEFCRCELKLQKWYGDLRGKPFAIEAENSILDISGFSKQYNCAFIWQKDGVKKLNLYLIINYFKGGKLRFKKIKPEAFEANRFYTVINKKSGEIVPMEVNFNFDDPNLIILPLAFGKRQGREFIWNDLLSLETGSLKLANGRVIEKTLYNRRTRQDEPALFVALTFERREVLDSSNIKPMNLIGVDRGENIPAVIALTDPEGCPLSRFKDSLGNPTHILRIGESYKEKQRTIQAKKEVEQRRAGGYSRKYASKAKNLADDMVRNTARDLLYYAVTQDAMLIFENLSRGFGRQGKRTFMAERQYTRMEDWLTAKLAYEGLPSKTYLSKTLAQYTSKTCSNCGFTITSADYDRVLEKLKKTATGWMTTINGKELKVEGQITYYNRYKRQNVVKDLSVELDRLSEESVNNDISSWTKGRQGEALSLLKKRFSHRPVQEKFVCLNCGFETHADEQAALNIARSWLFLRSQEYKKYQTNKTTGNTDKRAFVETWQSFYRKKLKEVWKPAV

SEQ ID NO: 47472 - protein, 979 aa, synthetic construct
  REGION 1..979: note = engineered CasX variant
QEIKRINKIRRRLVKDSNTKKAGKTGPMKTLLVRVMTPDLRERLENLRKKPENIPQPISNTSRANLNKLLTDYTEMKKAILHVYWEEFQKDPVGLMSRVAQPASKKIDQNKLKPEMDEKGNLTTAGFACSQCGQPLFVYKLEQVSEKGKAYTNYFGRCNVAEHEKLILLAQLKPEKDSDEAVTYSLGKFGQRALDFYSIHVTKESTHPVKPLAQIAGNRYASYPVGKALSDACMGTIASFLSKYQDIIIEHQKVVKGNQKRLESLRELAGKENLEYPSVTLPPQPHTKEGVDAYNEVIARVRMWVNLNLWQKLKLSRDDAKPLLRLKGFPSFPLVERQANEVDWWDMVCNVKKLINEKKEDGKVFWQNLAGYKRQEALRPYLSSEEDRKKGKKFARYQLGDLLLHLEKKHGERDWGKVYDEAWERIDKKVEGLSKHIKLEEERRSEDAQSKAALTDWLRAKASFVIEGLKEADKDEFCRCELKLQKWYGDLRGKPFAIEAENSILDISGFSKQYNCAFIWQKDGVKKLNLYLIINYFKGGKLRFKKIKPEAFEANRFYTVINKKSGEIVPMEVNFNFDDPNLIILPLAFGKRQGREFIWNDLLSLETGSLKLANGRVIEKTLYNRRTRQDEPALFVALTFERREVLDSSNIKPMNLIGVDRGENIPAVIALTDPEGCPLSRFKDSLGNPTHILRIGESYKEKQRTIQAKKEVEQRRAGGYSRKYASKAKNLADDMVRNTARDLLYYAVTQDAMLIFENLSRGFGRQGKRTFMAERQYTRMEDWLTAKLAYEGLPSKTYLSKTLAQYTSKTCSNCGFTITSADYDRVLEKLKKTATGWMTTINGKELKVEGQITYYNRYKRQNVVKDLSVELDRLSEESVNNDISSWTKGRQGEALSLLKKRFSHRPVQEKFVCLNCGFETHADEQAALNIARSWLFLRSQEYKKYQTNKTTGNTDKRAFVETWQSFYRKKLKEVWKPAV

SEQ ID NO: 47473 - protein, 979 aa, synthetic construct
  REGION 1..979: note = engineered CasX variant
QEIKRINKIRRRLVKDSNTKKAGKTGPMKTLLVRVMTPDLRERLENLRKKPENIPQPISNTSRANLNKLLTDYTEMKKAILHVYWEEFQKDPVGLMSRVAQPASKKIDQNKLKPEMDEKGNLTTAGFACSQCGQPLFVYKLEQVSEKGKAYTNYFGRCNVAEHEKLILLAQLKPEKDSDEAVTYSLGKFGQRALDFYSIHVTKESTHPVKPLAQIAGNRYASHPVGKALSDACMGTIASFLSKYQDIIIEHQKVVKGNQKRLESLRELAGKENLEYPSVTLPPQPHTKEGVDAYNEVIARVRMWVNLNLWQKLKLSRDDAKPLLRLKGFPSFPLVERQANEVDWWDMVCNVKKLINEKKEDGKVFWQNLAGYKRQEALRPYLSSEEDRKKGKKFARYQLGDLLLHLEKKHGERDWGKVYDEAWERIDKKVEGLSKHIKLEEERRSEDAQSKAALTDWLRAKASFVIEGLKEADKDEFCRCELKLQKWYGDLRGKPFAIEAENSILDISGFSKQYNCAFIWQKDGVKKLNLYLIINYFKGGKLRFKKIKPEAFEANRFYTVINKKSGEIVPMEVNFNFDDPNLIILPLAFGKRQGREFIWNDLLSLETGSLKLANGRVIEKTLYNRRTRQDEPALFVALTFERREVLDSSNIKPMNLIGVDRGENIPAVIALTDPEGCPLSRFKDSLGNPTHILRIGESYKEKQRTIQAKKEVEQRRAGGYSRKYASKAKNLADDMVRNTARDLLYYAVTQDAMLIFENLSRGFGRQGKRTFMAERQYTRMEDWLTAKLAYEGLPSKTYLSKTLAQYTSKTCSNCGFTITSADYDRVLEKLKKTATGWMTTINGKELKVEGQITYYNRYKRQNVVKDLSVELDRLSEESVNNDISSWTKGRQGEALSLLKKRFSHRPVQEKFVCLNCGFETHADEQAALNIARSWLFLRSQEYKKYQTNKTTGNTDKRAFVETWQSFYRKKLKEVWKPAV

SEQ ID NO: 47474 - protein, 979 aa, synthetic construct
  REGION 1..979: note = engineered CasX variant
QEIKRINKIRRRLVKDSNTKKAGKTGPMKTLLVRVMTPDLRERLENLRKKPENIPQPISNTSRANLNKLLTDYTEMKKAILHVYWEEFQKDPVGLMSRVAQPASKKIDQNKLKPEMDEKGNLTTAGFACSQCGQPLFVYKLEQVSEKGKAYTNYFGRCNVAEHEKLILLAQLKPEKDSDEAVTYSLGKFGQRALDFYSIHVTKESTHPVKPLAQIAGNRYASSPVGKALSDACMGTIASFLSKYQDIIIEHQKVVKGNQKRLESLRELAGKENLEYPSVTLPPQPHTKEGVDAYNEVIARVRMWVNLNLWQKLKLSRDDAKPLLRLKGFPSFPLVERQANEVDWWDMVCNVKKLINEKKEDGKVFWQNLAGYKRQEALRPYLSSEEDRKKGKKFARYQLGDLLLHLEKKHGERDWGKVYDEAWERIDKKVEGLSKHIKLEEERRSEDAQSKAALTDWLRAKASFVIEGLKEADKDEFCRCELKLQKWYGDLRGKPFAIEAENSILDISGFSKQYNCAFIWQKDGVKKLNLYLIINYFKGGKLRFKKIKPEAFEANRFYTVINKKSGEIVPMEVNFNFDDPNLIILPLAFGKRQGREFIWNDLLSLETGSLKLANGRVIEKTLYNRRTRQDEPALFVALTFERREVLDSSNIKPMNLIGVDRGENIPAVIALTDPEGCPLSRFKDSLGNPTHILRIGESYKEKQRTIQAKKEVEQRRAGGYSRKYASKAKNLADDMVRNTARDLLYYAVTQDAMLIFENLSRGFGRQGKRTFMAERQYTRMEDWLTAKLAYEGLPSKTYLSKTLAQYTSKTCSNCGFTITSADYDRVLEKLKKTATGWMTTINGKELKVEGQITYYNRYKRQNVVKDLSVELDRLSEESVNNDISSWTKGRQGEALSLLKKRFSHRPVQEKFVCLNCGFETHADEQAALNIARSWLFLRSQEYKKYQTNKTTGNTDKRAFVETWQSFYRKKLKEVWKPAV

SEQ ID NO: 47475 - protein, 979 aa, synthetic construct
  REGION 1..979: note = engineered CasX variant
QEIKRINKIRRRLVKDSNTKKAGKTGPMKTLLVRVMTPDLRERLENLRKKPENIPQPISNTSRANLNKLLTDYTEMKKAILHVYWEEFQKDPVGLMSRVAQPASKKIDQNKLKPEMDEKGNLTTAGFACSQCGQPLFVYKLEQVSEKGKAYTNYFGRCNVAEHEKLILLAQLKPEKDSDEAVTYSLGKFGQRALDFYSIHVTKESTHPVKPLAQIAGNRYASTPVGKALSDACMGTIASFLSKYQDIIIEHQKVVKGNQKRLESLRELAGKENLEYPSVTLPPQPHTKEGVDAYNEVIARVRMWVNLNLWQKLKLSRDDAKPLLRLKGFPSFPLVERQANEVDWWDMVCNVKKLINEKKEDGKVFWQNLAGYKRQEALRPYLSSEEDRKKGKKFARYQLGDLLLHLEKKHGERDWGKVYDEAWERIDKKVEGLSKHIKLEEERRSEDAQSKAALTDWLRAKASFVIEGLKEADKDEFCRCELKLQKWYGDLRGKPFAIEAENSILDISGFSKQYNCAFIWQKDGVKKLNLYLIINYFKGGKLRFKKIKPEAFEANRFYTVINKKSGEIVPMEVNFNFDDPNLIILPLAFGKRQGREFIWNDLLSLETGSLKLANGRVIEKTLYNRRTRQDEPALFVALTFERREVLDSSNIKPMNLIGVDRGENIPAVIALTDPEGCPLSRFKDSLGNPTHILRIGESYKEKQRTIQAKKEVEQRRAGGYSRKYASKAKNLADDMVRNTARDLLYYAVTQDAMLIFENLSRGFGRQGKRTFMAERQYTRMEDWLTAKLAYEGLPSKTYLSKTLAQYTSKTCSNCGFTITSADYDRVLEKLKKTATGWMTTINGKELKVEGQITYYNRYKRQNVVKDLSVELDRLSEESVNNDISSWTKGRQGEALSLLKKRFSHRPVQEKFVCLNCGFETHADEQAALNIARSWLFLRSQEYKKYQTNKTTGNTDKRAFVETWQSFYRKKLKEVWKPAV

SEQ ID NO: 47476 - protein, 979 aa, synthetic construct
  REGION 1..979: note = engineered CasX variant
QEIKRINKIRRRLVKDSNTKKAGKTGPMKTLLVRVMTPDLRERLENLRKKPENIPQPISNTSRANLNKLLTDYTEMKKAILHVYWEEFQKDPVGLMSRVAQPASKKIDQNKLKPEMDEKGNLTTAGFACSQCGQPLFVYKLEQVSEKGKAYTNYFGRCNVAEHEKLILLAQLKPEKDSDEAVTYSLGKFGQRALDFYSIHVTKESTHPVKPLAQIAGNRYASAPVGKALSDACMGTIASFLSKYQDIIIEHQKVVKGNQKRLESLRELAGKENLEYPSVTLPPQPHTKEGVDAYNEVIARVRMWVNLNLWQKLKLSRDDAKPLLRLKGFPSFPLVERQANEVDWWDMVCNVKKLINEKKEDGKVFWQNLAGYKRQEALRPYLSSEEDRKKGKKFARYQLGDLLLHLEKKHGERDWGKVYDEAWERIDKKVEGLSKHIKLEEERRSEDAQSKAALTDWLRAKASFVIEGLKEADKDEFCRCELKLQKWYGDLRGKPFAIEAENSILDISGFSKQYNCAFIWQKDGVKKLNLYLIINYFKGGKLRFKKIKPEAFEANRFYTVINKKSGEIVPMEVNFNFDDPNLIILPLAFGKRQGREFIWNDLLSLETGSLKLANGRVIEKTLYNRRTRQDEPALFVALTFERREVLDSSNIKPMNLIGVDRGENIPAVIALTDPEGCPLSRFKDSLGNPTHILRIGESYKEKQRTIQAKKEVEQRRAGGYSRKYASKAKNLADDMVRNTARDLLYYAVTQDAMLIFENLSRGFGRQGKRTFMAERQYTRMEDWLTAKLAYEGLPSKTYLSKTLAQYTSKTCSNCGFTITSADYDRVLEKLKKTATGWMTTINGKELKVEGQITYYNRYKRQNVVKDLSVELDRLSEESVNNDISSWTKGRQGEALSLLKKRFSHRPVQEKFVCLNCGFETHADEQAALNIARSWLFLRSQEYKKYQTNKTTGNTDKRAFVETWQSFYRKKLKEVWKPAV

SEQ ID NO: 47477 - protein, 979 aa, synthetic construct
  REGION 1..979: note = engineered CasX variant
QEIKRINKIRRRLVKDSNTKKAGKTGPMKTLLVRVMTPDLRERLENLRKKPENIPQPISNTSRANLNKLLTDYTEMKKAILHVYWEEFQKDPVGLMSRVAQPASKKIDQNKLKPEMDEKGNLTTAGFACSQCGQPLFVYKLEQVSEKGKAYTNYFGRCNVAEHEKLILLAQLKPEKDSDEAVTYSLGKFGQRALDFYSIHVTKESTHPVKPLAQIAGNRYASVPVGKALSDACMGTIASFLSKYQDIIIEHQKVVKGNQKRLESLRELAGKENLEYPSVTLPPQPHTKEGVDAYNEVIARVRMWVNLNLWQKLKLSRDDAKPLLRLKGFPSFPLVERQANEVDWWDMVCNVKKLINEKKEDGKVFWQNLAGYKRQEALRPYLSSEEDRKKGKKFARYQLGDLLLHLEKKHGERDWGKVYDEAWERIDKKVEGLSKHIKLEEERRSEDAQSKAALTDWLRAKASFVIEGLKEADKDEFCRCELKLQKWYGDLRGKPFAIEAENSILDISGFSKQYNCAFIWQKDGVKKLNLYLIINYFKGGKLRFKKIKPEAFEANRFYTVINKKSGEIVPMEVNFNFDDPNLIILPLAFGKRQGREFIWNDLLSLETGSLKLANGRVIEKTLYNRRTRQDEPALFVALTFERREVLDSSNIKPMNLIGVDRGENIPAVIALTDPEGCPLSRFKDSLGNPTHILRIGESYKEKQRTIQAKKEVEQRRAGGYSRKYASKAKNLADDMVRNTARDLLYYAVTQDAMLIFENLSRGFGRQGKRTFMAERQYTRMEDWLTAKLAYEGLPSKTYLSKTLAQYTSKTCSNCGFTITSADYDRVLEKLKKTATGWMTTINGKELKVEGQITYYNRYKRQNVVKDLSVELDRLSEESVNNDISSWTKGRQGEALSLLKKRFSHRPVQEKFVCLNCGFETHADEQAALNIARSWLFLRSQEYKKYQTNKTTGNTDKRAFVETWQSFYRKKLKEVWKPAV

SEQ ID NO: 47478 - protein, 979 aa, synthetic construct
  REGION 1..979: note = engineered CasX variant
QEIKRINKIRRRLVKDSNTKKAGKTGPMKTLLVRVMTPDLRERLENLRKKPENIPQPISNTSRANLNKLLTDYTEMKKAILHVYWEEFQKDPVGLMSRVAQPASKKIDQNKLKPEMDEKGNLTTAGFACSQCGQPLFVYKLEQVSEKGKAYTNYFGRCNVAEHEKLIKLAQLKPEKDSDEAVTYSLGKFGQRALDFYSIHVTKESTHPVKPLAQIAGNRYASGPVGKALSDACMGTIASFLSKYQDIIIEHQKVVKGNQKRLESLRELAGKENLEYPSVTLPPQPHTKEGVDAYNEVIARVRMWVNLNLWQKLKLSRDDAKPLLRLKGFPSFPLVERQANEVDWWDMVCNVKKLINEKKEDGKVFWQNLAGYKRQEALRPYLSSEEDRKKGKKFARYQLGDLLLHLEKKHGERDWGKVYDEAWERIDKKVEGLSKHIKLEEERRSEDAQSKAALTDWLRAKASFVIEGLKEADKDEFCRCELKLQKWYGDLRGKPFAIEAENSILDISGFSKQYNCAFIWQKDGVKKLNLYLIINYFKGGKLRFKKIKPEAFEANRFYTVINKKSGEIVPMEVNFNFDDPNLIILPLAFGKRQGREFIWNDLLSLETGSLKLANGRVIEKTLYNRRTRQDEPALFVALTFERREVLDSSNIKPMNLIGVDRGENIPAVIALTDPEGCPLSRFKDSLGNPTHILRIGESYKEKQRTIQAKKEVEQRRAGGYSRKYASKAKNLADDMVRNTARDLLYYAVTQDAMLIFENLSRGFGRQGKRTFMAERQYTRMEDWLTAKLAYEGLPSKTYLSKTLAQYTSKTCSNCGFTITSADYDRVLEKLKKTATGWMTTINGKELKVEGQITYYNRYKRQNVVKDLSVELDRLSEESVNNDISSWTKGRQGEALSLLKKRFSHRPVQEKFVCLNCGFETHADEQAALNIARSWLFLRSQEYKKYQTNKTTGNTDKRAFVETWQSFYRKKLKEVWKPAV

SEQ ID NO: 47479 - protein, 978 aa, synthetic construct
  REGION 1..978: note = engineered CasX variant
QEIKRINKIRRRLVKDSNTKKAGKTGPMKTLLVRVMTPDLRERLENLRKKPENIPQPISNTSRANLNKLLTDYTEMKKAILHVYWEEFQKDPVGLMSRVAQPASKKIDQNKLKPEMDEKGNLTTAGFACSQCGQPLFVYKLEQVSEKGKAYTNYFGRCNVAEHEKLILLAQLKPEKDSDEAVTYSLGKFGQRALDFYSIHVTKESTHPVKPLAQIAGNRYASPVGKALSDACMGTIASFLSKYQDIIIEHQKVVKGNQKRLESLRELAGKENLEYPSVTLPPQPHTKEGVDAYNEVIARVRMWVNLNLWQKLKLSRDDAKPLLRLKGFPSFPLVERQANEVDWWDMVCNVKKLINEKKEDGKVFWQNLAGYKRQEALRPYLSSEEDRKKGKKFARYQLGDLLLHLEKKHGERDWGKVYDEAWERIDKKVEGLSKHIKLEEERRSEDAQSKAALTDWLRAKASFVIEGLKEADKDEFCRCELKLQKWYGDLRGKPFAIEAENSILDISGFSKQYNCAFIWQKDGVKKLNLYLIINYFKGGKLRFKKIKPEAFEANRFYTVINKKSGEIVPMEVNFNFDDPNLIILPLAFGKRQGREFIWNDLLSLETGSLKLANGRVIEKTLYNRRTRQDEPALFVALTFERREVLDSSNIKPMNLIGVDRGENIPAVIALTDPEGCPLSRFKDSLGNPTHILRIGESYKEKQRTIQAKKEVEQRRAGGYSRKYASKAKNLADDMVRNTARDLLYYAVTQDAMLIFENLSRGFGRQGKRTFMAERQYTRMEDWLTAKLAYEGLPSKTYLSKTLAQYTSKTCSNCGFTITSADYDRVLEKLKKTATGWMTTINGKELKVEGQITYYNRYKRQNVVKDLSVELDRLSEESVNNDISSWTKGRQGEALSLLKKRFSHRPVQEKFVCLNCGFETHADEQAALNIARSWLFLRSQEYKKYQTNKTTGNTDKRAFVETWQSFYRKKLKEVWKPAV

SEQ ID NO: 47480 - protein, 979 aa, synthetic construct
  REGION 1..979: note = engineered CasX variant
QEIKRINKIRRRLVKDSNTKKAGKTGPMKTLLVRVMTPDLRERLENLRKKPENIPQPISNTSRANLNKLLTDYTEMKKAILHVYWEEFQKDPVGLMSRVAQPASKKIDQNKLKPEMDEKGNLTTAGFACSQCGQPLFVYKLEQVSEKGKAYTNYFGRCNVAEHEKLILLAQLKPEKDSDEAVTYSLGKFGQRALDFYSIHVTKESTHPVKPLAQIAGNRYASYPVGKALSDACMGTIASFLSKYQDIIIEHQKVVKGNQKRLESLRELAGKENLEYPSVTLPPQPHTKEGVDAYNEVIARVRMWVNLNLWQKLKLSRDDAKPLLRLKGFPSFPLVERQANEVDWWDMVCNVKKLINEKKEDGKVFWQNLAGYKRQEALRPYLSSEEDRKKGKKFARYQLGDLLLHLEKKHGEYDWGKVYDEAWERIDKKVEGLSKHIKLEEERRSEDAQSKAALTDWLRAKASFVIEGLKEADKDEFCRCELKLQKWYGDLRGKPFAIEAENSILDISGFSKQYNCAFIWQKDGVKKLNLYLIINYFKGGKLRFKKIKPEAFEANRFYTVINKKSGEIVPMEVNFNFDDPNLIILPLAFGKRQGREFIWNDLLSLETGSLKLANGRVIEKTLYNRRTRQDEPALFVALTFERREVLDSSNIKPMNLIGVDRGENIPAVIALTDPEGCPLSRFKDSLGNPTHILRIGESYKEKQRTIQAKKEVEQRRAGGYSRKYASKAKNLADDMVRNTARDLLYYAVTQDAMLIFENLSRGFGRQGKRTFMAERQYTRMEDWLTAKLAYEGLPSKTYLSKTLAQYTSKTCSNCGFTITSADYDRVLEKLKKTATGWMTTINGKELKVEGQITYYNRYKRQNVVKDLSVELDRLSEESVNNDISSWTKGRQGEALSLLKKRFSHRPVQEKFVCLNCGFETHADEQAALNIARSWLFLRSQEYKKYQTNKTTGNTDKRAFVETWQSFYRKKLKEVWKPAV

SEQ ID NO: 47481 - protein, 979 aa, synthetic construct
  REGION 1..979: note = engineered CasX variant
QEIKRINKIRRRLVKDSNTKKAGKTGPMKTLLVRVMTPDLRERLENLRKKPENIPQPISNTSRANLNKLLTDYTEMKKAILHVYWEEFQKDPVGLMSRVAQPASKKIDQNKLKPEMDEKGNLTTAGFACSQCGQPLFVYKLEQVSEKGKAYTNYFGRCNVAEHEKLILLAQLKPEKDSDEAVTYSLGKFGQRALDFYSIHVTKESTHPVKPLAQIAGNRYASHPVGKALSDACMGTIASFLSKYQDIIIEHQKVVKGNQKRLESLRELAGKENLEYPSVTLPPQPHTKEGVDAYNEVIARVRMWVNLNLWQKLKLSRDDAKPLLRLKGFPSFPLVERQANEVDWWDMVCNVKKLINEKKEDGKVFWQNLAGYKRQEALRPYLSSEEDRKKGKKFARYQLGDLLLHLEKKHGEYDWGKVYDEAWERIDKKVEGLSKHIKLEEERRSEDAQSKAALTDWLRAKASFVIEGLKEADKDEFCRCELKLQKWYGDLRGKPFAIEAENSILDISGFSKQYNCAFIWQKDGVKKLNLYLIINYFKGGKLRFKKIKPEAFEANRFYTVINKKSGEIVPMEVNFNFDDPNLIILPLAFGKRQGREFIWNDLLSLETGSLKLANGRVIEKTLYNRRTRQDEPALFVALTFERREVLDSSNIKPMNLIGVDRGENIPAVIALTDPEGCPLSRFKDSLGNPTHILRIGESYKEKQRTIQAKKEVEQRRAGGYSRKYASKAKNLADDMVRNTARDLLYYAVTQDAMLIFENLSRGFGRQGKRTFMAERQYTRMEDWLTAKLAYEGLPSKTYLSKTLAQYTSKTCSNCGFTITSADYDRVLEKLKKTATGWMTTINGKELKVEGQITYYNRYKRQNVVKDLSVELDRLSEESVNNDISSWTKGRQGEALSLLKKRFSHRPVQEKFVCLNCGFETHADEQAALNIARSWLFLRSQEYKKYQTNKTTGNTDKRAFVETWQSFYRKKLKEVWKPAV

SEQ ID NO: 47482 - protein, 979 aa, synthetic construct
  REGION 1..979: note = engineered CasX variant
QEIKRINKIRRRLVKDSNTKKAGKTGPMKTLLVRVMTPDLRERLENLRKKPENIPQPISNTSRANLNKLLTDYTEMKKAILHVYWEEFQKDPVGLMSRVAQPASKKIDQNKLKPEMDEKGNLTTAGFACSQCGQPLFVYKLEQVSEKGKAYTNYFGRCNVAEHEKLILLAQLKPEKDSDEAVTYSLGKFGQRALDFYSIHVTKESTHPVKPLAQIAGNRYASSPVGKALSDACMGTIASFLSKYQDIIIEHQKVVKGNQKRLESLRELAGKENLEYPSVTLPPQPHTKEGVDAYNEVIARVRMWVNLNLWQKLKLSRDDAKPLLRLKGFPSFPLVERQANEVDWWDMVCNVKKLINEKKEDGKVFWQNLAGYKRQEALRPYLSSEEDRKKGKKFARYQLGDLLLHLEKKHGEYDWGKVYDEAWERIDKKVEGLSKHIKLEEERRSEDAQSKAALTDWLRAKASFVIEGLKEADKDEFCRCELKLQKWYGDLRGKPFAIEAENSILDISGFSKQYNCAFIWQKDGVKKLNLYLIINYFKGGKLRFKKIKPEAFEANRFYTVINKKSGEIVPMEVNFNFDDPNLIILPLAFGKRQGREFIWNDLLSLETGSLKLANGRVIEKTLYNRRTRQDEPALFVALTFERREVLDSSNIKPMNLIGVDRGENIPAVIALTDPEGCPLSRFKDSLGNPTHILRIGESYKEKQRTIQAKKEVEQRRAGGYSRKYASKAKNLADDMVRNTARDLLYYAVTQDAMLIFENLSRGFGRQGKRTFMAERQYTRMEDWLTAKLAYEGLPSKTYLSKTLAQYTSKTCSNCGFTITSADYDRVLEKLKKTATGWMTTINGKELKVEGQITYYNRYKRQNVVKDLSVELDRLSEESVNNDISSWTKGRQGEALSLLKKRFSHRPVQEKFVCLNCGFETHADEQAALNIARSWLFLRSQEYKKYQTNKTTGNTDKRAFVETWQSFYRKKLKEVWKPAV

SEQ ID NO: 47483 - protein, 979 aa, synthetic construct
  REGION 1..979: note = engineered CasX variant
QEIKRINKIRRRLVKDSNTKKAGKTGPMKTLLVRVMTPDLRERLENLRKKPENIPQPISNTSRANLNKLLTDYTEMKKAILHVYWEEFQKDPVGLMSRVAQPASKKIDQNKLKPEMDEKGNLTTAGFACSQCGQPLFVYKLEQVSEKGKAYTNYFGRCNVAEHEKLILLAQLKPEKDSDEAVTYSLGKFGQRALDFYSIHVTKESTHPVKPLAQIAGNRYASTPVGKALSDACMGTIASFLSKYQDIIIEHQKVVKGNQKRLESLRELAGKENLEYPSVTLPPQPHTKEGVDAYNEVIARVRMWVNLNLWQKLKLSRDDAKPLLRLKGFPSFPLVERQANEVDWWDMVCNVKKLINEKKEDGKVFWQNLAGYKRQEALRPYLSSEEDRKKGKKFARYQLGDLLLHLEKKHGEYDWGKVYDEAWERIDKKVEGLSKHIKLEEERRSEDAQSKAALTDWLRAKASFVIEGLKEADKDEFCRCELKLQKWYGDLRGKPFAIEAENSILDISGFSKQYNCAFIWQKDGVKKLNLYLIINYFKGGKLRFKKIKPEAFEANRFYTVINKKSGEIVPMEVNFNFDDPNLIILPLAFGKRQGREFIWNDLLSLETGSLKLANGRVIEKTLYNRRTRQDEPALFVALTFERREVLDSSNIKPMNLIGVDRGENIPAVIALTDPEGCPLSRFKDSLGNPTHILRIGESYKEKQRTIQAKKEVEQRRAGGYSRKYASKAKNLADDMVRNTARDLLYYAVTQDAMLIFENLSRGFGRQGKRTFMAERQYTRMEDWLTAKLAYEGLPSKTYLSKTLAQYTSKTCSNCGFTITSADYDRVLEKLKKTATGWMTTINGKELKVEGQITYYNRYKRQNVVKDLSVELDRLSEESVNNDISSWTKGRQGEALSLLKKRFSHRPVQEKFVCLNCGFETHADEQAALNIARSWLFLRSQEYKKYQTNKTTGNTDKRAFVETWQSFYRKKLKEVWKPAV

SEQ ID NO: 47484 - protein, 979 aa, synthetic construct
  REGION 1..979: note = engineered CasX variant
QEIKRINKIRRRLVKDSNTKKAGKTGPMKTLLVRVMTPDLRERLENLRKKPENIPQPISNTSRANLNKLLTDYTEMKKAILHVYWEEFQKDPVGLMSRVAQPASKKIDQNKLKPEMDEKGNLTTAGFACSQCGQPLFVYKLEQVSEKGKAYTNYFGRCNVAEHEKLILLAQLKPEKDSDEAVTYSLGKFGQRALDFYSIHVTKESTHPVKPLAQIAGNRYASAPVGKALSDACMGTIASFLSKYQDIIIEHQKVVKGNQKRLESLRELAGKENLEYPSVTLPPQPHTKEGVDAYNEVIARVRMWVNLNLWQKLKLSRDDAKPLLRLKGFPSFPLVERQANEVDWWDMVCNVKKLINEKKEDGKVFWQNLAGYKRQEALRPYLSSEEDRKKGKKFARYQLGDLLLHLEKKHGEYDWGKVYDEAWERIDKKVEGLSKHIKLEEERRSEDAQSKAALTDWLRAKASFVIEGLKEADKDEFCRCELKLQKWYGDLRGKPFAIEAENSILDISGFSKQYNCAFIWQKDGVKKLNLYLIINYFKGGKLRFKKIKPEAFEANRFYTVINKKSGEIVPMEVNFNFDDPNLIILPLAFGKRQGREFIWNDLLSLETGSLKLANGRVIEKTLYNRRTRQDEPALFVALTFERREVLDSSNIKPMNLIGVDRGENIPAVIALTDPEGCPLSRFKDSLGNPTHILRIGESYKEKQRTIQAKKEVEQRRAGGYSRKYASKAKNLADDMVRNTARDLLYYAVTQDAMLIFENLSRGFGRQGKRTFMAERQYTRMEDWLTAKLAYEGLPSKTYLSKTLAQYTSKTCSNCGFTITSADYDRVLEKLKKTATGWMTTINGKELKVEGQITYYNRYKRQNVVKDLSVELDRLSEESVNNDISSWTKGRQGEALSLLKKRFSHRPVQEKFVCLNCGFETHADEQAALNIARSWLFLRSQEYKKYQTNKTTGNTDKRAFVETWQSFYRKKLKEVWKPAV

SEQ ID NO: 47485 - protein, 979 aa, synthetic construct
  REGION 1..979: note = engineered CasX variant
QEIKRINKIRRRLVKDSNTKKAGKTGPMKTLLVRVMTPDLRERLENLRKKPENIPQPISNTSRANLNKLLTDYTEMKKAILHVYWEEFQKDPVGLMSRVAQPASKKIDQNKLKPEMDEKGNLTTAGFACSQCGQPLFVYKLEQVSEKGKAYTNYFGRCNVAEHEKLILLAQLKPEKDSDEAVTYSLGKFGQRALDFYSIHVTKESTHPVKPLAQIAGNRYASVPVGKALSDACMGTIASFLSKYQDIIIEHQKVVKGNQKRLESLRELAGKENLEYPSVTLPPQPHTKEGVDAYNEVIARVRMWVNLNLWQKLKLSRDDAKPLLRLKGFPSFPLVERQANEVDWWDMVCNVKKLINEKKEDGKVFWQNLAGYKRQEALRPYLSSEEDRKKGKKFARYQLGDLLLHLEKKHGEYDWGKVYDEAWERIDKKVEGLSKHIKLEEERRSEDAQSKAALTDWLRAKASFVIEGLKEADKDEFCRCELKLQKWYGDLRGKPFAIEAENSILDISGFSKQYNCAFIWQKDGVKKLNLYLIINYFKGGKLRFKKIKPEAFEANRFYTVINKKSGEIVPMEVNFNFDDPNLIILPLAFGKRQGREFIWNDLLSLETGSLKLANGRVIEKTLYNRRTRQDEPALFVALTFERREVLDSSNIKPMNLIGVDRGENIPAVIALTDPEGCPLSRFKDSLGNPTHILRIGESYKEKQRTIQAKKEVEQRRAGGYSRKYASKAKNLADDMVRNTARDLLYYAVTQDAMLIFENLSRGFGRQGKRTFMAERQYTRMEDWLTAKLAYEGLPSKTYLSKTLAQYTSKTCSNCGFTITSADYDRVLEKLKKTATGWMTTINGKELKVEGQITYYNRYKRQNVVKDLSVELDRLSEESVNNDISSWTKGRQGEALSLLKKRFSHRPVQEKFVCLNCGFETHADEQAALNIARSWLFLRSQEYKKYQTNKTTGNTDKRAFVETWQSFYRKKLKEVWKPAV

SEQ ID NO: 47486 - protein, 979 aa, synthetic construct
  REGION 1..979: note = engineered CasX variant
QEIKRINKIRRRLVKDSNTKKAGKTGPMKTLLVRVMTPDLRERLENLRKKPENIPQPISNTSRANLNKLLTDYTEMKKAILHVYWEEFQKDPVGLMSRVAQPASKKIDQNKLKPEMDEKGNLTTAGFACSQCGQPLFVYKLEQVSEKGKAYTNYFGRCNVAEHEKLIKLAQLKPEKDSDEAVTYSLGKFGQRALDFYSIHVTKESTHPVKPLAQIAGNRYASGPVGKALSDACMGTIASFLSKYQDIIIEHQKVVKGNQKRLESLRELAGKENLEYPSVTLPPQPHTKEGVDAYNEVIARVRMWVNLNLWQKLKLSRDDAKPLLRLKGFPSFPLVERQANEVDWWDMVCNVKKLINEKKEDGKVFWQNLAGYKRQEALRPYLSSEEDRKKGKKFARYQLGDLLLHLEKKHGEYDWGKVYDEAWERIDKKVEGLSKHIKLEEERRSEDAQSKAALTDWLRAKASFVIEGLKEADKDEFCRCELKLQKWYGDLRGKPFAIEAENSILDISGFSKQYNCAFIWQKDGVKKLNLYLIINYFKGGKLRFKKIKPEAFEANRFYTVINKKSGEIVPMEVNFNFDDPNLIILPLAFGKRQGREFIWNDLLSLETGSLKLANGRVIEKTLYNRRTRQDEPALFVALTFERREVLDSSNIKPMNLIGVDRGENIPAVIALTDPEGCPLSRFKDSLGNPTHILRIGESYKEKQRTIQAKKEVEQRRAGGYSRKYASKAKNLADDMVRNTARDLLYYAVTQDAMLIFENLSRGFGRQGKRTFMAERQYTRMEDWLTAKLAYEGLPSKTYLSKTLAQYTSKTCSNCGFTITSADYDRVLEKLKKTATGWMTTINGKELKVEGQITYYNRYKRQNVVKDLSVELDRLSEESVNNDISSWTKGRQGEALSLLKKRFSHRPVQEKFVCLNCGFETHADEQAALNIARSWLFLRSQEYKKYQTNKTTGNTDKRAFVETWQSFYRKKLKEVWKPAV

SEQ ID NO: 47487 - protein, 978 aa, synthetic construct
  REGION 1..978: note = engineered CasX variant
QEIKRINKIRRRLVKDSNTKKAGKTGPMKTLLVRVMTPDLRERLENLRKKPENIPQPISNTSRANLNKLLTDYTEMKKAILHVYWEEFQKDPVGLMSRVAQPASKKIDQNKLKPEMDEKGNLTTAGFACSQCGQPLFVYKLEQVSEKGKAYTNYFGRCNVAEHEKLILLAQLKPEKDSDEAVTYSLGKFGQRALDFYSIHVTKESTHPVKPLAQIAGNRYASPVGKALSDACMGTIASFLSKYQDIIIEHQKVVKGNQKRLESLRELAGKENLEYPSVTLPPQPHTKEGVDAYNEVIARVRMWVNLNLWQKLKLSRDDAKPLLRLKGFPSFPLVERQANEVDWWDMVCNVKKLINEKKEDGKVFWQNLAGYKRQEALRPYLSSEEDRKKGKKFARYQLGDLLLHLEKKHGEYDWGKVYDEAWERIDKKVEGLSKHIKLEEERRSEDAQSKAALTDWLRAKASFVIEGLKEADKDEFCRCELKLQKWYGDLRGKPFAIEAENSILDISGFSKQYNCAFIWQKDGVKKLNLYLIINYFKGGKLRFKKIKPEAFEANRFYTVINKKSGEIVPMEVNFNFDDPNLIILPLAFGKRQGREFIWNDLLSLETGSLKLANGRVIEKTLYNRRTRQDEPALFVALTFERREVLDSSNIKPMNLIGVDRGENIPAVIALTDPEGCPLSRFKDSLGNPTHILRIGESYKEKQRTIQAKKEVEQRRAGGYSRKYASKAKNLADDMVRNTARDLLYYAVTQDAMLIFENLSRGFGRQGKRTFMAERQYTRMEDWLTAKLAYEGLPSKTYLSKTLAQYTSKTCSNCGFTITSADYDRVLEKLKKTATGWMTTINGKELKVEGQITYYNRYKRQNVVKDLSVELDRLSEESVNNDISSWTKGRQGEALSLLKKRFSHRPVQEKFVCLNCGFETHADEQAALNIARSWLFLRSQEYKKYQTNKTTGNTDKRAFVETWQSFYRKKLKEVWKPAV

SEQ ID NO: 47488 - protein, 978 aa, synthetic construct
  REGION 1..978: note = engineered CasX variant
QEIKRINKIRRRLVKDSNTKKAGKTGPMKTLLVRVMTPDLRERLENLRKKPENIPQPISNTSRANLNKLLTDYTEMKKAILHVYWEEFQKDPVGLMSRVAQPASKKIDQNKLKPEMDEKGNLTTAGFACSQCGQPLFVYKLEQVSEKGKAYTNYFGRCNVAEHEKLILLAQLKPEKDSDEAVTYSLGKFGQRALDFYSIHVTKESTHPVKPLAQIAGNRYASYPVGKALSDACMGTIASFLSKYQDIIIEHQKVVKGNQKRLESLRELAGKENLEYPSVTLPPQPHTKEGVDAYNEVIARVRMWVNLNLWQKLKLSRDDAKPLLRLKGFPSFPLVERQANEVDWWDMVCNVKKLINEKKEDGKVFWQNLAGYKRQEALRPYLSSEEDRKKGKKFARYQLGDLLLHLEKKHGEDWGDVYDEAWERIDKKVEGLSKHIKLEEERRSEDAQSKAALTDWLRAKASFVIEGLKEADKDEFCRCELKLQKWYGDLRGKPFAIEAENSILDISGFSKQYNCAFIWQKDGVKKLNLYLIINYFKGGKLRFKKIKPEAFEANRFYTVINKKSGEIVPMEVNFNFDDPNLIILPLAFGKRQGREFIWNDLLSLETGSLKLANGRVIEKTLYNRRTRQDEPALFVALTFERREVLDSSNIKPMNLIGVDRGENIPAVIALTDPEGCPLSRFKDSLGNPTHILRIGESYKEKQRTIQAKKEVEQRRAGGYSRKYASKAKNLADDMVRNTARDLLYYAVTQDAMLIFENLSRGFGRQGKRTFMAERQYTRMEDWLTAKLAYEGLPSKTYLSKTLAQYTSKTCSNCGFTITSADYDRVLEKLKKTATGWMTTINGKELKVEGQITYYNRYKRQNVVKDLSVELDRLSEESVNNDISSWTKGRQGEALSLLKKRFSHRPVQEKFVCLNCGFETHADEQAALNIARSWLFLRSQEYKKYQTNKTTGNTDKRAFVETWQSFYRKKLKEVWKPAV

SEQ ID NO: 47489 - protein, 978 aa, synthetic construct
  REGION 1..978: note = engineered CasX variant
QEIKRINKIRRRLVKDSNTKKAGKTGPMKTLLVRVMTPDLRERLENLRKKPENIPQPISNTSRANLNKLLTDYTEMKKAILHVYWEEFQKDPVGLMSRVAQPASKKIDQNKLKPEMDEKGNLTTAGFACSQCGQPLFVYKLEQVSEKGKAYTNYFGRCNVAEHEKLILLAQLKPEKDSDEAVTYSLGKFGQRALDFYSIHVTKESTHPVKPLAQIAGNRYASHPVGKALSDACMGTIASFLSKYQDIIIEHQKVVKGNQKRLESLRELAGKENLEYPSVTLPPQPHTKEGVDAYNEVIARVRMWVNLNLWQKLKLSRDDAKPLLRLKGFPSFPLVERQANEVDWWDMVCNVKKLINEKKEDGKVFWQNLAGYKRQEALRPYLSSEEDRKKGKKFARYQLGDLLLHLEKKHGEDWGDVYDEAWERIDKKVEGLSKHIKLEEERRSEDAQSKAALTDWLRAKASFVIEGLKEADKDEFCRCELKLQKWYGDLRGKPFAIEAENSILDISGFSKQYNCAFIWQKDGVKKLNLYLIINYFKGGKLRFKKIKPEAFEANRFYTVINKKSGEIVPMEVNFNFDDPNLIILPLAFGKRQGREFIWNDLLSLETGSLKLANGRVIEKTLYNRRTRQDEPALFVALTFERREVLDSSNIKPMNLIGVDRGENIPAVIALTDPEGCPLSRFKDSLGNPTHILRIGESYKEKQRTIQAKKEVEQRRAGGYSRKYASKAKNLADDMVRNTARDLLYYAVTQDAMLIFENLSRGFGRQGKRTFMAERQYTRMEDWLTAKLAYEGLPSKTYLSKTLAQYTSKTCSNCGFTITSADYDRVLEKLKKTATGWMTTINGKELKVEGQITYYNRYKRQNVVKDLSVELDRLSEESVNNDISSWTKGRQGEALSLLKKRFSHRPVQEKFVCLNCGFETHADEQAALNIARSWLFLRSQEYKKYQTNKTTGNTDKRAFVETWQSFYRKKLKEVWKPAV

SEQ ID NO: 47490 - protein, 978 aa, synthetic construct
  REGION 1..978: note = engineered CasX variant
QEIKRINKIRRRLVKDSNTKKAGKTGPMKTLLVRVMTPDLRERLENLRKKPENIPQPISNTSRANLNKLLTDYTEMKKAILHVYWEEFQKDPVGLMSRVAQPASKKIDQNKLKPEMDEKGNLTTAGFACSQCGQPLFVYKLEQVSEKGKAYTNYFGRCNVAEHEKLILLAQLKPEKDSDEAVTYSLGKFGQRALDFYSIHVTKESTHPVKPLAQIAGNRYASSPVGKALSDACMGTIASFLSKYQDIIIEHQKVVKGNQKRLESLRELAGKENLEYPSVTLPPQPHTKEGVDAYNEVIARVRMWVNLNLWQKLKLSRDDAKPLLRLKGFPSFPLVERQANEVDWWDMVCNVKKLINEKKEDGKVFWQNLAGYKRQEALRPYLSSEEDRKKGKKFARYQLGDLLLHLEKKHGEDWGDVYDEAWERIDKKVEGLSKHIKLEEERRSEDAQSKAALTDWLRAKASFVIEGLKEADKDEFCRCELKLQKWYGDLRGKPFAIEAENSILDISGFSKQYNCAFIWQKDGVKKLNLYLIINYFKGGKLRFKKIKPEAFEANRFYTVINKKSGEIVPMEVNFNFDDPNLIILPLAFGKRQGREFIWNDLLSLETGSLKLANGRVIEKTLYNRRTRQDEPALFVALTFERREVLDSSNIKPMNLIGVDRGENIPAVIALTDPEGCPLSRFKDSLGNPTHILRIGESYKEKQRTIQAKKEVEQRRAGGYSRKYASKAKNLADDMVRNTARDLLYYAVTQDAMLIFENLSRGFGRQGKRTFMAERQYTRMEDWLTAKLAYEGLPSKTYLSKTLAQYTSKTCSNCGFTITSADYDRVLEKLKKTATGWMTTINGKELKVEGQITYYNRYKRQNVVKDLSVELDRLSEESVNNDISSWTKGRQGEALSLLKKRFSHRPVQEKFVCLNCGFETHADEQAALNIARSWLFLRSQEYKKYQTNKTTGNTDKRAFVETWQSFYRKKLKEVWKPAV

SEQ ID NO: 47491 - protein, 978 aa, synthetic construct
  REGION 1..978: note = engineered CasX variant
QEIKRINKIRRRLVKDSNTKKAGKTGPMKTLLVRVMTPDLRERLENLRKKPENIPQPISNTSRANLNKLLTDYTEMKKAILHVYWEEFQKDPVGLMSRVAQPASKKIDQNKLKPEMDEKGNLTTAGFACSQCGQPLFVYKLEQVSEKGKAYTNYFGRCNVAEHEKLILLAQLKPEKDSDEAVTYSLGKFGQRALDFYSIHVTKESTHPVKPLAQIAGNRYASTPVGKALSDACMGTIASFLSKYQDIIIEHQKVVKGNQKRLESLRELAGKENLEYPSVTLPPQPHTKEGVDAYNEVIARVRMWVNLNLWQKLKLSRDDAKPLLRLKGFPSFPLVERQANEVDWWDMVCNVKKLINEKKEDGKVFWQNLAGYKRQEALRPYLSSEEDRKKGKKFARYQLGDLLLHLEKKHGEDWGDVYDEAWERIDKKVEGLSKHIKLEEERRSEDAQSKAALTDWLRAKASFVIEGLKEADKDEFCRCELKLQKWYGDLRGKPFAIEAENSILDISGFSKQYNCAFIWQKDGVKKLNLYLIINYFKGGKLRFKKIKPEAFEANRFYTVINKKSGEIVPMEVNFNFDDPNLIILPLAFGKRQGREFIWNDLLSLETGSLKLANGRVIEKTLYNRRTRQDEPALFVALTFERREVLDSSNIKPMNLIGVDRGENIPAVIALTDPEGCPLSRFKDSLGNPTHILRIGESYKEKQRTIQAKKEVEQRRAGGYSRKYASKAKNLADDMVRNTARDLLYYAVTQDAMLIFENLSRGFGRQGKRTFMAERQYTRMEDWLTAKLAYEGLPSKTYLSKTLAQYTSKTCSNCGFTITSADYDRVLEKLKKTATGWMTTINGKELKVEGQITYYNRYKRQNVVKDLSVELDRLSEESVNNDISSWTKGRQGEALSLLKKRFSHRPVQEKFVCLNCGFETHADEQAALNIARSWLFLRSQEYKKYQTNKTTGNTDKRAFVETWQSFYRKKLKEVWKPAV

SEQ ID NO: 47492 - protein, 978 aa, synthetic construct
  REGION 1..978: note = engineered CasX variant
QEIKRINKIRRRLVKDSNTKKAGKTGPMKTLLVRVMTPDLRERLENLRKKPENIPQPISNTSRANLNKLLTDYTEMKKAILHVYWEEFQKDPVGLMSRVAQPASKKIDQNKLKPEMDEKGNLTTAGFACSQCGQPLFVYKLEQVSEKGKAYTNYFGRCNVAEHEKLILLAQLKPEKDSDEAVTYSLGKFGQRALDFYSIHVTKESTHPVKPLAQIAGNRYASAPVGKALSDACMGTIASFLSKYQDIIIEHQKVVKGNQKRLESLRELAGKENLEYPSVTLPPQPHTKEGVDAYNEVIARVRMWVNLNLWQKLKLSRDDAKPLLRLKGFPSFPLVERQANEVDWWDMVCNVKKLINEKKEDGKVFWQNLAGYKRQEALRPYLSSEEDRKKGKKFARYQLGDLLLHLEKKHGEDWGDVYDEAWERIDKKVEGLSKHIKLEEERRSEDAQSKAALTDWLRAKASFVIEGLKEADKDEFCRCELKLQKWYGDLRGKPFAIEAENSILDISGFSKQYNCAFIWQKDGVKKLNLYLIINYFKGGKLRFKKIKPEAFEANRFYTVINKKSGEIVPMEVNFNFDDPNLIILPLAFGKRQGREFIWNDLLSLETGSLKLANGRVIEKTLYNRRTRQDEPALFVALTFERREVLDSSNIKPMNLIGVDRGENIPAVIALTDPEGCPLSRFKDSLGNPTHILRIGESYKEKQRTIQAKKEVEQRRAGGYSRKYASKAKNLADDMVRNTARDLLYYAVTQDAMLIFENLSRGFGRQGKRTFMAERQYTRMEDWLTAKLAYEGLPSKTYLSKTLAQYTSKTCSNCGFTITSADYDRVLEKLKKTATGWMTTINGKELKVEGQITYYNRYKRQNVVKDLSVELDRLSEESVNNDISSWTKGRQGEALSLLKKRFSHRPVQEKFVCLNCGFETHADEQAALNIARSWLFLRSQEYKKYQTNKTTGNTDKRAFVETWQSFYRKKLKEVWKPAV

SEQ ID NO: 47493 - protein, 978 aa, synthetic construct
  REGION 1..978: note = engineered CasX variant
QEIKRINKIRRRLVKDSNTKKAGKTGPMKTLLVRVMTPDLRERLENLRKKPENIPQPISNTSRANLNKLLTDYTEMKKAILHVYWEEFQKDPVGLMSRVAQPASKKIDQNKLKPEMDEKGNLTTAGFACSQCGQPLFVYKLEQVSEKGKAYTNYFGRCNVAEHEKLILLAQLKPEKDSDEAVTYSLGKFGQRALDFYSIHVTKESTHPVKPLAQIAGNRYASVPVGKALSDACMGTIASFLSKYQDIIIEHQKVVKGNQKRLESLRELAGKENLEYPSVTLPPQPHTKEGVDAYNEVIARVRMWVNLNLWQKLKLSRDDAKPLLRLKGFPSFPLVERQANEVDWWDMVCNVKKLINEKKEDGKVFWQNLAGYKRQEALRPYLSSEEDRKKGKKFARYQLGDLLLHLEKKHGEDWGDVYDEAWERIDKKVEGLSKHIKLEEERRSEDAQSKAALTDWLRAKASFVIEGLKEADKDEFCRCELKLQKWYGDLRGKPFAIEAENSILDISGFSKQYNCAFIWQKDGVKKLNLYLIINYFKGGKLRFKKIKPEAFEANRFYTVINKKSGEIVPMEVNFNFDDPNLIILPLAFGKRQGREFIWNDLLSLETGSLKLANGRVIEKTLYNRRTRQDEPALFVALTFERREVLDSSNIKPMNLIGVDRGENIPAVIALTDPEGCPLSRFKDSLGNPTHILRIGESYKEKQRTIQAKKEVEQRRAGGYSRKYASKAKNLADDMVRNTARDLLYYAVTQDAMLIFENLSRGFGRQGKRTFMAERQYTRMEDWLTAKLAYEGLPSKTYLSKTLAQYTSKTCSNCGFTITSADYDRVLEKLKKTATGWMTTINGKELKVEGQITYYNRYKRQNVVKDLSVELDRLSEESVNNDISSWTKGRQGEALSLLKKRFSHRPVQEKFVCLNCGFETHADEQAALNIARSWLFLRSQEYKKYQTNKTTGNTDKRAFVETWQSFYRKKLKEVWKPAV

SEQ ID NO: 47494 - protein, 978 aa, synthetic construct
  REGION 1..978: note = engineered CasX variant
QEIKRINKIRRRLVKDSNTKKAGKTGPMKTLLVRVMTPDLRERLENLRKKPENIPQPISNTSRANLNKLLTDYTEMKKAILHVYWEEFQKDPVGLMSRVAQPASKKIDQNKLKPEMDEKGNLTTAGFACSQCGQPLFVYKLEQVSEKGKAYTNYFGRCNVAEHEKLIKLAQLKPEKDSDEAVTYSLGKFGQRALDFYSIHVTKESTHPVKPLAQIAGNRYASGPVGKALSDACMGTIASFLSKYQDIIIEHQKVVKGNQKRLESLRELAGKENLEYPSVTLPPQPHTKEGVDAYNEVIARVRMWVNLNLWQKLKLSRDDAKPLLRLKGFPSFPLVERQANEVDWWDMVCNVKKLINEKKEDGKVFWQNLAGYKRQEALRPYLSSEEDRKKGKKFARYQLGDLLLHLEKKHGEDWGDVYDEAWERIDKKVEGLSKHIKLEEERRSEDAQSKAALTDWLRAKASFVIEGLKEADKDEFCRCELKLQKWYGDLRGKPFAIEAENSILDISGFSKQYNCAFIWQKDGVKKLNLYLIINYFKGGKLRFKKIKPEAFEANRFYTVINKKSGEIVPMEVNFNFDDPNLIILPLAFGKRQGREFIWNDLLSLETGSLKLANGRVIEKTLYNRRTRQDEPALFVALTFERREVLDSSNIKPMNLIGVDRGENIPAVIALTDPEGCPLSRFKDSLGNPTHILRIGESYKEKQRTIQAKKEVEQRRAGGYSRKYASKAKNLADDMVRNTARDLLYYAVTQDAMLIFENLSRGFGRQGKRTFMAERQYTRMEDWLTAKLAYEGLPSKTYLSKTLAQYTSKTCSNCGFTITSADYDRVLEKLKKTATGWMTTINGKELKVEGQITYYNRYKRQNVVKDLSVELDRLSEESVNNDISSWTKGRQGEALSLLKKRFSHRPVQEKFVCLNCGFETHADEQAALNIARSWLFLRSQEYKKYQTNKTTGNTDKRAFVETWQSFYRKKLKEVWKPAV

SEQ ID NO: 47495 - protein, 977 aa, synthetic construct
  REGION 1..977: note = engineered CasX variant
QEIKRINKIRRRLVKDSNTKKAGKTGPMKTLLVRVMTPDLRERLENLRKKPENIPQPISNTSRANLNKLLTDYTEMKKAILHVYWEEFQKDPVGLMSRVAQPASKKIDQNKLKPEMDEKGNLTTAGFACSQCGQPLFVYKLEQVSEKGKAYTNYFGRCNVAEHEKLILLAQLKPEKDSDEAVTYSLGKFGQRALDFYSIHVTKESTHPVKPLAQIAGNRYASPVGKALSDACMGTIASFLSKYQDIIIEHQKVVKGNQKRLESLRELAGKENLEYPSVTLPPQPHTKEGVDAYNEVIARVRMWVNLNLWQKLKLSRDDAKPLLRLKGFPSFPLVERQANEVDWWDMVCNVKKLINEKKEDGKVFWQNLAGYKRQEALRPYLSSEEDRKKGKKFARYQLGDLLLHLEKKHGEDWGDVYDEAWERIDKKVEGLSKHIKLEEERRSEDAQSKAALTDWLRAKASFVIEGLKEADKDEFCRCELKLQKWYGDLRGKPFAIEAENSILDISGFSKQYNCAFIWQKDGVKKLNLYLIINYFKGGKLRFKKIKPEAFEANRFYTVINKKSGEIVPMEVNFNFDDPNLIILPLAFGKRQGREFIWNDLLSLETGSLKLANGRVIEKTLYNRRTRQDEPALFVALTFERREVLDSSNIKPMNLIGVDRGENIPAVIALTDPEGCPLSRFKDSLGNPTHILRIGESYKEKQRTIQAKKEVEQRRAGGYSRKYASKAKNLADDMVRNTARDLLYYAVTQDAMLIFENLSRGFGRQGKRTFMAERQYTRMEDWLTAKLAYEGLPSKTYLSKTLAQYTSKTCSNCGFTITSADYDRVLEKLKKTATGWMTTINGKELKVEGQITYYNRYKRQNVVKDLSVELDRLSEESVNNDISSWTKGRQGEALSLLKKRFSHRPVQEKFVCLNCGFETHADEQAALNIARSWLFLRSQEYKKYQTNKTTGNTDKRAFVETWQSFYRKKLKEVWKPAV

SEQ ID NO: 47496 - protein, 978 aa, synthetic construct
  REGION 1..978: note = engineered CasX variant
QEIKRINKIRRRLVKDSNTKKAGKTGPMKTLLVRVMTPDLRERLENLRKKPENIPQPISNTSRANLNKLLTDYTEMKKAILHVYWEEFQKDPVGLMSRVAQPASKKIDQNKLKPEMDEKGNLTTAGFACSQCGQPLFVYKLEQVSEKGKAYTNYFGRCNVAEHEKLILLAQLKPEKDSDEAVTYSLGKFGQRALDFYSIHVTKESTHPVKPLAQIAGNRYASYPVGKALSDACMGTIASFLSKYQDIIIEHQKVVKGNQKRLESLRELAGKENLEYPSVTLPPQPHTKEGVDAYNEVIARVRMWVNLNLWQKLKLSRDDAKPLLRLKGFPSFPLVERQANEVDWWDMVCNVKKLINEKKEDGKVFWQNLAGYKRQEALRPYLSSEEDRKKGKKFARYQLGDLLLHLEKKHGEDWGKVYGEAWERIDKKVEGLSKHIKLEEERRSEDAQSKAALTDWLRAKASFVIEGLKEADKDEFCRCELKLQKWYGDLRGKPFAIEAENSILDISGFSKQYNCAFIWQKDGVKKLNLYLIINYFKGGKLRFKKIKPEAFEANRFYTVINKKSGEIVPMEVNFNFDDPNLIILPLAFGKRQGREFIWNDLLSLETGSLKLANGRVIEKTLYNRRTRQDEPALFVALTFERREVLDSSNIKPMNLIGVDRGENIPAVIALTDPEGCPLSRFKDSLGNPTHILRIGESYKEKQRTIQAKKEVEQRRAGGYSRKYASKAKNLADDMVRNTARDLLYYAVTQDAMLIFENLSRGFGRQGKRTFMAERQYTRMEDWLTAKLAYEGLPSKTYLSKTLAQYTSKTCSNCGFTITSADYDRVLEKLKKTATGWMTTINGKELKVEGQITYYNRYKRQNVVKDLSVELDRLSEESVNNDISSWTKGRQGEALSLLKKRFSHRPVQEKFVCLNCGFETHADEQAALNIARSWLFLRSQEYKKYQTNKTTGNTDKRAFVETWQSFYRKKLKEVWKPAV

SEQ ID NO: 47497 - protein, 978 aa, synthetic construct
  REGION 1..978: note = engineered CasX variant
QEIKRINKIRRRLVKDSNTKKAGKTGPMKTLLVRVMTPDLRERLENLRKKPENIPQPISNTSRANLNKLLTDYTEMKKAILHVYWEEFQKDPVGLMSRVAQPASKKIDQNKLKPEMDEKGNLTTAGFACSQCGQPLFVYKLEQVSEKGKAYTNYFGRCNVAEHEKLILLAQLKPEKDSDEAVTYSLGKFGQRALDFYSIHVTKESTHPVKPLAQIAGNRYASHPVGKALSDACMGTIASFLSKYQDIIIEHQKVVKGNQKRLESLRELAGKENLEYPSVTLPPQPHTKEGVDAYNEVIARVRMWVNLNLWQKLKLSRDDAKPLLRLKGFPSFPLVERQANEVDWWDMVCNVKKLINEKKEDGKVFWQNLAGYKRQEALRPYLSSEEDRKKGKKFARYQLGDLLLHLEKKHGEDWGKVYGEAWERIDKKVEGLSKHIKLEEERRSEDAQSKAALTDWLRAKASFVIEGLKEADKDEFCRCELKLQKWYGDLRGKPFAIEAENSILDISGFSKQYNCAFIWQKDGVKKLNLYLIINYFKGGKLRFKKIKPEAFEANRFYTVINKKSGEIVPMEVNFNFDDPNLIILPLAFGKRQGREFIWNDLLSLETGSLKLANGRVIEKTLYNRRTRQDEPALFVALTFERREVLDSSNIKPMNLIGVDRGENIPAVIALTDPEGCPLSRFKDSLGNPTHILRIGESYKEKQRTIQAKKEVEQRRAGGYSRKYASKAKNLADDMVRNTARDLLYYAVTQDAMLIFENLSRGFGRQGKRTFMAERQYTRMEDWLTAKLAYEGLPSKTYLSKTLAQYTSKTCSNCGFTITSADYDRVLEKLKKTATGWMTTINGKELKVEGQITYYNRYKRQNVVKDLSVELDRLSEESVNNDISSWTKGRQGEALSLLKKRFSHRPVQEKFVCLNCGFETHADEQAALNIARSWLFLRSQEYKKYQTNKTTGNTDKRAFVETWQSFYRKKLKEVWKPAV

SEQ ID NO: 47498 - protein, 978 aa, synthetic construct
  REGION 1..978: note = engineered CasX variant
QEIKRINKIRRRLVKDSNTKKAGKTGPMKTLLVRVMTPDLRERLENLRKKPENIPQPISNTSRANLNKLLTDYTEMKKAILHVYWEEFQKDPVGLMSRVAQPASKKIDQNKLKPEMDEKGNLTTAGFACSQCGQPLFVYKLEQVSEKGKAYTNYFGRCNVAEHEKLILLAQLKPEKDSDEAVTYSLGKFGQRALDFYSIHVTKESTHPVKPLAQIAGNRYASSPVGKALSDACMGTIASFLSKYQDIIIEHQKVVKGNQKRLESLRELAGKENLEYPSVTLPPQPHTKEGVDAYNEVIARVRMWVNLNLWQKLKLSRDDAKPLLRLKGFPSFPLVERQANEVDWWDMVCNVKKLINEKKEDGKVFWQNLAGYKRQEALRPYLSSEEDRKKGKKFARYQLGDLLLHLEKKHGEDWGKVYGEAWERIDKKVEGLSKHIKLEEERRSEDAQSKAALTDWLRAKASFVIEGLKEADKDEFCRCELKLQKWYGDLRGKPFAIEAENSILDISGFSKQYNCAFIWQKDGVKKLNLYLIINYFKGGKLRFKKIKPEAFEANRFYTVINKKSGEIVPMEVNFNFDDPNLIILPLAFGKRQGREFIWNDLLSLETGSLKLANGRVIEKTLYNRRTRQDEPALFVALTFERREVLDSSNIKPMNLIGVDRGENIPAVIALTDPEGCPLSRFKDSLGNPTHILRIGESYKEKQRTIQAKKEVEQRRAGGYSRKYASKAKNLADDMVRNTARDLLYYAVTQDAMLIFENLSRGFGRQGKRTFMAERQYTRMEDWLTAKLAYEGLPSKTYLSKTLAQYTSKTCSNCGFTITSADYDRVLEKLKKTATGWMTTINGKELKVEGQITYYNRYKRQNVVKDLSVELDRLSEESVNNDISSWTKGRQGEALSLLKKRFSHRPVQEKFVCLNCGFETHADEQAALNIARSWLFLRSQEYKKYQTNKTTGNTDKRAFVETWQSFYRKKLKEVWKPAV

SEQ ID NO: 47499 - protein, 978 aa, synthetic construct
  REGION 1..978: note = engineered CasX variant
QEIKRINKIRRRLVKDSNTKKAGKTGPMKTLLVRVMTPDLRERLENLRKKPENIPQPISNTSRANLNKLLTDYTEMKKAILHVYWEEFQKDPVGLMSRVAQPASKKIDQNKLKPEMDEKGNLTTAGFACSQCGQPLFVYKLEQVSEKGKAYTNYFGRCNVAEHEKLILLAQLKPEKDSDEAVTYSLGKFGQRALDFYSIHVTKESTHPVKPLAQIAGNRYASTPVGKALSDACMGTIASFLSKYQDIIIEHQKVVKGNQKRLESLRELAGKENLEYPSVTLPPQPHTKEGVDAYNEVIARVRMWVNLNLWQKLKLSRDDAKPLLRLKGFPSFPLVERQANEVDWWDMVCNVKKLINEKKEDGKVFWQNLAGYKRQEALRPYLSSEEDRKKGKKFARYQLGDLLLHLEKKHGEDWGKVYGEAWERIDKKVEGLSKHIKLEEERRSEDAQSKAALTDWLRAKASFVIEGLKEADKDEFCRCELKLQKWYGDLRGKPFAIEAENSILDISGFSKQYNCAFIWQKDGVKKLNLYLIINYFKGGKLRFKKIKPEAFEANRFYTVINKKSGEIVPMEVNFNFDDPNLIILPLAFGKRQGREFIWNDLLSLETGSLKLANGRVIEKTLYNRRTRQDEPALFVALTFERREVLDSSNIKPMNLIGVDRGENIPAVIALTDPEGCPLSRFKDSLGNPTHILRIGESYKEKQRTIQAKKEVEQRRAGGYSRKYASKAKNLADDMVRNTARDLLYYAVTQDAMLIFENLSRGFGRQGKRTFMAERQYTRMEDWLTAKLAYEGLPSKTYLSKTLAQYTSKTCSNCGFTITSADYDRVLEKLKKTATGWMTTINGKELKVEGQITYYNRYKRQNVVKDLSVELDRLSEESVNNDISSWTKGRQGEALSLLKKRFSHRPVQEKFVCLNCGFETHADEQAALNIARSWLFLRSQEYKKYQTNKTTGNTDKRAFVETWQSFYRKKLKEVWKPAV

SEQ ID NO: 47500 - protein, 978 aa, synthetic construct
  REGION 1..978: note = engineered CasX variant
QEIKRINKIRRRLVKDSNTKKAGKTGPMKTLLVRVMTPDLRERLENLRKKPENIPQPISNTSRANLNKLLTDYTEMKKAILHVYWEEFQKDPVGLMSRVAQPASKKIDQNKLKPEMDEKGNLTTAGFACSQCGQPLFVYKLEQVSEKGKAYTNYFGRCNVAEHEKLILLAQLKPEKDSDEAVTYSLGKFGQRALDFYSIHVTKESTHPVKPLAQIAGNRYASAPVGKALSDACMGTIASFLSKYQDIIIEHQKVVKGNQKRLESLRELAGKENLEYPSVTLPPQPHTKEGVDAYNEVIARVRMWVNLNLWQKLKLSRDDAKPLLRLKGFPSFPLVERQANEVDWWDMVCNVKKLINEKKEDGKVFWQNLAGYKRQEALRPYLSSEEDRKKGKKFARYQLGDLLLHLEKKHGEDWGKVYGEAWERIDKKVEGLSKHIKLEEERRSEDAQSKAALTDWLRAKASFVIEGLKEADKDEFCRCELKLQKWYGDLRGKPFAIEAENSILDISGFSKQYNCAFIWQKDGVKKLNLYLIINYFKGGKLRFKKIKPEAFEANRFYTVINKKSGEIVPMEVNFNFDDPNLIILPLAFGKRQGREFIWNDLLSLETGSLKLANGRVIEKTLYNRRTRQDEPALFVALTFERREVLDSSNIKPMNLIGVDRGENIPAVIALTDPEGCPLSRFKDSLGNPTHILRIGESYKEKQRTIQAKKEVEQRRAGGYSRKYASKAKNLADDMVRNTARDLLYYAVTQDAMLIFENLSRGFGRQGKRTFMAERQYTRMEDWLTAKLAYEGLPSKTYLSKTLAQYTSKTCSNCGFTITSADYDRVLEKLKKTATGWMTTINGKELKVEGQITYYNRYKRQNVVKDLSVELDRLSEESVNNDISSWTKGRQGEALSLLKKRFSHRPVQEKFVCLNCGFETHADEQAALNIARSWLFLRSQEYKKYQTNKTTGNTDKRAFVETWQSFYRKKLKEVWKPAV

SEQ ID NO: 47501 - protein, 978 aa, synthetic construct
  REGION 1..978: note = engineered CasX variant
QEIKRINKIRRRLVKDSNTKKAGKTGPMKTLLVRVMTPDLRERLENLRKKPENIPQPISNTSRANLNKLLTDYTEMKKAILHVYWEEFQKDPVGLMSRVAQPASKKIDQNKLKPEMDEKGNLTTAGFACSQCGQPLFVYKLEQVSEKGKAYTNYFGRCNVAEHEKLILLAQLKPEKDSDEAVTYSLGKFGQRALDFYSIHVTKESTHPVKPLAQIAGNRYASVPVGKALSDACMGTIASFLSKYQDIIIEHQKVVKGNQKRLESLRELAGKENLEYPSVTLPPQPHTKEGVDAYNEVIARVRMWVNLNLWQKLKLSRDDAKPLLRLKGFPSFPLVERQANEVDWWDMVCNVKKLINEKKEDGKVFWQNLAGYKRQEALRPYLSSEEDRKKGKKFARYQLGDLLLHLEKKHGEDWGKVYGEAWERIDKKVEGLSKHIKLEEERRSEDAQSKAALTDWLRAKASFVIEGLKEADKDEFCRCELKLQKWYGDLRGKPFAIEAENSILDISGFSKQYNCAFIWQKDGVKKLNLYLIINYFKGGKLRFKKIKPEAFEANRFYTVINKKSGEIVPMEVNFNFDDPNLIILPLAFGKRQGREFIWNDLLSLETGSLKLANGRVIEKTLYNRRTRQDEPALFVALTFERREVLDSSNIKPMNLIGVDRGENIPAVIALTDPEGCPLSRFKDSLGNPTHILRIGESYKEKQRTIQAKKEVEQRRAGGYSRKYASKAKNLADDMVRNTARDLLYYAVTQDAMLIFENLSRGFGRQGKRTFMAERQYTRMEDWLTAKLAYEGLPSKTYLSKTLAQYTSKTCSNCGFTITSADYDRVLEKLKKTATGWMTTINGKELKVEGQITYYNRYKRQNVVKDLSVELDRLSEESVNNDISSWTKGRQGEALSLLKKRFSHRPVQEKFVCLNCGFETHADEQAALNIARSWLFLRSQEYKKYQTNKTTGNTDKRAFVETWQSFYRKKLKEVWKPAV

SEQ ID NO: 47502 - protein, 978 aa, synthetic construct
  REGION 1..978: note = engineered CasX variant
QEIKRINKIRRRLVKDSNTKKAGKTGPMKTLLVRVMTPDLRERLENLRKKPENIPQPISNTSRANLNKLLTDYTEMKKAILHVYWEEFQKDPVGLMSRVAQPASKKIDQNKLKPEMDEKGNLTTAGFACSQCGQPLFVYKLEQVSEKGKAYTNYFGRCNVAEHEKLIKLAQLKPEKDSDEAVTYSLGKFGQRALDFYSIHVTKESTHPVKPLAQIAGNRYASGPVGKALSDACMGTIASFLSKYQDIIIEHQKVVKGNQKRLESLRELAGKENLEYPSVTLPPQPHTKEGVDAYNEVIARVRMWVNLNLWQKLKLSRDDAKPLLRLKGFPSFPLVERQANEVDWWDMVCNVKKLINEKKEDGKVFWQNLAGYKRQEALRPYLSSEEDRKKGKKFARYQLGDLLLHLEKKHGEDWGKVYGEAWERIDKKVEGLSKHIKLEEERRSEDAQSKAALTDWLRAKASFVIEGLKEADKDEFCRCELKLQKWYGDLRGKPFAIEAENSILDISGFSKQYNCAFIWQKDGVKKLNLYLIINYFKGGKLRFKKIKPEAFEANRFYTVINKKSGEIVPMEVNFNFDDPNLIILPLAFGKRQGREFIWNDLLSLETGSLKLANGRVIEKTLYNRRTRQDEPALFVALTFERREVLDSSNIKPMNLIGVDRGENIPAVIALTDPEGCPLSRFKDSLGNPTHILRIGESYKEKQRTIQAKKEVEQRRAGGYSRKYASKAKNLADDMVRNTARDLLYYAVTQDAMLIFENLSRGFGRQGKRTFMAERQYTRMEDWLTAKLAYEGLPSKTYLSKTLAQYTSKTCSNCGFTITSADYDRVLEKLKKTATGWMTTINGKELKVEGQITYYNRYKRQNVVKDLSVELDRLSEESVNNDISSWTKGRQGEALSLLKKRFSHRPVQEKFVCLNCGFETHADEQAALNIARSWLFLRSQEYKKYQTNKTTGNTDKRAFVETWQSFYRKKLKEVWKPAV

SEQ ID NO: 47503 - protein, 977 aa, synthetic construct
  REGION 1..977: note = engineered CasX variant
QEIKRINKIRRRLVKDSNTKKAGKTGPMKTLLVRVMTPDLRERLENLRKKPENIPQPISNTSRANLNKLLTDYTEMKKAILHVYWEEFQKDPVGLMSRVAQPASKKIDQNKLKPEMDEKGNLTTAGFACSQCGQPLFVYKLEQVSEKGKAYTNYFGRCNVAEHEKLILLAQLKPEKDSDEAVTYSLGKFGQRALDFYSIHVTKESTHPVKPLAQIAGNRYASPVGKALSDACMGTIASFLSKYQDIIIEHQKVVKGNQKRLESLRELAGKENLEYPSVTLPPQPHTKEGVDAYNEVIARVRMWVNLNLWQKLKLSRDDAKPLLRLKGFPSFPLVERQANEVDWWDMVCNVKKLINEKKEDGKVFWQNLAGYKRQEALRPYLSSEEDRKKGKKFARYQLGDLLLHLEKKHGEDWGKVYGEAWERIDKKVEGLSKHIKLEEERRSEDAQSKAALTDWLRAKASFVIEGLKEADKDEFCRCELKLQKWYGDLRGKPFAIEAENSILDISGFSKQYNCAFIWQKDGVKKLNLYLIINYFKGGKLRFKKIKPEAFEANRFYTVINKKSGEIVPMEVNFNFDDPNLIILPLAFGKRQGREFIWNDLLSLETGSLKLANGRVIEKTLYNRRTRQDEPALFVALTFERREVLDSSNIKPMNLIGVDRGENIPAVIALTDPEGCPLSRFKDSLGNPTHILRIGESYKEKQRTIQAKKEVEQRRAGGYSRKYASKAKNLADDMVRNTARDLLYYAVTQDAMLIFENLSRGFGRQGKRTFMAERQYTRMEDWLTAKLAYEGLPSKTYLSKTLAQYTSKTCSNCGFTITSADYDRVLEKLKKTATGWMTTINGKELKVEGQITYYNRYKRQNVVKDLSVELDRLSEESVNNDISSWTKGRQGEALSLLKKRFSHRPVQEKFVCLNCGFETHADEQAALNIARSWLFLRSQEYKKYQTNKTTGNTDKRAFVETWQSFYRKKLKEVWKPAV

SEQ ID NO: 47504 - protein, 978 aa, synthetic construct
  REGION 1..978: note = engineered CasX variant
QEIKRINKIRRRLVKDSNTKKAGKTGPMKTLLVRVMTPDLRERLENLRKKPENIPQPISNTSRANLNKLLTDYTEMKKAILHVYWEEFQKDPVGLMSRVAQPASKKIDQNKLKPEMDEKGNLTTAGFACSQCGQPLFVYKLEQVSEKGKAYTNYFGRCNVAEHEKLILLAQLKPEKDSDEAVTYSLGKFGQRALDFYSIHVTKESTHPVKPLAQIAGNRYASYPVGKALSDACMGTIASFLSKYQDIIIEHQKVVKGNQKRLESLRELAGKENLEYPSVTLPPQPHTKEGVDAYNEVIARVRMWVNLNLWQKLKLSRDDAKPLLRLKGFPSFPLVERQANEVDWWDMVCNVKKLINEKKEDGKVFWQNLAGYKRQEALRPYLSSEEDRKKGKKFARYQLGDLLLHLEKKHGEDWGKVYDEAWERIDKKVEGLSKHIKLEEERRSEDAQSKAALTDWLRAKASFVIEGKKEADKDEFCRCELKLQKWYGDLRGKPFAIEAENSILDISGFSKQYNCAFIWQKDGVKKLNLYLIINYFKGGKLRFKKIKPEAFEANRFYTVINKKSGEIVPMEVNFNFDDPNLIILPLAFGKRQGREFIWNDLLSLETGSLKLANGRVIEKTLYNRRTRQDEPALFVALTFERREVLDSSNIKPMNLIGVDRGENIPAVIALTDPEGCPLSRFKDSLGNPTHILRIGESYKEKQRTIQAKKEVEQRRAGGYSRKYASKAKNLADDMVRNTARDLLYYAVTQDAMLIFENLSRGFGRQGKRTFMAERQYTRMEDWLTAKLAYEGLPSKTYLSKTLAQYTSKTCSNCGFTITSADYDRVLEKLKKTATGWMTTINGKELKVEGQITYYNRYKRQNVVKDLSVELDRLSEESVNNDISSWTKGRQGEALSLLKKRFSHRPVQEKFVCLNCGFETHADEQAALNIARSWLFLRSQEYKKYQTNKTTGNTDKRAFVETWQSFYRKKLKEVWKPAV

SEQ ID NO: 47505 - protein, 978 aa, synthetic construct
  REGION 1..978: note = engineered CasX variant
QEIKRINKIRRRLVKDSNTKKAGKTGPMKTLLVRVMTPDLRERLENLRKKPENIPQPISNTSRANLNKLLTDYTEMKKAILHVYWEEFQKDPVGLMSRVAQPASKKIDQNKLKPEMDEKGNLTTAGFACSQCGQPLFVYKLEQVSEKGKAYTNYFGRCNVAEHEKLILLAQLKPEKDSDEAVTYSLGKFGQRALDFYSIHVTKESTHPVKPLAQIAGNRYASHPVGKALSDACMGTIASFLSKYQDIIIEHQKVVKGNQKRLESLRELAGKENLEYPSVTLPPQPHTKEGVDAYNEVIARVRMWVNLNLWQKLKLSRDDAKPLLRLKGFPSFPLVERQANEVDWWDMVCNVKKLINEKKEDGKVFWQNLAGYKRQEALRPYLSSEEDRKKGKKFARYQLGDLLLHLEKKHGEDWGKVYDEAWERIDKKVEGLSKHIKLEEERRSEDAQSKAALTDWLRAKASFVIEGKKEADKDEFCRCELKLQKWYGDLRGKPFAIEAENSILDISGFSKQYNCAFIWQKDGVKKLNLYLIINYFKGGKLRFKKIKPEAFEANRFYTVINKKSGEIVPMEVNFNFDDPNLIILPLAFGKRQGREFIWNDLLSLETGSLKLANGRVIEKTLYNRRTRQDEPALFVALTFERREVLDSSNIKPMNLIGVDRGENIPAVIALTDPEGCPLSRFKDSLGNPTHILRIGESYKEKQRTIQAKKEVEQRRAGGYSRKYASKAKNLADDMVRNTARDLLYYAVTQDAMLIFENLSRGFGRQGKRTFMAERQYTRMEDWLTAKLAYEGLPSKTYLSKTLAQYTSKTCSNCGFTITSADYDRVLEKLKKTATGWMTTINGKELKVEGQITYYNRYKRQNVVKDLSVELDRLSEESVNNDISSWTKGRQGEALSLLKKRFSHRPVQEKFVCLNCGFETHADEQAALNIARSWLFLRSQEYKKYQTNKTTGNTDKRAFVETWQSFYRKKLKEVWKPAV

SEQ ID NO: 47506 - protein, 978 aa, synthetic construct
  REGION 1..978: note = engineered CasX variant
QEIKRINKIRRRLVKDSNTKKAGKTGPMKTLLVRVMTPDLRERLENLRKKPENIPQPISNTSRANLNKLLTDYTEMKKAILHVYWEEFQKDPVGLMSRVAQPASKKIDQNKLKPEMDEKGNLTTAGFACSQCGQPLFVYKLEQVSEKGKAYTNYFGRCNVAEHEKLILLAQLKPEKDSDEAVTYSLGKFGQRALDFYSIHVTKESTHPVKPLAQIAGNRYASSPVGKALSDACMGTIASFLSKYQDIIIEHQKVVKGNQKRLESLRELAGKENLEYPSVTLPPQPHTKEGVDAYNEVIARVRMWVNLNLWQKLKLSRDDAKPLLRLKGFPSFPLVERQANEVDWWDMVCNVKKLINEKKEDGKVFWQNLAGYKRQEALRPYLSSEEDRKKGKKFARYQLGDLLLHLEKKHGEDWGKVYDEAWERIDKKVEGLSKHIKLEEERRSEDAQSKAALTDWLRAKASFVIEGKKEADKDEFCRCELKLQKWYGDLRGKPFAIEAENSILDISGFSKQYNCAFIWQKDGVKKLNLYLIINYFKGGKLRFKKIKPEAFEANRFYTVINKKSGEIVPMEVNFNFDDPNLIILPLAFGKRQGREFIWNDLLSLETGSLKLANGRVIEKTLYNRRTRQDEPALFVALTFERREVLDSSNIKPMNLIGVDRGENIPAVIALTDPEGCPLSRFKDSLGNPTHILRIGESYKEKQRTIQAKKEVEQRRAGGYSRKYASKAKNLADDMVRNTARDLLYYAVTQDAMLIFENLSRGFGRQGKRTFMAERQYTRMEDWLTAKLAYEGLPSKTYLSKTLAQYTSKTCSNCGFTITSADYDRVLEKLKKTATGWMTTINGKELKVEGQITYYNRYKRQNVVKDLSVELDRLSEESVNNDISSWTKGRQGEALSLLKKRFSHRPVQEKFVCLNCGFETHADEQAALNIARSWLFLRSQEYKKYQTNKTTGNTDKRAFVETWQSFYRKKLKEVWKPAV

SEQ ID NO: 47507 - protein, 978 aa, synthetic construct
  REGION 1..978: note = engineered CasX variant
QEIKRINKIRRRLVKDSNTKKAGKTGPMKTLLVRVMTPDLRERLENLRKKPENIPQPISNTSRANLNKLLTDYTEMKKAILHVYWEEFQKDPVGLMSRVAQPASKKIDQNKLKPEMDEKGNLTTAGFACSQCGQPLFVYKLEQVSEKGKAYTNYFGRCNVAEHEKLILLAQLKPEKDSDEAVTYSLGKFGQRALDFYSIHVTKESTHPVKPLAQIAGNRYASTPVGKALSDACMGTIASFLSKYQDIIIEHQKVVKGNQKRLESLRELAGKENLEYPSVTLPPQPHTKEGVDAYNEVIARVRMWVNLNLWQKLKLSRDDAKPLLRLKGFPSFPLVERQANEVDWWDMVCNVKKLINEKKEDGKVFWQNLAGYKRQEALRPYLSSEEDRKKGKKFARYQLGDLLLHLEKKHGEDWGKVYDEAWERIDKKVEGLSKHIKLEEERRSEDAQSKAALTDWLRAKASFVIEGKKEADKDEFCRCELKLQKWYGDLRGKPFAIEAENSILDISGFSKQYNCAFIWQKDGVKKLNLYLIINYFKGGKLRFKKIKPEAFEANRFYTVINKKSGEIVPMEVNFNFDDPNLIILPLAFGKRQGREFIWNDLLSLETGSLKLANGRVIEKTLYNRRTRQDEPALFVALTFERREVLDSSNIKPMNLIGVDRGENIPAVIALTDPEGCPLSRFKDSLGNPTHILRIGESYKEKQRTIQAKKEVEQRRAGGYSRKYASKAKNLADDMVRNTARDLLYYAVTQDAMLIFENLSRGFGRQGKRTFMAERQYTRMEDWLTAKLAYEGLPSKTYLSKTLAQYTSKTCSNCGFTITSADYDRVLEKLKKTATGWMTTINGKELKVEGQITYYNRYKRQNVVKDLSVELDRLSEESVNNDISSWTKGRQGEALSLLKKRFSHRPVQEKFVCLNCGFETHADEQAALNIARSWLFLRSQEYKKYQTNKTTGNTDKRAFVETWQSFYRKKLKEVWKPAV

SEQ ID NO: 47508 - protein, 978 aa, synthetic construct
  REGION 1..978: note = engineered CasX variant
QEIKRINKIRRRLVKDSNTKKAGKTGPMKTLLVRVMTPDLRERLENLRKKPENIPQPISNTSRANLNKLLTDYTEMKKAILHVYWEEFQKDPVGLMSRVAQPASKKIDQNKLKPEMDEKGNLTTAGFACSQCGQPLFVYKLEQVSEKGKAYTNYFGRCNVAEHEKLILLAQLKPEKDSDEAVTYSLGKFGQRALDFYSIHVTKESTHPVKPLAQIAGNRYASAPVGKALSDACMGTIASFLSKYQDIIIEHQKVVKGNQKRLESLRELAGKENLEYPSVTLPPQPHTKEGVDAYNEVIARVRMWVNLNLWQKLKLSRDDAKPLLRLKGFPSFPLVERQANEVDWWDMVCNVKKLINEKKEDGKVFWQNLAGYKRQEALRPYLSSEEDRKKGKKFARYQLGDLLLHLEKKHGEDWGKVYDEAWERIDKKVEGLSKHIKLEEERRSEDAQSKAALTDWLRAKASFVIEGKKEADKDEFCRCELKLQKWYGDLRGKPFAIEAENSILDISGFSKQYNCAFIWQKDGVKKLNLYLIINYFKGGKLRFKKIKPEAFEANRFYTVINKKSGEIVPMEVNFNFDDPNLIILPLAFGKRQGREFIWNDLLSLETGSLKLANGRVIEKTLYNRRTRQDEPALFVALTFERREVLDSSNIKPMNLIGVDRGENIPAVIALTDPEGCPLSRFKDSLGNPTHILRIGESYKEKQRTIQAKKEVEQRRAGGYSRKYASKAKNLADDMVRNTARDLLYYAVTQDAMLIFENLSRGFGRQGKRTFMAERQYTRMEDWLTAKLAYEGLPSKTYLSKTLAQYTSKTCSNCGFTITSADYDRVLEKLKKTATGWMTTINGKELKVEGQITYYNRYKRQNVVKDLSVELDRLSEESVNNDISSWTKGRQGEALSLLKKRFSHRPVQEKFVCLNCGFETHADEQAALNIARSWLFLRSQEYKKYQTNKTTGNTDKRAFVETWQSFYRKKLKEVWKPAV

SEQ ID NO: 47509 - protein, 978 aa, synthetic construct
  REGION 1..978: note = engineered CasX variant
QEIKRINKIRRRLVKDSNTKKAGKTGPMKTLLVRVMTPDLRERLENLRKKPENIPQPISNTSRANLNKLLTDYTEMKKAILHVYWEEFQKDPVGLMSRVAQPASKKIDQNKLKPEMDEKGNLTTAGFACSQCGQPLFVYKLEQVSEKGKAYTNYFGRCNVAEHEKLILLAQLKPEKDSDEAVTYSLGKFGQRALDFYSIHVTKESTHPVKPLAQIAGNRYASVPVGKALSDACMGTIASFLSKYQDIIIEHQKVVKGNQKRLESLRELAGKENLEYPSVTLPPQPHTKEGVDAYNEVIARVRMWVNLNLWQKLKLSRDDAKPLLRLKGFPSFPLVERQANEVDWWDMVCNVKKLINEKKEDGKVFWQNLAGYKRQEALRPYLSSEEDRKKGKKFARYQLGDLLLHLEKKHGEDWGKVYDEAWERIDKKVEGLSKHIKLEEERRSEDAQSKAALTDWLRAKASFVIEGKKEADKDEFCRCELKLQKWYGDLRGKPFAIEAENSILDISGFSKQYNCAFIWQKDGVKKLNLYLIINYFKGGKLRFKKIKPEAFEANRFYTVINKKSGEIVPMEVNFNFDDPNLIILPLAFGKRQGREFIWNDLLSLETGSLKLANGRVIEKTLYNRRTRQDEPALFVALTFERREVLDSSNIKPMNLIGVDRGENIPAVIALTDPEGCPLSRFKDSLGNPTHILRIGESYKEKQRTIQAKKEVEQRRAGGYSRKYASKAKNLADDMVRNTARDLLYYAVTQDAMLIFENLSRGFGRQGKRTFMAERQYTRMEDWLTAKLAYEGLPSKTYLSKTLAQYTSKTCSNCGFTITSADYDRVLEKLKKTATGWMTTINGKELKVEGQITYYNRYKRQNVVKDLSVELDRLSEESVNNDISSWTKGRQGEALSLLKKRFSHRPVQEKFVCLNCGFETHADEQAALNIARSWLFLRSQEYKKYQTNKTTGNTDKRAFVETWQSFYRKKLKEVWKPAV

SEQ ID NO: 47510 - protein, 978 aa, synthetic construct
  REGION 1..978: note = engineered CasX variant
QEIKRINKIRRRLVKDSNTKKAGKTGPMKTLLVRVMTPDLRERLENLRKKPENIPQPISNTSRANLNKLLTDYTEMKKAILHVYWEEFQKDPVGLMSRVAQPASKKIDQNKLKPEMDEKGNLTTAGFACSQCGQPLFVYKLEQVSEKGKAYTNYFGRCNVAEHEKLIKLAQLKPEKDSDEAVTYSLGKFGQRALDFYSIHVTKESTHPVKPLAQIAGNRYASGPVGKALSDACMGTIASFLSKYQDIIIEHQKVVKGNQKRLESLRELAGKENLEYPSVTLPPQPHTKEGVDAYNEVIARVRMWVNLNLWQKLKLSRDDAKPLLRLKGFPSFPLVERQANEVDWWDMVCNVKKLINEKKEDGKVFWQNLAGYKRQEALRPYLSSEEDRKKGKKFARYQLGDLLLHLEKKHGEDWGKVYDEAWERIDKKVEGLSKHIKLEEERRSEDAQSKAALTDWLRAKASFVIEGKKEADKDEFCRCELKLQKWYGDLRGKPFAIEAENSILDISGFSKQYNCAFIWQKDGVKKLNLYLIINYFKGGKLRFKKIKPEAFEANRFYTVINKKSGEIVPMEVNFNFDDPNLIILPLAFGKRQGREFIWNDLLSLETGSLKLANGRVIEKTLYNRRTRQDEPALFVALTFERREVLDSSNIKPMNLIGVDRGENIPAVIALTDPEGCPLSRFKDSLGNPTHILRIGESYKEKQRTIQAKKEVEQRRAGGYSRKYASKAKNLADDMVRNTARDLLYYAVTQDAMLIFENLSRGFGRQGKRTFMAERQYTRMEDWLTAKLAYEGLPSKTYLSKTLAQYTSKTCSNCGFTITSADYDRVLEKLKKTATGWMTTINGKELKVEGQITYYNRYKRQNVVKDLSVELDRLSEESVNNDISSWTKGRQGEALSLLKKRFSHRPVQEKFVCLNCGFETHADEQAALNIARSWLFLRSQEYKKYQTNKTTGNTDKRAFVETWQSFYRKKLKEVWKPAV

SEQ ID NO: 47511 - protein, 977 aa, synthetic construct
  REGION 1..977: note = engineered CasX variant
QEIKRINKIRRRLVKDSNTKKAGKTGPMKTLLVRVMTPDLRERLENLRKKPENIPQPISNTSRANLNKLLTDYTEMKKAILHVYWEEFQKDPVGLMSRVAQPASKKIDQNKLKPEMDEKGNLTTAGFACSQCGQPLFVYKLEQVSEKGKAYTNYFGRCNVAEHEKLILLAQLKPEKDSDEAVTYSLGKFGQRALDFYSIHVTKESTHPVKPLAQIAGNRYASPVGKALSDACMGTIASFLSKYQDIIIEHQKVVKGNQKRLESLRELAGKENLEYPSVTLPPQPHTKEGVDAYNEVIARVRMWVNLNLWQKLKLSRDDAKPLLRLKGFPSFPLVERQANEVDWWDMVCNVKKLINEKKEDGKVFWQNLAGYKRQEALRPYLSSEEDRKKGKKFARYQLGDLLLHLEKKHGEDWGKVYDEAWERIDKKVEGLSKHIKLEEERRSEDAQSKAALTDWLRAKASFVIEGKKEADKDEFCRCELKLQKWYGDLRGKPFAIEAENSILDISGFSKQYNCAFIWQKDGVKKLNLYLIINYFKGGKLRFKKIKPEAFEANRFYTVINKKSGEIVPMEVNFNFDDPNLIILPLAFGKRQGREFIWNDLLSLETGSLKLANGRVIEKTLYNRRTRQDEPALFVALTFERREVLDSSNIKPMNLIGVDRGENIPAVIALTDPEGCPLSRFKDSLGNPTHILRIGESYKEKQRTIQAKKEVEQRRAGGYSRKYASKAKNLADDMVRNTARDLLYYAVTQDAMLIFENLSRGFGRQGKRTFMAERQYTRMEDWLTAKLAYEGLPSKTYLSKTLAQYTSKTCSNCGFTITSADYDRVLEKLKKTATGWMTTINGKELKVEGQITYYNRYKRQNVVKDLSVELDRLSEESVNNDISSWTKGRQGEALSLLKKRFSHRPVQEKFVCLNCGFETHADEQAALNIARSWLFLRSQEYKKYQTNKTTGNTDKRAFVETWQSFYRKKLKEVWKPAV

SEQ ID NO: 47512 - protein, 978 aa, synthetic construct
  REGION 1..978: note = engineered CasX variant
QEIKRINKIRRRLVKDSNTKKAGKTGPMKTLLVRVMTPDLRERLENLRKKPENIPQPISNTSRANLNKLLTDYTEMKKAILHVYWEEFQKDPVGLMSRVAQPASKKIDQNKLKPEMDEKGNLTTAGFACSQCGQPLFVYKLEQVSEKGKAYTNYFGRCNVAEHEKLILLAQLKPEKDSDEAVTYSLGKFGQRALDFYSIHVTKESTHPVKPLAQIAGNRYASYPVGKALSDACMGTIASFLSKYQDIIIEHQKVVKGNQKRLESLRELAGKENLEYPSVTLPPQPHTKEGVDAYNEVIARVRMWVNLNLWQKLKLSRDDAKPLLRLKGFPSFPLVERQANEVDWWDMVCNVKKLINEKKEDGKVFWQNLAGYKRQEALRPYLSSEEDRKKGKKFARYQLGDLLLHLEKKHGEDWGKVYDEAWERIDKKVEGLSKHIKLEEERRSEDAQSKAALTDWLRAKASFVIEGSKEADKDEFCRCELKLQKWYGDLRGKPFAIEAENSILDISGFSKQYNCAFIWQKDGVKKLNLYLIINYFKGGKLRFKKIKPEAFEANRFYTVINKKSGEIVPMEVNFNFDDPNLIILPLAFGKRQGREFIWNDLLSLETGSLKLANGRVIEKTLYNRRTRQDEPALFVALTFERREVLDSSNIKPMNLIGVDRGENIPAVIALTDPEGCPLSRFKDSLGNPTHILRIGESYKEKQRTIQAKKEVEQRRAGGYSRKYASKAKNLADDMVRNTARDLLYYAVTQDAMLIFENLSRGFGRQGKRTFMAERQYTRMEDWLTAKLAYEGLPSKTYLSKTLAQYTSKTCSNCGFTITSADYDRVLEKLKKTATGWMTTINGKELKVEGQITYYNRYKRQNVVKDLSVELDRLSEESVNNDISSWTKGRQGEALSLLKKRFSHRPVQEKFVCLNCGFETHADEQAALNIARSWLFLRSQEYKKYQTNKTTGNTDKRAFVETWQSFYRKKLKEVWKPAV

SEQ ID NO: 47513 - protein, 978 aa, synthetic construct
  REGION 1..978: note = engineered CasX variant
QEIKRINKIRRRLVKDSNTKKAGKTGPMKTLLVRVMTPDLRERLENLRKKPENIPQPISNTSRANLNKLLTDYTEMKKAILHVYWEEFQKDPVGLMSRVAQPASKKIDQNKLKPEMDEKGNLTTAGFACSQCGQPLFVYKLEQVSEKGKAYTNYFGRCNVAEHEKLILLAQLKPEKDSDEAVTYSLGKFGQRALDFYSIHVTKESTHPVKPLAQIAGNRYASHPVGKALSDACMGTIASFLSKYQDIIIEHQKVVKGNQKRLESLRELAGKENLEYPSVTLPPQPHTKEGVDAYNEVIARVRMWVNLNLWQKLKLSRDDAKPLLRLKGFPSFPLVERQANEVDWWDMVCNVKKLINEKKEDGKVFWQNLAGYKRQEALRPYLSSEEDRKKGKKFARYQLGDLLLHLEKKHGEDWGKVYDEAWERIDKKVEGLSKHIKLEEERRSEDAQSKAALTDWLRAKASFVIEGSKEADKDEFCRCELKLQKWYGDLRGKPFAIEAENSILDISGFSKQYNCAFIWQKDGVKKLNLYLIINYFKGGKLRFKKIKPEAFEANRFYTVINKKSGEIVPMEVNFNFDDPNLIILPLAFGKRQGREFIWNDLLSLETGSLKLANGRVIEKTLYNRRTRQDEPALFVALTFERREVLDSSNIKPMNLIGVDRGENIPAVIALTDPEGCPLSRFKDSLGNPTHILRIGESYKEKQRTIQAKKEVEQRRAGGYSRKYASKAKNLADDMVRNTARDLLYYAVTQDAMLIFENLSRGFGRQGKRTFMAERQYTRMEDWLTAKLAYEGLPSKTYLSKTLAQYTSKTCSNCGFTITSADYDRVLEKLKKTATGWMTTINGKELKVEGQITYYNRYKRQNVVKDLSVELDRLSEESVNNDISSWTKGRQGEALSLLKKRFSHRPVQEKFVCLNCGFETHADEQAALNIARSWLFLRSQEYKKYQTNKTTGNTDKRAFVETWQSFYRKKLKEVWKPAV

SEQ ID NO: 47514 - protein, 978 aa, synthetic construct
  REGION 1..978: note = engineered CasX variant
QEIKRINKIRRRLVKDSNTKKAGKTGPMKTLLVRVMTPDLRERLENLRKKPENIPQPISNTSRANLNKLLTDYTEMKKAILHVYWEEFQKDPVGLMSRVAQPASKKIDQNKLKPEMDEKGNLTTAGFACSQCGQPLFVYKLEQVSEKGKAYTNYFGRCNVAEHEKLILLAQLKPEKDSDEAVTYSLGKFGQRALDFYSIHVTKESTHPVKPLAQIAGNRYASSPVGKALSDACMGTIASFLSKYQDIIIEHQKVVKGNQKRLESLRELAGKENLEYPSVTLPPQPHTKEGVDAYNEVIARVRMWVNLNLWQKLKLSRDDAKPLLRLKGFPSFPLVERQANEVDWWDMVCNVKKLINEKKEDGKVFWQNLAGYKRQEALRPYLSSEEDRKKGKKFARYQLGDLLLHLEKKHGEDWGKVYDEAWERIDKKVEGLSKHIKLEEERRSEDAQSKAALTDWLRAKASFVIEGSKEADKDEFCRCELKLQKWYGDLRGKPFAIEAENSILDISGFSKQYNCAFIWQKDGVKKLNLYLIINYFKGGKLRFKKIKPEAFEANRFYTVINKKSGEIVPMEVNFNFDDPNLIILPLAFGKRQGREFIWNDLLSLETGSLKLANGRVIEKTLYNRRTRQDEPALFVALTFERREVLDSSNIKPMNLIGVDRGENIPAVIALTDPEGCPLSRFKDSLGNPTHILRIGESYKEKQRTIQAKKEVEQRRAGGYSRKYASKAKNLADDMVRNTARDLLYYAVTQDAMLIFENLSRGFGRQGKRTFMAERQYTRMEDWLTAKLAYEGLPSKTYLSKTLAQYTSKTCSNCGFTITSADYDRVLEKLKKTATGWMTTINGKELKVEGQITYYNRYKRQNVVKDLSVELDRLSEESVNNDISSWTKGRQGEALSLLKKRFSHRPVQEKFVCLNCGFETHADEQAALNIARSWLFLRSQEYKKYQTNKTTGNTDKRAFVETWQSFYRKKLKEVWKPAV

SEQ ID NO: 47515 - protein, 978 aa, synthetic construct
  REGION 1..978: note = engineered CasX variant
QEIKRINKIRRRLVKDSNTKKAGKTGPMKTLLVRVMTPDLRERLENLRKKPENIPQPISNTSRANLNKLLTDYTEMKKAILHVYWEEFQKDPVGLMSRVAQPASKKIDQNKLKPEMDEKGNLTTAGFACSQCGQPLFVYKLEQVSEKGKAYTNYFGRCNVAEHEKLILLAQLKPEKDSDEAVTYSLGKFGQRALDFYSIHVTKESTHPVKPLAQIAGNRYASTPVGKALSDACMGTIASFLSKYQDIIIEHQKVVKGNQKRLESLRELAGKENLEYPSVTLPPQPHTKEGVDAYNEVIARVRMWVNLNLWQKLKLSRDDAKPLLRLKGFPSFPLVERQANEVDWWDMVCNVKKLINEKKEDGKVFWQNLAGYKRQEALRPYLSSEEDRKKGKKFARYQLGDLLLHLEKKHGEDWGKVYDEAWERIDKKVEGLSKHIKLEEERRSEDAQSKAALTDWLRAKASFVIEGSKEADKDEFCRCELKLQKWYGDLRGKPFAIEAENSILDISGFSKQYNCAFIWQKDGVKKLNLYLIINYFKGGKLRFKKIKPEAFEANRFYTVINKKSGEIVPMEVNFNFDDPNLIILPLAFGKRQGREFIWNDLLSLETGSLKLANGRVIEKTLYNRRTRQDEPALFVALTFERREVLDSSNIKPMNLIGVDRGENIPAVIALTDPEGCPLSRFKDSLGNPTHILRIGESYKEKQRTIQAKKEVEQRRAGGYSRKYASKAKNLADDMVRNTARDLLYYAVTQDAMLIFENLSRGFGRQGKRTFMAERQYTRMEDWLTAKLAYEGLPSKTYLSKTLAQYTSKTCSNCGFTITSADYDRVLEKLKKTATGWMTTINGKELKVEGQITYYNRYKRQNVVKDLSVELDRLSEESVNNDISSWTKGRQGEALSLLKKRFSHRPVQEKFVCLNCGFETHADEQAALNIARSWLFLRSQEYKKYQTNKTTGNTDKRAFVETWQSFYRKKLKEVWKPAV

SEQ ID NO: 47516 - protein, 978 aa, synthetic construct
  REGION 1..978: note = engineered CasX variant
QEIKRINKIRRRLVKDSNTKKAGKTGPMKTLLVRVMTPDLRERLENLRKKPENIPQPISNTSRANLNKLLTDYTEMKKAILHVYWEEFQKDPVGLMSRVAQPASKKIDQNKLKPEMDEKGNLTTAGFACSQCGQPLFVYKLEQVSEKGKAYTNYFGRCNVAEHEKLILLAQLKPEKDSDEAVTYSLGKFGQRALDFYSIHVTKESTHPVKPLAQIAGNRYASAPVGKALSDACMGTIASFLSKYQDIIIEHQKVVKGNQKRLESLRELAGKENLEYPSVTLPPQPHTKEGVDAYNEVIARVRMWVNLNLWQKLKLSRDDAKPLLRLKGFPSFPLVERQANEVDWWDMVCNVKKLINEKKEDGKVFWQNLAGYKRQEALRPYLSSEEDRKKGKKFARYQLGDLLLHLEKKHGEDWGKVYDEAWERIDKKVEGLSKHIKLEEERRSEDAQSKAALTDWLRAKASFVIEGSKEADKDEFCRCELKLQKWYGDLRGKPFAIEAENSILDISGFSKQYNCAFIWQKDGVKKLNLYLIINYFKGGKLRFKKIKPEAFEANRFYTVINKKSGEIVPMEVNFNFDDPNLIILPLAFGKRQGREFIWNDLLSLETGSLKLANGRVIEKTLYNRRTRQDEPALFVALTFERREVLDSSNIKPMNLIGVDRGENIPAVIALTDPEGCPLSRFKDSLGNPTHILRIGESYKEKQRTIQAKKEVEQRRAGGYSRKYASKAKNLADDMVRNTARDLLYYAVTQDAMLIFENLSRGFGRQGKRTFMAERQYTRMEDWLTAKLAYEGLPSKTYLSKTLAQYTSKTCSNCGFTITSADYDRVLEKLKKTATGWMTTINGKELKVEGQITYYNRYKRQNVVKDLSVELDRLSEESVNNDISSWTKGRQGEALSLLKKRFSHRPVQEKFVCLNCGFETHADEQAALNIARSWLFLRSQEYKKYQTNKTTGNTDKRAFVETWQSFYRKKLKEVWKPAV

SEQ ID NO: 47517 - protein, 978 aa, synthetic construct
  REGION 1..978: note = engineered CasX variant
QEIKRINKIRRRLVKDSNTKKAGKTGPMKTLLVRVMTPDLRERLENLRKKPENIPQPISNTSRANLNKLLTDYTEMKKAILHVYWEEFQKDPVGLMSRVAQPASKKIDQNKLKPEMDEKGNLTTAGFACSQCGQPLFVYKLEQVSEKGKAYTNYFGRCNVAEHEKLILLAQLKPEKDSDEAVTYSLGKFGQRALDFYSIHVTKESTHPVKPLAQIAGNRYASVPVGKALSDACMGTIASFLSKYQDIIIEHQKVVKGNQKRLESLRELAGKENLEYPSVTLPPQPHTKEGVDAYNEVIARVRMWVNLNLWQKLKLSRDDAKPLLRLKGFPSFPLVERQANEVDWWDMVCNVKKLINEKKEDGKVFWQNLAGYKRQEALRPYLSSEEDRKKGKKFARYQLGDLLLHLEKKHGEDWGKVYDEAWERIDKKVEGLSKHIKLEEERRSEDAQSKAALTDWLRAKASFVIEGSKEADKDEFCRCELKLQKWYGDLRGKPFAIEAENSILDISGFSKQYNCAFIWQKDGVKKLNLYLIINYFKGGKLRFKKIKPEAFEANRFYTVINKKSGEIVPMEVNFNFDDPNLIILPLAFGKRQGREFIWNDLLSLETGSLKLANGRVIEKTLYNRRTRQDEPALFVALTFERREVLDSSNIKPMNLIGVDRGENIPAVIALTDPEGCPLSRFKDSLGNPTHILRIGESYKEKQRTIQAKKEVEQRRAGGYSRKYASKAKNLADDMVRNTARDLLYYAVTQDAMLIFENLSRGFGRQGKRTFMAERQYTRMEDWLTAKLAYEGLPSKTYLSKTLAQYTSKTCSNCGFTITSADYDRVLEKLKKTATGWMTTINGKELKVEGQITYYNRYKRQNVVKDLSVELDRLSEESVNNDISSWTKGRQGEALSLLKKRFSHRPVQEKFVCLNCGFETHADEQAALNIARSWLFLRSQEYKKYQTNKTTGNTDKRAFVETWQSFYRKKLKEVWKPAV

SEQ ID NO: 47518 - protein, 978 aa, synthetic construct
  REGION 1..978: note = engineered CasX variant
QEIKRINKIRRRLVKDSNTKKAGKTGPMKTLLVRVMTPDLRERLENLRKKPENIPQPISNTSRANLNKLLTDYTEMKKAILHVYWEEFQKDPVGLMSRVAQPASKKIDQNKLKPEMDEKGNLTTAGFACSQCGQPLFVYKLEQVSEKGKAYTNYFGRCNVAEHEKLIKLAQLKPEKDSDEAVTYSLGKFGQRALDFYSIHVTKESTHPVKPLAQIAGNRYASGPVGKALSDACMGTIASFLSKYQDIIIEHQKVVKGNQKRLESLRELAGKENLEYPSVTLPPQPHTKEGVDAYNEVIARVRMWVNLNLWQKLKLSRDDAKPLLRLKGFPSFPLVERQANEVDWWDMVCNVKKLINEKKEDGKVFWQNLAGYKRQEALRPYLSSEEDRKKGKKFARYQLGDLLLHLEKKHGEDWGKVYDEAWERIDKKVEGLSKHIKLEEERRSEDAQSKAALTDWLRAKASFVIEGSKEADKDEFCRCELKLQKWYGDLRGKPFAIEAENSILDISGFSKQYNCAFIWQKDGVKKLNLYLIINYFKGGKLRFKKIKPEAFEANRFYTVINKKSGEIVPMEVNFNFDDPNLIILPLAFGKRQGREFIWNDLLSLETGSLKLANGRVIEKTLYNRRTRQDEPALFVALTFERREVLDSSNIKPMNLIGVDRGENIPAVIALTDPEGCPLSRFKDSLGNPTHILRIGESYKEKQRTIQAKKEVEQRRAGGYSRKYASKAKNLADDMVRNTARDLLYYAVTQDAMLIFENLSRGFGRQGKRTFMAERQYTRMEDWLTAKLAYEGLPSKTYLSKTLAQYTSKTCSNCGFTITSADYDRVLEKLKKTATGWMTTINGKELKVEGQITYYNRYKRQNVVKDLSVELDRLSEESVNNDISSWTKGRQGEALSLLKKRFSHRPVQEKFVCLNCGFETHADEQAALNIARSWLFLRSQEYKKYQTNKTTGNTDKRAFVETWQSFYRKKLKEVWKPAV

SEQ ID NO: 47519 - protein, 977 aa, synthetic construct
  REGION 1..977: note = engineered CasX variant
QEIKRINKIRRRLVKDSNTKKAGKTGPMKTLLVRVMTPDLRERLENLRKKPENIPQPISNTSRANLNKLLTDYTEMKKAILHVYWEEFQKDPVGLMSRVAQPASKKIDQNKLKPEMDEKGNLTTAGFACSQCGQPLFVYKLEQVSEKGKAYTNYFGRCNVAEHEKLILLAQLKPEKDSDEAVTYSLGKFGQRALDFYSIHVTKESTHPVKPLAQIAGNRYASPVGKALSDACMGTIASFLSKYQDIIIEHQKVVKGNQKRLESLRELAGKENLEYPSVTLPPQPHTKEGVDAYNEVIARVRMWVNLNLWQKLKLSRDDAKPLLRLKGFPSFPLVERQANEVDWWDMVCNVKKLINEKKEDGKVFWQNLAGYKRQEALRPYLSSEEDRKKGKKFARYQLGDLLLHLEKKHGEDWGKVYDEAWERIDKKVEGLSKHIKLEEERRSEDAQSKAALTDWLRAKASFVIEGSKEADKDEFCRCELKLQKWYGDLRGKPFAIEAENSILDISGFSKQYNCAFIWQKDGVKKLNLYLIINYFKGGKLRFKKIKPEAFEANRFYTVINKKSGEIVPMEVNFNFDDPNLIILPLAFGKRQGREFIWNDLLSLETGSLKLANGRVIEKTLYNRRTRQDEPALFVALTFERREVLDSSNIKPMNLIGVDRGENIPAVIALTDPEGCPLSRFKDSLGNPTHILRIGESYKEKQRTIQAKKEVEQRRAGGYSRKYASKAKNLADDMVRNTARDLLYYAVTQDAMLIFENLSRGFGRQGKRTFMAERQYTRMEDWLTAKLAYEGLPSKTYLSKTLAQYTSKTCSNCGFTITSADYDRVLEKLKKTATGWMTTINGKELKVEGQITYYNRYKRQNVVKDLSVELDRLSEESVNNDISSWTKGRQGEALSLLKKRFSHRPVQEKFVCLNCGFETHADEQAALNIARSWLFLRSQEYKKYQTNKTTGNTDKRAFVETWQSFYRKKLKEVWKPAV

SEQ ID NO: 47520 - protein, 979 aa, synthetic construct
  REGION 1..979: note = engineered CasX variant
QEIKRINKIRRRLVKDSNTKKAGKTGPMKTLLVRVMTPDLRERLENLRKKPENIPQPISNTSRANLNKLLTDYTEMKKAILHVYWEEFQKDPVGLMSRVAQPASKKIDQNKLKPEMDEKGNLTTAGFACSQCGQPLFVYKLEQVSEKGKAYTNYFGRCNVAEHEKLILLAQLKPEKDSDEAVTYSLGKFGQRALDFYSIHVTKESTHPVKPLAQIAGNRYASYPVGKALSDACMGTIASFLSKYQDIIIEHQKVVKGNQKRLESLRELAGKENLEYPSVTLPPQPHTKEGVDAYNEVIARVRMWVNLNLWQKLKLSRDDAKPLLRLKGFPSFPLVERQANEVDWWDMVCNVKKLINEKKEDGKVFWQNLAGYKRQEALRPYLSSEEDRKKGKKFARYQLGDLLLHLEKKHGEDWGKVYDEAWERIDKKVEGLSKHIKLEEERRSEDAQSKAALTDWLRAKASFVIEGLKEADDKDEFCRCELKLQKWYGDLRGKPFAIEAENSILDISGFSKQYNCAFIWQKDGVKKLNLYLIINYFKGGKLRFKKIKPEAFEANRFYTVINKKSGEIVPMEVNFNFDDPNLIILPLAFGKRQGREFIWNDLLSLETGSLKLANGRVIEKTLYNRRTRQDEPALFVALTFERREVLDSSNIKPMNLIGVDRGENIPAVIALTDPEGCPLSRFKDSLGNPTHILRIGESYKEKQRTIQAKKEVEQRRAGGYSRKYASKAKNLADDMVRNTARDLLYYAVTQDAMLIFENLSRGFGRQGKRTFMAERQYTRMEDWLTAKLAYEGLPSKTYLSKTLAQYTSKTCSNCGFTITSADYDRVLEKLKKTATGWMTTINGKELKVEGQITYYNRYKRQNVVKDLSVELDRLSEESVNNDISSWTKGRQGEALSLLKKRFSHRPVQEKFVCLNCGFETHADEQAALNIARSWLFLRSQEYKKYQTNKTTGNTDKRAFVETWQSFYRKKLKEVWKPAV

SEQ ID NO: 47521 - protein, 979 aa, synthetic construct
  REGION 1..979: note = engineered CasX variant
QEIKRINKIRRRLVKDSNTKKAGKTGPMKTLLVRVMTPDLRERLENLRKKPENIPQPISNTSRANLNKLLTDYTEMKKAILHVYWEEFQKDPVGLMSRVAQPASKKIDQNKLKPEMDEKGNLTTAGFACSQCGQPLFVYKLEQVSEKGKAYTNYFGRCNVAEHEKLILLAQLKPEKDSDEAVTYSLGKFGQRALDFYSIHVTKESTHPVKPLAQIAGNRYASHPVGKALSDACMGTIASFLSKYQDIIIEHQKVVKGNQKRLESLRELAGKENLEYPSVTLPPQPHTKEGVDAYNEVIARVRMWVNLNLWQKLKLSRDDAKPLLRLKGFPSFPLVERQANEVDWWDMVCNVKKLINEKKEDGKVFWQNLAGYKRQEALRPYLSSEEDRKKGKKFARYQLGDLLLHLEKKHGEDWGKVYDEAWERIDKKVEGLSKHIKLEEERRSEDAQSKAALTDWLRAKASFVIEGLKEADDKDEFCRCELKLQKWYGDLRGKPFAIEAENSILDISGFSKQYNCAFIWQKDGVKKLNLYLIINYFKGGKLRFKKIKPEAFEANRFYTVINKKSGEIVPMEVNFNFDDPNLIILPLAFGKRQGREFIWNDLLSLETGSLKLANGRVIEKTLYNRRTRQDEPALFVALTFERREVLDSSNIKPMNLIGVDRGENIPAVIALTDPEGCPLSRFKDSLGNPTHILRIGESYKEKQRTIQAKKEVEQRRAGGYSRKYASKAKNLADDMVRNTARDLLYYAVTQDAMLIFENLSRGFGRQGKRTFMAERQYTRMEDWLTAKLAYEGLPSKTYLSKTLAQYTSKTCSNCGFTITSADYDRVLEKLKKTATGWMTTINGKELKVEGQITYYNRYKRQNVVKDLSVELDRLSEESVNNDISSWTKGRQGEALSLLKKRFSHRPVQEKFVCLNCGFETHADEQAALNIARSWLFLRSQEYKKYQTNKTTGNTDKRAFVETWQSFYRKKLKEVWKPAV

SEQ ID NO: 47522 - protein, 979 aa, synthetic construct
  REGION 1..979: note = engineered CasX variant
QEIKRINKIRRRLVKDSNTKKAGKTGPMKTLLVRVMTPDLRERLENLRKKPENIPQPISNTSRANLNKLLTDYTEMKKAILHVYWEEFQKDPVGLMSRVAQPASKKIDQNKLKPEMDEKGNLTTAGFACSQCGQPLFVYKLEQVSEKGKAYTNYFGRCNVAEHEKLILLAQLKPEKDSDEAVTYSLGKFGQRALDFYSIHVTKESTHPVKPLAQIAGNRYASSPVGKALSDACMGTIASFLSKYQDIIIEHQKVVKGNQKRLESLRELAGKENLEYPSVTLPPQPHTKEGVDAYNEVIARVRMWVNLNLWQKLKLSRDDAKPLLRLKGFPSFPLVERQANEVDWWDMVCNVKKLINEKKEDGKVFWQNLAGYKRQEALRPYLSSEEDRKKGKKFARYQLGDLLLHLEKKHGEDWGKVYDEAWERIDKKVEGLSKHIKLEEERRSEDAQSKAALTDWLRAKASFVIEGLKEADDKDEFCRCELKLQKWYGDLRGKPFAIEAENSILDISGFSKQYNCAFIWQKDGVKKLNLYLIINYFKGGKLRFKKIKPEAFEANRFYTVINKKSGEIVPMEVNFNFDDPNLIILPLAFGKRQGREFIWNDLLSLETGSLKLANGRVIEKTLYNRRTRQDEPALFVALTFERREVLDSSNIKPMNLIGVDRGENIPAVIALTDPEGCPLSRFKDSLGNPTHILRIGESYKEKQRTIQAKKEVEQRRAGGYSRKYASKAKNLADDMVRNTARDLLYYAVTQDAMLIFENLSRGFGRQGKRTFMAERQYTRMEDWLTAKLAYEGLPSKTYLSKTLAQYTSKTCSNCGFTITSADYDRVLEKLKKTATGWMTTINGKELKVEGQITYYNRYKRQNVVKDLSVELDRLSEESVNNDISSWTKGRQGEALSLLKKRFSHRPVQEKFVCLNCGFETHADEQAALNIARSWLFLRSQEYKKYQTNKTTGNTDKRAFVETWQSFYRKKLKEVWKPAV

SEQ ID NO: 47523 - protein, 979 aa, synthetic construct
  REGION 1..979: note = engineered CasX variant
QEIKRINKIRRRLVKDSNTKKAGKTGPMKTLLVRVMTPDLRERLENLRKKPENIPQPISNTSRANLNKLLTDYTEMKKAILHVYWEEFQKDPVGLMSRVAQPASKKIDQNKLKPEMDEKGNLTTAGFACSQCGQPLFVYKLEQVSEKGKAYTNYFGRCNVAEHEKLILLAQLKPEKDSDEAVTYSLGKFGQRALDFYSIHVTKESTHPVKPLAQIAGNRYASTPVGKALSDACMGTIASFLSKYQDIIIEHQKVVKGNQKRLESLRELAGKENLEYPSVTLPPQPHTKEGVDAYNEVIARVRMWVNLNLWQKLKLSRDDAKPLLRLKGFPSFPLVERQANEVDWWDMVCNVKKLINEKKEDGKVFWQNLAGYKRQEALRPYLSSEEDRKKGKKFARYQLGDLLLHLEKKHGEDWGKVYDEAWERIDKKVEGLSKHIKLEEERRSEDAQSKAALTDWLRAKASFVIEGLKEADDKDEFCRCELKLQKWYGDLRGKPFAIEAENSILDISGFSKQYNCAFIWQKDGVKKLNLYLIINYFKGGKLRFKKIKPEAFEANRFYTVINKKSGEIVPMEVNFNFDDPNLIILPLAFGKRQGREFIWNDLLSLETGSLKLANGRVIEKTLYNRRTRQDEPALFVALTFERREVLDSSNIKPMNLIGVDRGENIPAVIALTDPEGCPLSRFKDSLGNPTHILRIGESYKEKQRTIQAKKEVEQRRAGGYSRKYASKAKNLADDMVRNTARDLLYYAVTQDAMLIFENLSRGFGRQGKRTFMAERQYTRMEDWLTAKLAYEGLPSKTYLSKTLAQYTSKTCSNCGFTITSADYDRVLEKLKKTATGWMTTINGKELKVEGQITYYNRYKRQNVVKDLSVELDRLSEESVNNDISSWTKGRQGEALSLLKKRFSHRPVQEKFVCLNCGFETHADEQAALNIARSWLFLRSQEYKKYQTNKTTGNTDKRAFVETWQSFYRKKLKEVWKPAV

SEQ ID NO: 47524 - protein, 979 aa, synthetic construct
  REGION 1..979: note = engineered CasX variant
QEIKRINKIRRRLVKDSNTKKAGKTGPMKTLLVRVMTPDLRERLENLRKKPENIPQPISNTSRANLNKLLTDYTEMKKAILHVYWEEFQKDPVGLMSRVAQPASKKIDQNKLKPEMDEKGNLTTAGFACSQCGQPLFVYKLEQVSEKGKAYTNYFGRCNVAEHEKLILLAQLKPEKDSDEAVTYSLGKFGQRALDFYSIHVTKESTHPVKPLAQIAGNRYASAPVGKALSDACMGTIASFLSKYQDIIIEHQKVVKGNQKRLESLRELAGKENLEYPSVTLPPQPHTKEGVDAYNEVIARVRMWVNLNLWQKLKLSRDDAKPLLRLKGFPSFPLVERQANEVDWWDMVCNVKKLINEKKEDGKVFWQNLAGYKRQEALRPYLSSEEDRKKGKKFARYQLGDLLLHLEKKHGEDWGKVYDEAWERIDKKVEGLSKHIKLEEERRSEDAQSKAALTDWLRAKASFVIEGLKEADDKDEFCRCELKLQKWYGDLRGKPFAIEAENSILDISGFSKQYNCAFIWQKDGVKKLNLYLIINYFKGGKLRFKKIKPEAFEANRFYTVINKKSGEIVPMEVNFNFDDPNLIILPLAFGKRQGREFIWNDLLSLETGSLKLANGRVIEKTLYNRRTRQDEPALFVALTFERREVLDSSNIKPMNLIGVDRGENIPAVIALTDPEGCPLSRFKDSLGNPTHILRIGESYKEKQRTIQAKKEVEQRRAGGYSRKYASKAKNLADDMVRNTARDLLYYAVTQDAMLIFENLSRGFGRQGKRTFMAERQYTRMEDWLTAKLAYEGLPSKTYLSKTLAQYTSKTCSNCGFTITSADYDRVLEKLKKTATGWMTTINGKELKVEGQITYYNRYKRQNVVKDLSVELDRLSEESVNNDISSWTKGRQGEALSLLKKRFSHRPVQEKFVCLNCGFETHADEQAALNIARSWLFLRSQEYKKYQTNKTTGNTDKRAFVETWQSFYRKKLKEVWKPAV

SEQ ID NO: 47525 - protein, 979 aa, synthetic construct
  REGION 1..979: note = engineered CasX variant
QEIKRINKIRRRLVKDSNTKKAGKTGPMKTLLVRVMTPDLRERLENLRKKPENIPQPISNTSRANLNKLLTDYTEMKKAILHVYWEEFQKDPVGLMSRVAQPASKKIDQNKLKPEMDEKGNLTTAGFACSQCGQPLFVYKLEQVSEKGKAYTNYFGRCNVAEHEKLILLAQLKPEKDSDEAVTYSLGKFGQRALDFYSIHVTKESTHPVKPLAQIAGNRYASVPVGKALSDACMGTIASFLSKYQDIIIEHQKVVKGNQKRLESLRELAGKENLEYPSVTLPPQPHTKEGVDAYNEVIARVRMWVNLNLWQKLKLSRDDAKPLLRLKGFPSFPLVERQANEVDWWDMVCNVKKLINEKKEDGKVFWQNLAGYKRQEALRPYLSSEEDRKKGKKFARYQLGDLLLHLEKKHGEDWGKVYDEAWERIDKKVEGLSKHIKLEEERRSEDAQSKAALTDWLRAKASFVIEGLKEADDKDEFCRCELKLQKWYGDLRGKPFAIEAENSILDISGFSKQYNCAFIWQKDGVKKLNLYLIINYFKGGKLRFKKIKPEAFEANRFYTVINKKSGEIVPMEVNFNFDDPNLIILPLAFGKRQGREFIWNDLLSLETGSLKLANGRVIEKTLYNRRTRQDEPALFVALTFERREVLDSSNIKPMNLIGVDRGENIPAVIALTDPEGCPLSRFKDSLGNPTHILRIGESYKEKQRTIQAKKEVEQRRAGGYSRKYASKAKNLADDMVRNTARDLLYYAVTQDAMLIFENLSRGFGRQGKRTFMAERQYTRMEDWLTAKLAYEGLPSKTYLSKTLAQYTSKTCSNCGFTITSADYDRVLEKLKKTATGWMTTINGKELKVEGQITYYNRYKRQNVVKDLSVELDRLSEESVNNDISSWTKGRQGEALSLLKKRFSHRPVQEKFVCLNCGFETHADEQAALNIARSWLFLRSQEYKKYQTNKTTGNTDKRAFVETWQSFYRKKLKEVWKPAV

SEQ ID NO: 47526 - protein, 979 aa, synthetic construct
  REGION 1..979: note = engineered CasX variant
QEIKRINKIRRRLVKDSNTKKAGKTGPMKTLLVRVMTPDLRERLENLRKKPENIPQPISNTSRANLNKLLTDYTEMKKAILHVYWEEFQKDPVGLMSRVAQPASKKIDQNKLKPEMDEKGNLTTAGFACSQCGQPLFVYKLEQVSEKGKAYTNYFGRCNVAEHEKLIKLAQLKPEKDSDEAVTYSLGKFGQRALDFYSIHVTKESTHPVKPLAQIAGNRYASGPVGKALSDACMGTIASFLSKYQDIIIEHQKVVKGNQKRLESLRELAGKENLEYPSVTLPPQPHTKEGVDAYNEVIARVRMWVNLNLWQKLKLSRDDAKPLLRLKGFPSFPLVERQANEVDWWDMVCNVKKLINEKKEDGKVFWQNLAGYKRQEALRPYLSSEEDRKKGKKFARYQLGDLLLHLEKKHGEDWGKVYDEAWERIDKKVEGLSKHIKLEEERRSEDAQSKAALTDWLRAKASFVIEGLKEADDKDEFCRCELKLQKWYGDLRGKPFAIEAENSILDISGFSKQYNCAFIWQKDGVKKLNLYLIINYFKGGKLRFKKIKPEAFEANRFYTVINKKSGEIVPMEVNFNFDDPNLIILPLAFGKRQGREFIWNDLLSLETGSLKLANGRVIEKTLYNRRTRQDEPALFVALTFERREVLDSSNIKPMNLIGVDRGENIPAVIALTDPEGCPLSRFKDSLGNPTHILRIGESYKEKQRTIQAKKEVEQRRAGGYSRKYASKAKNLADDMVRNTARDLLYYAVTQDAMLIFENLSRGFGRQGKRTFMAERQYTRMEDWLTAKLAYEGLPSKTYLSKTLAQYTSKTCSNCGFTITSADYDRVLEKLKKTATGWMTTINGKELKVEGQITYYNRYKRQNVVKDLSVELDRLSEESVNNDISSWTKGRQGEALSLLKKRFSHRPVQEKFVCLNCGFETHADEQAALNIARSWLFLRSQEYKKYQTNKTTGNTDKRAFVETWQSFYRKKLKEVWKPAV

SEQ ID NO: 47527 - protein, 978 aa, synthetic construct
  REGION 1..978: note = engineered CasX variant
QEIKRINKIRRRLVKDSNTKKAGKTGPMKTLLVRVMTPDLRERLENLRKKPENIPQPISNTSRANLNKLLTDYTEMKKAILHVYWEEFQKDPVGLMSRVAQPASKKIDQNKLKPEMDEKGNLTTAGFACSQCGQPLFVYKLEQVSEKGKAYTNYFGRCNVAEHEKLILLAQLKPEKDSDEAVTYSLGKFGQRALDFYSIHVTKESTHPVKPLAQIAGNRYASPVGKALSDACMGTIASFLSKYQDIIIEHQKVVKGNQKRLESLRELAGKENLEYPSVTLPPQPHTKEGVDAYNEVIARVRMWVNLNLWQKLKLSRDDAKPLLRLKGFPSFPLVERQANEVDWWDMVCNVKKLINEKKEDGKVFWQNLAGYKRQEALRPYLSSEEDRKKGKKFARYQLGDLLLHLEKKHGEDWGKVYDEAWERIDKKVEGLSKHIKLEEERRSEDAQSKAALTDWLRAKASFVIEGLKEADDKDEFCRCELKLQKWYGDLRGKPFAIEAENSILDISGFSKQYNCAFIWQKDGVKKLNLYLIINYFKGGKLRFKKIKPEAFEANRFYTVINKKSGEIVPMEVNFNFDDPNLIILPLAFGKRQGREFIWNDLLSLETGSLKLANGRVIEKTLYNRRTRQDEPALFVALTFERREVLDSSNIKPMNLIGVDRGENIPAVIALTDPEGCPLSRFKDSLGNPTHILRIGESYKEKQRTIQAKKEVEQRRAGGYSRKYASKAKNLADDMVRNTARDLLYYAVTQDAMLIFENLSRGFGRQGKRTFMAERQYTRMEDWLTAKLAYEGLPSKTYLSKTLAQYTSKTCSNCGFTITSADYDRVLEKLKKTATGWMTTINGKELKVEGQITYYNRYKRQNVVKDLSVELDRLSEESVNNDISSWTKGRQGEALSLLKKRFSHRPVQEKFVCLNCGFETHADEQAALNIARSWLFLRSQEYKKYQTNKTTGNTDKRAFVETWQSFYRKKLKEVWKPAV

SEQ ID NO: 47528 - protein, 979 aa, synthetic construct
  REGION 1..979: note = engineered CasX variant
QEIKRINKIRRRLVKDSNTKKAGKTGPMKTLLVRVMTPDLRERLENLRKKPENIPQPISNTSRANLNKLLTDYTEMKKAILHVYWEEFQKDPVGLMSRVAQPASKKIDQNKLKPEMDEKGNLTTAGFACSQCGQPLFVYKLEQVSEKGKAYTNYFGRCNVAEHEKLILLAQLKPEKDSDEAVTYSLGKFGQRALDFYSIHVTKESTHPVKPLAQIAGNRYASYPVGKALSDACMGTIASFLSKYQDIIIEHQKVVKGNQKRLESLRELAGKENLEYPSVTLPPQPHTKEGVDAYNEVIARVRMWVNLNLWQKLKLSRDDAKPLLRLKGFPSFPLVERQANEVDWWDMVCNVKKLINEKKEDGKVFWQNLAGYKRQEALRPYLSSEEDRKKGKKFARYQLGDLLLHLEKKHGEDWGKVYDEAWERIDKKVEGLSKHIKLEEERRSEDAQSKAALTDWLRAKASFVIEGLKEADKDEFCRCELKLQKWYGDLRGKPFAIEAENSILDISGFSKQYNCAFIWQKDGVKKLNLYLIINYFKGGKLRFKKIKPEAFEANRFYTVINKKSGEIVPMEVNFNFDDPNLIILPLAFGKRQGREFIWNDLLSLETGSLKLANGRVIEKTLYNRRTRQDEPALFVALTFERREVLDSSNIKPMNLIGVDRGENIPAVIALTDPEGCPLSRFKDSLGNPTHILRIGESYKEKQRTIQAKKEVEQRRAGGYSRKYASKAKNLADDMVRNTARDLLYYAVTQDAMLIFENLSRGFGRQGKRTFMAERQYTRMEDWLTAKLAYEGLPSKTYLSKTLAQYTSKTCSNCGFTITSADYDRVLEKLKKTATGWMTTINGKELKVEGQITYYNRYKRQNVVKDLSVELDRLSEESVNNDISSWTKGRQGNEALSLLKKRFSHRPVQEKFVCLNCGFETHADEQAALNIARSWLFLRSQEYKKYQTNKTTGNTDKRAFVETWQSFYRKKLKEVWKPAV

SEQ ID NO: 47529 - protein, 979 aa, synthetic construct
  REGION 1..979: note = engineered CasX variant
QEIKRINKIRRRLVKDSNTKKAGKTGPMKTLLVRVMTPDLRERLENLRKKPENIPQPISNTSRANLNKLLTDYTEMKKAILHVYWEEFQKDPVGLMSRVAQPASKKIDQNKLKPEMDEKGNLTTAGFACSQCGQPLFVYKLEQVSEKGKAYTNYFGRCNVAEHEKLILLAQLKPEKDSDEAVTYSLGKFGQRALDFYSIHVTKESTHPVKPLAQIAGNRYASHPVGKALSDACMGTIASFLSKYQDIIIEHQKVVKGNQKRLESLRELAGKENLEYPSVTLPPQPHTKEGVDAYNEVIARVRMWVNLNLWQKLKLSRDDAKPLLRLKGFPSFPLVERQANEVDWWDMVCNVKKLINEKKEDGKVFWQNLAGYKRQEALRPYLSSEEDRKKGKKFARYQLGDLLLHLEKKHGEDWGKVYDEAWERIDKKVEGLSKHIKLEEERRSEDAQSKAALTDWLRAKASFVIEGLKEADKDEFCRCELKLQKWYGDLRGKPFAIEAENSILDISGFSKQYNCAFIWQKDGVKKLNLYLIINYFKGGKLRFKKIKPEAFEANRFYTVINKKSGEIVPMEVNFNFDDPNLIILPLAFGKRQGREFIWNDLLSLETGSLKLANGRVIEKTLYNRRTRQDEPALFVALTFERREVLDSSNIKPMNLIGVDRGENIPAVIALTDPEGCPLSRFKDSLGNPTHILRIGESYKEKQRTIQAKKEVEQRRAGGYSRKYASKAKNLADDMVRNTARDLLYYAVTQDAMLIFENLSRGFGRQGKRTFMAERQYTRMEDWLTAKLAYEGLPSKTYLSKTLAQYTSKTCSNCGFTITSADYDRVLEKLKKTATGWMTTINGKELKVEGQITYYNRYKRQNVVKDLSVELDRLSEESVNNDISSWTKGRQGNEALSLLKKRFSHRPVQEKFVCLNCGFETHADEQAALNIARSWLFLRSQEYKKYQTNKTTGNTDKRAFVETWQSFYRKKLKEVWKPAV

SEQ ID NO: 47530 - protein, 979 aa, synthetic construct
  REGION 1..979: note = engineered CasX variant
QEIKRINKIRRRLVKDSNTKKAGKTGPMKTLLVRVMTPDLRERLENLRKKPENIPQPISNTSRANLNKLLTDYTEMKKAILHVYWEEFQKDPVGLMSRVAQPASKKIDQNKLKPEMDEKGNLTTAGFACSQCGQPLFVYKLEQVSEKGKAYTNYFGRCNVAEHEKLILLAQLKPEKDSDEAVTYSLGKFGQRALDFYSIHVTKESTHPVKPLAQIAGNRYASSPVGKALSDACMGTIASFLSKYQDIIIEHQKVVKGNQKRLESLRELAGKENLEYPSVTLPPQPHTKEGVDAYNEVIARVRMWVNLNLWQKLKLSRDDAKPLLRLKGFPSFPLVERQANEVDWWDMVCNVKKLINEKKEDGKVFWQNLAGYKRQEALRPYLSSEEDRKKGKKFARYQLGDLLLHLEKKHGEDWGKVYDEAWERIDKKVEGLSKHIKLEEERRSEDAQSKAALTDWLRAKASFVIEGLKEADKDEFCRCELKLQKWYGDLRGKPFAIEAENSILDISGFSKQYNCAFIWQKDGVKKLNLYLIINYFKGGKLRFKKIKPEAFEANRFYTVINKKSGEIVPMEVNFNFDDPNLIILPLAFGKRQGREFIWNDLLSLETGSLKLANGRVIEKTLYNRRTRQDEPALFVALTFERREVLDSSNIKPMNLIGVDRGENIPAVIALTDPEGCPLSRFKDSLGNPTHILRIGESYKEKQRTIQAKKEVEQRRAGGYSRKYASKAKNLADDMVRNTARDLLYYAVTQDAMLIFENLSRGFGRQGKRTFMAERQYTRMEDWLTAKLAYEGLPSKTYLSKTLAQYTSKTCSNCGFTITSADYDRVLEKLKKTATGWMTTINGKELKVEGQITYYNRYKRQNVVKDLSVELDRLSEESVNNDISSWTKGRQGNEALSLLKKRFSHRPVQEKFVCLNCGFETHADEQAALNIARSWLFLRSQEYKKYQTNKTTGNTDKRAFVETWQSFYRKKLKEVWKPAV

SEQ ID NO: 47531 - protein, 979 aa, synthetic construct
  REGION 1..979: note = engineered CasX variant
QEIKRINKIRRRLVKDSNTKKAGKTGPMKTLLVRVMTPDLRERLENLRKKPENIPQPISNTSRANLNKLLTDYTEMKKAILHVYWEEFQKDPVGLMSRVAQPASKKIDQNKLKPEMDEKGNLTTAGFACSQCGQPLFVYKLEQVSEKGKAYTNYFGRCNVAEHEKLILLAQLKPEKDSDEAVTYSLGKFGQRALDFYSIHVTKESTHPVKPLAQIAGNRYASTPVGKALSDACMGTIASFLSKYQDIIIEHQKVVKGNQKRLESLRELAGKENLEYPSVTLPPQPHTKEGVDAYNEVIARVRMWVNLNLWQKLKLSRDDAKPLLRLKGFPSFPLVERQANEVDWWDMVCNVKKLINEKKEDGKVFWQNLAGYKRQEALRPYLSSEEDRKKGKKFARYQLGDLLLHLEKKHGEDWGKVYDEAWERIDKKVEGLSKHIKLEEERRSEDAQSKAALTDWLRAKASFVIEGLKEADKDEFCRCELKLQKWYGDLRGKPFAIEAENSILDISGFSKQYNCAFIWQKDGVKKLNLYLIINYFKGGKLRFKKIKPEAFEANRFYTVINKKSGEIVPMEVNFNFDDPNLIILPLAFGKRQGREFIWNDLLSLETGSLKLANGRVIEKTLYNRRTRQDEPALFVALTFERREVLDSSNIKPMNLIGVDRGENIPAVIALTDPEGCPLSRFKDSLGNPTHILRIGESYKEKQRTIQAKKEVEQRRAGGYSRKYASKAKNLADDMVRNTARDLLYYAVTQDAMLIFENLSRGFGRQGKRTFMAERQYTRMEDWLTAKLAYEGLPSKTYLSKTLAQYTSKTCSNCGFTITSADYDRVLEKLKKTATGWMTTINGKELKVEGQITYYNRYKRQNVVKDLSVELDRLSEESVNNDISSWTKGRQGNEALSLLKKRFSHRPVQEKFVCLNCGFETHADEQAALNIARSWLFLRSQEYKKYQTNKTTGNTDKRAFVETWQSFYRKKLKEVWKPAV

SEQ ID NO: 47532 - protein, 979 aa, synthetic construct
  REGION 1..979: note = engineered CasX variant
QEIKRINKIRRRLVKDSNTKKAGKTGPMKTLLVRVMTPDLRERLENLRKKPENIPQPISNTSRANLNKLLTDYTEMKKAILHVYWEEFQKDPVGLMSRVAQPASKKIDQNKLKPEMDEKGNLTTAGFACSQCGQPLFVYKLEQVSEKGKAYTNYFGRCNVAEHEKLILLAQLKPEKDSDEAVTYSLGKFGQRALDFYSIHVTKESTHPVKPLAQIAGNRYASAPVGKALSDACMGTIASFLSKYQDIIIEHQKVVKGNQKRLESLRELAGKENLEYPSVTLPPQPHTKEGVDAYNEVIARVRMWVNLNLWQKLKLSRDDAKPLLRLKGFPSFPLVERQANEVDWWDMVCNVKKLINEKKEDGKVFWQNLAGYKRQEALRPYLSSEEDRKKGKKFARYQLGDLLLHLEKKHGEDWGKVYDEAWERIDKKVEGLSKHIKLEEERRSEDAQSKAALTDWLRAKASFVIEGLKEADKDEFCRCELKLQKWYGDLRGKPFAIEAENSILDISGFSKQYNCAFIWQKDGVKKLNLYLIINYFKGGKLRFKKIKPEAFEANRFYTVINKKSGEIVPMEVNFNFDDPNLIILPLAFGKRQGREFIWNDLLSLETGSLKLANGRVIEKTLYNRRTRQDEPALFVALTFERREVLDSSNIKPMNLIGVDRGENIPAVIALTDPEGCPLSRFKDSLGNPTHILRIGESYKEKQRTIQAKKEVEQRRAGGYSRKYASKAKNLADDMVRNTARDLLYYAVTQDAMLIFENLSRGFGRQGKRTFMAERQYTRMEDWLTAKLAYEGLPSKTYLSKTLAQYTSKTCSNCGFTITSADYDRVLEKLKKTATGWMTTINGKELKVEGQITYYNRYKRQNVVKDLSVELDRLSEESVNNDISSWTKGRQGNEALSLLKKRFSHRPVQEKFVCLNCGFETHADEQAALNIARSWLFLRSQEYKKYQTNKTTGNTDKRAFVETWQSFYRKKLKEVWKPAV

SEQ ID NO: 47533 - protein, 979 aa, synthetic construct
  REGION 1..979: note = engineered CasX variant
QEIKRINKIRRRLVKDSNTKKAGKTGPMKTLLVRVMTPDLRERLENLRKKPENIPQPISNTSRANLNKLLTDYTEMKKAILHVYWEEFQKDPVGLMSRVAQPASKKIDQNKLKPEMDEKGNLTTAGFACSQCGQPLFVYKLEQVSEKGKAYTNYFGRCNVAEHEKLILLAQLKPEKDSDEAVTYSLGKFGQRALDFYSIHVTKESTHPVKPLAQIAGNRYASVPVGKALSDACMGTIASFLSKYQDIIIEHQKVVKGNQKRLESLRELAGKENLEYPSVTLPPQPHTKEGVDAYNEVIARVRMWVNLNLWQKLKLSRDDAKPLLRLKGFPSFPLVERQANEVDWWDMVCNVKKLINEKKEDGKVFWQNLAGYKRQEALRPYLSSEEDRKKGKKFARYQLGDLLLHLEKKHGEDWGKVYDEAWERIDKKVEGLSKHIKLEEERRSEDAQSKAALTDWLRAKASFVIEGLKEADKDEFCRCELKLQKWYGDLRGKPFAIEAENSILDISGFSKQYNCAFIWQKDGVKKLNLYLIINYFKGGKLRFKKIKPEAFEANRFYTVINKKSGEIVPMEVNFNFDDPNLIILPLAFGKRQGREFIWNDLLSLETGSLKLANGRVIEKTLYNRRTRQDEPALFVALTFERREVLDSSNIKPMNLIGVDRGENIPAVIALTDPEGCPLSRFKDSLGNPTHILRIGESYKEKQRTIQAKKEVEQRRAGGYSRKYASKAKNLADDMVRNTARDLLYYAVTQDAMLIFENLSRGFGRQGKRTFMAERQYTRMEDWLTAKLAYEGLPSKTYLSKTLAQYTSKTCSNCGFTITSADYDRVLEKLKKTATGWMTTINGKELKVEGQITYYNRYKRQNVVKDLSVELDRLSEESVNNDISSWTKGRQGNEALSLLKKRFSHRPVQEKFVCLNCGFETHADEQAALNIARSWLFLRSQEYKKYQTNKTTGNTDKRAFVETWQSFYRKKLKEVWKPAV

SEQ ID NO: 47534 - protein, 979 aa, synthetic construct
  REGION 1..979: note = engineered CasX variant
QEIKRINKIRRRLVKDSNTKKAGKTGPMKTLLVRVMTPDLRERLENLRKKPENIPQPISNTSRANLNKLLTDYTEMKKAILHVYWEEFQKDPVGLMSRVAQPASKKIDQNKLKPEMDEKGNLTTAGFACSQCGQPLFVYKLEQVSEKGKAYTNYFGRCNVAEHEKLIKLAQLKPEKDSDEAVTYSLGKFGQRALDFYSIHVTKESTHPVKPLAQIAGNRYASGPVGKALSDACMGTIASFLSKYQDIIIEHQKVVKGNQKRLESLRELAGKENLEYPSVTLPPQPHTKEGVDAYNEVIARVRMWVNLNLWQKLKLSRDDAKPLLRLKGFPSFPLVERQANEVDWWDMVCNVKKLINEKKEDGKVFWQNLAGYKRQEALRPYLSSEEDRKKGKKFARYQLGDLLLHLEKKHGEDWGKVYDEAWERIDKKVEGLSKHIKLEEERRSEDAQSKAALTDWLRAKASFVIEGLKEADKDEFCRCELKLQKWYGDLRGKPFAIEAENSILDISGFSKQYNCAFIWQKDGVKKLNLYLIINYFKGGKLRFKKIKPEAFEANRFYTVINKKSGEIVPMEVNFNFDDPNLIILPLAFGKRQGREFIWNDLLSLETGSLKLANGRVIEKTLYNRRTRQDEPALFVALTFERREVLDSSNIKPMNLIGVDRGENIPAVIALTDPEGCPLSRFKDSLGNPTHILRIGESYKEKQRTIQAKKEVEQRRAGGYSRKYASKAKNLADDMVRNTARDLLYYAVTQDAMLIFENLSRGFGRQGKRTFMAERQYTRMEDWLTAKLAYEGLPSKTYLSKTLAQYTSKTCSNCGFTITSADYDRVLEKLKKTATGWMTTINGKELKVEGQITYYNRYKRQNVVKDLSVELDRLSEESVNNDISSWTKGRQGNEALSLLKKRFSHRPVQEKFVCLNCGFETHADEQAALNIARSWLFLRSQEYKKYQTNKTTGNTDKRAFVETWQSFYRKKLKEVWKPAV

SEQ ID NO: 47535 - protein, 978 aa, synthetic construct
  REGION 1..978: note = engineered CasX variant
QEIKRINKIRRRLVKDSNTKKAGKTGPMKTLLVRVMTPDLRERLENLRKKPENIPQPISNTSRANLNKLLTDYTEMKKAILHVYWEEFQKDPVGLMSRVAQPASKKIDQNKLKPEMDEKGNLTTAGFACSQCGQPLFVYKLEQVSEKGKAYTNYFGRCNVAEHEKLILLAQLKPEKDSDEAVTYSLGKFGQRALDFYSIHVTKESTHPVKPLAQIAGNRYASPVGKALSDACMGTIASFLSKYQDIIIEHQKVVKGNQKRLESLRELAGKENLEYPSVTLPPQPHTKEGVDAYNEVIARVRMWVNLNLWQKLKLSRDDAKPLLRLKGFPSFPLVERQANEVDWWDMVCNVKKLINEKKEDGKVFWQNLAGYKRQEALRPYLSSEEDRKKGKKFARYQLGDLLLHLEKKHGEDWGKVYDEAWERIDKKVEGLSKHIKLEEERRSEDAQSKAALTDWLRAKASFVIEGLKEADKDEFCRCELKLQKWYGDLRGKPFAIEAENSILDISGFSKQYNCAFIWQKDGVKKLNLYLIINYFKGGKLRFKKIKPEAFEANRFYTVINKKSGEIVPMEVNFNFDDPNLIILPLAFGKRQGREFIWNDLLSLETGSLKLANGRVIEKTLYNRRTRQDEPALFVALTFERREVLDSSNIKPMNLIGVDRGENIPAVIALTDPEGCPLSRFKDSLGNPTHILRIGESYKEKQRTIQAKKEVEQRRAGGYSRKYASKAKNLADDMVRNTARDLLYYAVTQDAMLIFENLSRGFGRQGKRTFMAERQYTRMEDWLTAKLAYEGLPSKTYLSKTLAQYTSKTCSNCGFTITSADYDRVLEKLKKTATGWMTTINGKELKVEGQITYYNRYKRQNVVKDLSVELDRLSEESVNNDISSWTKGRQGNEALSLLKKRFSHRPVQEKFVCLNCGFETHADEQAALNIARSWLFLRSQEYKKYQTNKTTGNTDKRAFVETWQSFYRKKLKEVWKPAV

SEQ ID NO: 47536 - protein, 978 aa, synthetic construct
  REGION 1..978: note = engineered CasX variant
QEIKRINKIRRRLVKDSNTKKAGKTGPMKTLLVRVMTPDLRERLENLRKKPENIPQPISNTSRANLNKLLTDYTEMKKAILHVYWEEFQKDPVGLMSRVAQPASKKIDQNKLKPEMDEKGNLTTAGFACSQCGQPLFVYKLEQVSEKGKAYTNYFGRCNVAEHEKLILLAQLKPEKDSDEAVTYSLGKFGQRALDFYSIHVTKESTHPVKPLAQIAGNRYASYPVGKALSDACMGTIASFLSKYQDIIIEHQKVVKGNQKRLESLRELAGKENLEYPSVTLPPQPHTKEGVDAYNEVIARVRMWVNLNLWQKLKLSRDDAKPLLRLKGFPSFPLVERQANEVDWWDMVCNVKKLINEKKEDGKVFWQNLAGYKRQEALRPYLSSEEDRQKGKKFARYQLGDLLLHLEKKHGEDWGKVYDEAWERIDKKVEGLSKHIKLEEERRSEDAQSKAALTDWLRAKASFVIEGLKEADKDEFCRCELKLQKWYGDLRGKPFAIEAENSILDISGFSKQYNCAFIWQKDGVKKLNLYLIINYFKGGKLRFKKIKPEAFEANRFYTVINKKSGEIVPMEVNFNFDDPNLIILPLAFGKRQGREFIWNDLLSLETGSLKLANGRVIEKTLYNRRTRQDEPALFVALTFERREVLDSSNIKPMNLIGVDRGENIPAVIALTDPEGCPLSRFKDSLGNPTHILRIGESYKEKQRTIQAKKEVEQRRAGGYSRKYASKAKNLADDMVRNTARDLLYYAVTQDAMLIFENLSRGFGRQGKRTFMAERQYTRMEDWLTAKLAYEGLPSKTYLSKTLAQYTSKTCSNCGFTITSADYDRVLEKLKKTATGWMTTINGKELKVEGQITYYNRYKRQNVVKDLSVELDRLSEESVNNDISSWTKGRQGEALSLLKKRFSHRPVQEKFVCLNCGFETHADEQAALNIARSWLFLRSQEYKKYQTNKTTGNTDKRAFVETWQSFYRKKLKEVWKPAV

SEQ ID NO: 47537 - protein, 978 aa, synthetic construct
  REGION 1..978: note = engineered CasX variant
QEIKRINKIRRRLVKDSNTKKAGKTGPMKTLLVRVMTPDLRERLENLRKKPENIPQPISNTSRANLNKLLTDYTEMKKAILHVYWEEFQKDPVGLMSRVAQPASKKIDQNKLKPEMDEKGNLTTAGFACSQCGQPLFVYKLEQVSEKGKAYTNYFGRCNVAEHEKLILLAQLKPEKDSDEAVTYSLGKFGQRALDFYSIHVTKESTHPVKPLAQIAGNRYASHPVGKALSDACMGTIASFLSKYQDIIIEHQKVVKGNQKRLESLRELAGKENLEYPSVTLPPQPHTKEGVDAYNEVIARVRMWVNLNLWQKLKLSRDDAKPLLRLKGFPSFPLVERQANEVDWWDMVCNVKKLINEKKEDGKVFWQNLAGYKRQEALRPYLSSEEDRQKGKKFARYQLGDLLLHLEKKHGEDWGKVYDEAWERIDKKVEGLSKHIKLEEERRSEDAQSKAALTDWLRAKASFVIEGLKEADKDEFCRCELKLQKWYGDLRGKPFAIEAENSILDISGFSKQYNCAFIWQKDGVKKLNLYLIINYFKGGKLRFKKIKPEAFEANRFYTVINKKSGEIVPMEVNFNFDDPNLIILPLAFGKRQGREFIWNDLLSLETGSLKLANGRVIEKTLYNRRTRQDEPALFVALTFERREVLDSSNIKPMNLIGVDRGENIPAVIALTDPEGCPLSRFKDSLGNPTHILRIGESYKEKQRTIQAKKEVEQRRAGGYSRKYASKAKNLADDMVRNTARDLLYYAVTQDAMLIFENLSRGFGRQGKRTFMAERQYTRMEDWLTAKLAYEGLPSKTYLSKTLAQYTSKTCSNCGFTITSADYDRVLEKLKKTATGWMTTINGKELKVEGQITYYNRYKRQNVVKDLSVELDRLSEESVNNDISSWTKGRQGEALSLLKKRFSHRPVQEKFVCLNCGFETHADEQAALNIARSWLFLRSQEYKKYQTNKTTGNTDKRAFVETWQSFYRKKLKEVWKPAV

SEQ ID NO: 47538 - protein, 978 aa, synthetic construct
  REGION 1..978: note = engineered CasX variant
QEIKRINKIRRRLVKDSNTKKAGKTGPMKTLLVRVMTPDLRERLENLRKKPENIPQPISNTSRANLNKLLTDYTEMKKAILHVYWEEFQKDPVGLMSRVAQPASKKIDQNKLKPEMDEKGNLTTAGFACSQCGQPLFVYKLEQVSEKGKAYTNYFGRCNVAEHEKLILLAQLKPEKDSDEAVTYSLGKFGQRALDFYSIHVTKESTHPVKPLAQIAGNRYASSPVGKALSDACMGTIASFLSKYQDIIIEHQKVVKGNQKRLESLRELAGKENLEYPSVTLPPQPHTKEGVDAYNEVIARVRMWVNLNLWQKLKLSRDDAKPLLRLKGFPSFPLVERQANEVDWWDMVCNVKKLINEKKEDGKVFWQNLAGYKRQEALRPYLSSEEDRQKGKKFARYQLGDLLLHLEKKHGEDWGKVYDEAWERIDKKVEGLSKHIKLEEERRSEDAQSKAALTDWLRAKASFVIEGLKEADKDEFCRCELKLQKWYGDLRGKPFAIEAENSILDISGFSKQYNCAFIWQKDGVKKLNLYLIINYFKGGKLRFKKIKPEAFEANRFYTVINKKSGEIVPMEVNFNFDDPNLIILPLAFGKRQGREFIWNDLLSLETGSLKLANGRVIEKTLYNRRTRQDEPALFVALTFERREVLDSSNIKPMNLIGVDRGENIPAVIALTDPEGCPLSRFKDSLGNPTHILRIGESYKEKQRTIQAKKEVEQRRAGGYSRKYASKAKNLADDMVRNTARDLLYYAVTQDAMLIFENLSRGFGRQGKRTFMAERQYTRMEDWLTAKLAYEGLPSKTYLSKTLAQYTSKTCSNCGFTITSADYDRVLEKLKKTATGWMTTINGKELKVEGQITYYNRYKRQNVVKDLSVELDRLSEESVNNDISSWTKGRQGEALSLLKKRFSHRPVQEKFVCLNCGFETHADEQAALNIARSWLFLRSQEYKKYQTNKTTGNTDKRAFVETWQSFYRKKLKEVWKPAV

SEQ ID NO: 47539 - protein, 978 aa, synthetic construct
  REGION 1..978: note = engineered CasX variant
QEIKRINKIRRRLVKDSNTKKAGKTGPMKTLLVRVMTPDLRERLENLRKKPENIPQPISNTSRANLNKLLTDYTEMKKAILHVYWEEFQKDPVGLMSRVAQPASKKIDQNKLKPEMDEKGNLTTAGFACSQCGQPLFVYKLEQVSEKGKAYTNYFGRCNVAEHEKLILLAQLKPEKDSDEAVTYSLGKFGQRALDFYSIHVTKESTHPVKPLAQIAGNRYASTPVGKALSDACMGTIASFLSKYQDIIIEHQKVVKGNQKRLESLRELAGKENLEYPSVTLPPQPHTKEGVDAYNEVIARVRMWVNLNLWQKLKLSRDDAKPLLRLKGFPSFPLVERQANEVDWWDMVCNVKKLINEKKEDGKVFWQNLAGYKRQEALRPYLSSEEDRQKGKKFARYQLGDLLLHLEKKHGEDWGKVYDEAWERIDKKVEGLSKHIKLEEERRSEDAQSKAALTDWLRAKASFVIEGLKEADKDEFCRCELKLQKWYGDLRGKPFAIEAENSILDISGFSKQYNCAFIWQKDGVKKLNLYLIINYFKGGKLRFKKIKPEAFEANRFYTVINKKSGEIVPMEVNFNFDDPNLIILPLAFGKRQGREFIWNDLLSLETGSLKLANGRVIEKTLYNRRTRQDEPALFVALTFERREVLDSSNIKPMNLIGVDRGENIPAVIALTDPEGCPLSRFKDSLGNPTHILRIGESYKEKQRTIQAKKEVEQRRAGGYSRKYASKAKNLADDMVRNTARDLLYYAVTQDAMLIFENLSRGFGRQGKRTFMAERQYTRMEDWLTAKLAYEGLPSKTYLSKTLAQYTSKTCSNCGFTITSADYDRVLEKLKKTATGWMTTINGKELKVEGQITYYNRYKRQNVVKDLSVELDRLSEESVNNDISSWTKGRQGEALSLLKKRFSHRPVQEKFVCLNCGFETHADEQAALNIARSWLFLRSQEYKKYQTNKTTGNTDKRAFVETWQSFYRKKLKEVWKPAV

SEQ ID NO: 47540 - protein, 978 aa, synthetic construct
  REGION 1..978: note = engineered CasX variant
QEIKRINKIRRRLVKDSNTKKAGKTGPMKTLLVRVMTPDLRERLENLRKKPENIPQPISNTSRANLNKLLTDYTEMKKAILHVYWEEFQKDPVGLMSRVAQPASKKIDQNKLKPEMDEKGNLTTAGFACSQCGQPLFVYKLEQVSEKGKAYTNYFGRCNVAEHEKLILLAQLKPEKDSDEAVTYSLGKFGQRALDFYSIHVTKESTHPVKPLAQIAGNRYASAPVGKALSDACMGTIASFLSKYQDIIIEHQKVVKGNQKRLESLRELAGKENLEYPSVTLPPQPHTKEGVDAYNEVIARVRMWVNLNLWQKLKLSRDDAKPLLRLKGFPSFPLVERQANEVDWWDMVCNVKKLINEKKEDGKVFWQNLAGYKRQEALRPYLSSEEDRQKGKKFARYQLGDLLLHLEKKHGEDWGKVYDEAWERIDKKVEGLSKHIKLEEERRSEDAQSKAALTDWLRAKASFVIEGLKEADKDEFCRCELKLQKWYGDLRGKPFAIEAENSILDISGFSKQYNCAFIWQKDGVKKLNLYLIINYFKGGKLRFKKIKPEAFEANRFYTVINKKSGEIVPMEVNFNFDDPNLIILPLAFGKRQGREFIWNDLLSLETGSLKLANGRVIEKTLYNRRTRQDEPALFVALTFERREVLDSSNIKPMNLIGVDRGENIPAVIALTDPEGCPLSRFKDSLGNPTHILRIGESYKEKQRTIQAKKEVEQRRAGGYSRKYASKAKNLADDMVRNTARDLLYYAVTQDAMLIFENLSRGFGRQGKRTFMAERQYTRMEDWLTAKLAYEGLPSKTYLSKTLAQYTSKTCSNCGFTITSADYDRVLEKLKKTATGWMTTINGKELKVEGQITYYNRYKRQNVVKDLSVELDRLSEESVNNDISSWTKGRQGEALSLLKKRFSHRPVQEKFVCLNCGFETHADEQAALNIARSWLFLRSQEYKKYQTNKTTGNTDKRAFVETWQSFYRKKLKEVWKPAV

SEQ ID NO: 47541 - protein, 978 aa, synthetic construct
  REGION 1..978: note = engineered CasX variant
QEIKRINKIRRRLVKDSNTKKAGKTGPMKTLLVRVMTPDLRERLENLRKKPENIPQPISNTSRANLNKLLTDYTEMKKAILHVYWEEFQKDPVGLMSRVAQPASKKIDQNKLKPEMDEKGNLTTAGFACSQCGQPLFVYKLEQVSEKGKAYTNYFGRCNVAEHEKLILLAQLKPEKDSDEAVTYSLGKFGQRALDFYSIHVTKESTHPVKPLAQIAGNRYASVPVGKALSDACMGTIASFLSKYQDIIIEHQKVVKGNQKRLESLRELAGKENLEYPSVTLPPQPHTKEGVDAYNEVIARVRMWVNLNLWQKLKLSRDDAKPLLRLKGFPSFPLVERQANEVDWWDMVCNVKKLINEKKEDGKVFWQNLAGYKRQEALRPYLSSEEDRQKGKKFARYQLGDLLLHLEKKHGEDWGKVYDEAWERIDKKVEGLSKHIKLEEERRSEDAQSKAALTDWLRAKASFVIEGLKEADKDEFCRCELKLQKWYGDLRGKPFAIEAENSILDISGFSKQYNCAFIWQKDGVKKLNLYLIINYFKGGKLRFKKIKPEAFEANRFYTVINKKSGEIVPMEVNFNFDDPNLIILPLAFGKRQGREFIWNDLLSLETGSLKLANGRVIEKTLYNRRTRQDEPALFVALTFERREVLDSSNIKPMNLIGVDRGENIPAVIALTDPEGCPLSRFKDSLGNPTHILRIGESYKEKQRTIQAKKEVEQRRAGGYSRKYASKAKNLADDMVRNTARDLLYYAVTQDAMLIFENLSRGFGRQGKRTFMAERQYTRMEDWLTAKLAYEGLPSKTYLSKTLAQYTSKTCSNCGFTITSADYDRVLEKLKKTATGWMTTINGKELKVEGQITYYNRYKRQNVVKDLSVELDRLSEESVNNDISSWTKGRQGEALSLLKKRFSHRPVQEKFVCLNCGFETHADEQAALNIARSWLFLRSQEYKKYQTNKTTGNTDKRAFVETWQSFYRKKLKEVWKPAV

SEQ ID NO: 47542 - protein, 978 aa, synthetic construct
  REGION 1..978: note = engineered CasX variant
QEIKRINKIRRRLVKDSNTKKAGKTGPMKTLLVRVMTPDLRERLENLRKKPENIPQPISNTSRANLNKLLTDYTEMKKAILHVYWEEFQKDPVGLMSRVAQPASKKIDQNKLKPEMDEKGNLTTAGFACSQCGQPLFVYKLEQVSEKGKAYTNYFGRCNVAEHEKLIKLAQLKPEKDSDEAVTYSLGKFGQRALDFYSIHVTKESTHPVKPLAQIAGNRYASGPVGKALSDACMGTIASFLSKYQDIIIEHQKVVKGNQKRLESLRELAGKENLEYPSVTLPPQPHTKEGVDAYNEVIARVRMWVNLNLWQKLKLSRDDAKPLLRLKGFPSFPLVERQANEVDWWDMVCNVKKLINEKKEDGKVFWQNLAGYKRQEALRPYLSSEEDRQKGKKFARYQLGDLLLHLEKKHGEDWGKVYDEAWERIDKKVEGLSKHIKLEEERRSEDAQSKAALTDWLRAKASFVIEGLKEADKDEFCRCELKLQKWYGDLRGKPFAIEAENSILDISGFSKQYNCAFIWQKDGVKKLNLYLIINYFKGGKLRFKKIKPEAFEANRFYTVINKKSGEIVPMEVNFNFDDPNLIILPLAFGKRQGREFIWNDLLSLETGSLKLANGRVIEKTLYNRRTRQDEPALFVALTFERREVLDSSNIKPMNLIGVDRGENIPAVIALTDPEGCPLSRFKDSLGNPTHILRIGESYKEKQRTIQAKKEVEQRRAGGYSRKYASKAKNLADDMVRNTARDLLYYAVTQDAMLIFENLSRGFGRQGKRTFMAERQYTRMEDWLTAKLAYEGLPSKTYLSKTLAQYTSKTCSNCGFTITSADYDRVLEKLKKTATGWMTTINGKELKVEGQITYYNRYKRQNVVKDLSVELDRLSEESVNNDISSWTKGRQGEALSLLKKRFSHRPVQEKFVCLNCGFETHADEQAALNIARSWLFLRSQEYKKYQTNKTTGNTDKRAFVETWQSFYRKKLKEVWKPAV

SEQ ID NO: 47543 - protein, 977 aa, synthetic construct
  REGION 1..977: note = engineered CasX variant
QEIKRINKIRRRLVKDSNTKKAGKTGPMKTLLVRVMTPDLRERLENLRKKPENIPQPISNTSRANLNKLLTDYTEMKKAILHVYWEEFQKDPVGLMSRVAQPASKKIDQNKLKPEMDEKGNLTTAGFACSQCGQPLFVYKLEQVSEKGKAYTNYFGRCNVAEHEKLILLAQLKPEKDSDEAVTYSLGKFGQRALDFYSIHVTKESTHPVKPLAQIAGNRYASPVGKALSDACMGTIASFLSKYQDIIIEHQKVVKGNQKRLESLRELAGKENLEYPSVTLPPQPHTKEGVDAYNEVIARVRMWVNLNLWQKLKLSRDDAKPLLRLKGFPSFPLVERQANEVDWWDMVCNVKKLINEKKEDGKVFWQNLAGYKRQEALRPYLSSEEDRQKGKKFARYQLGDLLLHLEKKHGEDWGKVYDEAWERIDKKVEGLSKHIKLEEERRSEDAQSKAALTDWLRAKASFVIEGLKEADKDEFCRCELKLQKWYGDLRGKPFAIEAENSILDISGFSKQYNCAFIWQKDGVKKLNLYLIINYFKGGKLRFKKIKPEAFEANRFYTVINKKSGEIVPMEVNFNFDDPNLIILPLAFGKRQGREFIWNDLLSLETGSLKLANGRVIEKTLYNRRTRQDEPALFVALTFERREVLDSSNIKPMNLIGVDRGENIPAVIALTDPEGCPLSRFKDSLGNPTHILRIGESYKEKQRTIQAKKEVEQRRAGGYSRKYASKAKNLADDMVRNTARDLLYYAVTQDAMLIFENLSRGFGRQGKRTFMAERQYTRMEDWLTAKLAYEGLPSKTYLSKTLAQYTSKTCSNCGFTITSADYDRVLEKLKKTATGWMTTINGKELKVEGQITYYNRYKRQNVVKDLSVELDRLSEESVNNDISSWTKGRQGEALSLLKKRFSHRPVQEKFVCLNCGFETHADEQAALNIARSWLFLRSQEYKKYQTNKTTGNTDKRAFVETWQSFYRKKLKEVWKPAV

SEQ ID NO: 47544 - protein, 978 aa, synthetic construct
  REGION 1..978: note = engineered CasX variant
QEIKRINKIRRRLVKDSNTKKAGKTGPMKTLLVRVMTPDLRERLENLRKKPENIPQPISNTSRANLNKLLTDYTEMKKAILHVYWEEFQKDPVGLMSRVAQPASKKIDQNKLKPEMDEKGNLTTAGFACSQCGQPLFVYKLEQVSEKGKAYTNYFGRCNVAEHEKLILLAQLKPEKDSDEAVTYSLGKFGQRALDFYSIHVTKESTHPVKPLAQIAGNRYASYPVGKALSDACMGTIASFLSKYQDIIIEHQKVVKGNQKRLESLRELAGKENLEYPSVTLPPQPHTKEGVDAYNEVIARVRMWVNLNLWQKLKLSRDDAKPLLRLKGFPSFPLVERQANEVDWWDMVCNVKKLINEKKEDGKVFWQNLAGYKRQEALRPYLSSEEDRKKGKKFARYQLGDLLLHLEKKHGEDWGKVYDEAWERIDKKVEGLSKHIKLEEERRSEDAQSKAALTDWLRAKASFVIEGLKEADKDEFCRCELKLQKWYGDLRGKPFAIEAENSILDISGFSKQYNCAFIWQKDGVKKLNLYLIINYFKGGKLRFKKIKPEAFEANRFYTVINKKSGEIVPMEVNFNFDDPNLIILPLAFGKRQGREFIWNDLLSLETGSLKLANGRVIEKTLYNRRTRQDEPALFVALTFERREVLDSSNIKPMNLIGVDRGENIPAVIALTDPEGCPLSRFKDSLGNPTHILRIGESYKEKQRTIQAKKEVEQRRAGGYSRKYASKAKNLADDMVRNTARDLLYYAVTQDAMLIFENLSRGFGRQGKRTFMAERQYTRMEDWLTAKLAYEGLPSQTYLSKTLAQYTSKTCSNCGFTITSADYDRVLEKLKKTATGWMTTINGKELKVEGQITYYNRYKRQNVVKDLSVELDRLSEESVNNDISSWTKGRQGEALSLLKKRFSHRPVQEKFVCLNCGFETHADEQAALNIARSWLFLRSQEYKKYQTNKTTGNTDKRAFVETWQSFYRKKLKEVWKPAV

SEQ ID NO: 47545 - protein, 978 aa, synthetic construct
  REGION 1..978: note = engineered CasX variant
QEIKRINKIRRRLVKDSNTKKAGKTGPMKTLLVRVMTPDLRERLENLRKKPENIPQPISNTSRANLNKLLTDYTEMKKAILHVYWEEFQKDPVGLMSRVAQPASKKIDQNKLKPEMDEKGNLTTAGFACSQCGQPLFVYKLEQVSEKGKAYTNYFGRCNVAEHEKLILLAQLKPEKDSDEAVTYSLGKFGQRALDFYSIHVTKESTHPVKPLAQIAGNRYASHPVGKALSDACMGTIASFLSKYQDIIIEHQKVVKGNQKRLESLRELAGKENLEYPSVTLPPQPHTKEGVDAYNEVIARVRMWVNLNLWQKLKLSRDDAKPLLRLKGFPSFPLVERQANEVDWWDMVCNVKKLINEKKEDGKVFWQNLAGYKRQEALRPYLSSEEDRKKGKKFARYQLGDLLLHLEKKHGEDWGKVYDEAWERIDKKVEGLSKHIKLEEERRSEDAQSKAALTDWLRAKASFVIEGLKEADKDEFCRCELKLQKWYGDLRGKPFAIEAENSILDISGFSKQYNCAFIWQKDGVKKLNLYLIINYFKGGKLRFKKIKPEAFEANRFYTVINKKSGEIVPMEVNFNFDDPNLIILPLAFGKRQGREFIWNDLLSLETGSLKLANGRVIEKTLYNRRTRQDEPALFVALTFERREVLDSSNIKPMNLIGVDRGENIPAVIALTDPEGCPLSRFKDSLGNPTHILRIGESYKEKQRTIQAKKEVEQRRAGGYSRKYASKAKNLADDMVRNTARDLLYYAVTQDAMLIFENLSRGFGRQGKRTFMAERQYTRMEDWLTAKLAYEGLPSQTYLSKTLAQYTSKTCSNCGFTITSADYDRVLEKLKKTATGWMTTINGKELKVEGQITYYNRYKRQNVVKDLSVELDRLSEESVNNDISSWTKGRQGEALSLLKKRFSHRPVQEKFVCLNCGFETHADEQAALNIARSWLFLRSQEYKKYQTNKTTGNTDKRAFVETWQSFYRKKLKEVWKPAV

SEQ ID NO: 47546 - protein, 978 aa, synthetic construct
  REGION 1..978: note = engineered CasX variant
QEIKRINKIRRRLVKDSNTKKAGKTGPMKTLLVRVMTPDLRERLENLRKKPENIPQPISNTSRANLNKLLTDYTEMKKAILHVYWEEFQKDPVGLMSRVAQPASKKIDQNKLKPEMDEKGNLTTAGFACSQCGQPLFVYKLEQVSEKGKAYTNYFGRCNVAEHEKLILLAQLKPEKDSDEAVTYSLGKFGQRALDFYSIHVTKESTHPVKPLAQIAGNRYASSPVGKALSDACMGTIASFLSKYQDIIIEHQKVVKGNQKRLESLRELAGKENLEYPSVTLPPQPHTKEGVDAYNEVIARVRMWVNLNLWQKLKLSRDDAKPLLRLKGFPSFPLVERQANEVDWWDMVCNVKKLINEKKEDGKVFWQNLAGYKRQEALRPYLSSEEDRKKGKKFARYQLGDLLLHLEKKHGEDWGKVYDEAWERIDKKVEGLSKHIKLEEERRSEDAQSKAALTDWLRAKASFVIEGLKEADKDEFCRCELKLQKWYGDLRGKPFAIEAENSILDISGFSKQYNCAFIWQKDGVKKLNLYLIINYFKGGKLRFKKIKPEAFEANRFYTVINKKSGEIVPMEVNFNFDDPNLIILPLAFGKRQGREFIWNDLLSLETGSLKLANGRVIEKTLYNRRTRQDEPALFVALTFERREVLDSSNIKPMNLIGVDRGENIPAVIALTDPEGCPLSRFKDSLGNPTHILRIGESYKEKQRTIQAKKEVEQRRAGGYSRKYASKAKNLADDMVRNTARDLLYYAVTQDAMLIFENLSRGFGRQGKRTFMAERQYTRMEDWLTAKLAYEGLPSQTYLSKTLAQYTSKTCSNCGFTITSADYDRVLEKLKKTATGWMTTINGKELKVEGQITYYNRYKRQNVVKDLSVELDRLSEESVNNDISSWTKGRQGEALSLLKKRFSHRPVQEKFVCLNCGFETHADEQAALNIARSWLFLRSQEYKKYQTNKTTGNTDKRAFVETWQSFYRKKLKEVWKPAV

SEQ ID NO: 47547 - protein, 978 aa, synthetic construct
  REGION 1..978: note = engineered CasX variant
QEIKRINKIRRRLVKDSNTKKAGKTGPMKTLLVRVMTPDLRERLENLRKKPENIPQPISNTSRANLNKLLTDYTEMKKAILHVYWEEFQKDPVGLMSRVAQPASKKIDQNKLKPEMDEKGNLTTAGFACSQCGQPLFVYKLEQVSEKGKAYTNYFGRCNVAEHEKLILLAQLKPEKDSDEAVTYSLGKFGQRALDFYSIHVTKESTHPVKPLAQIAGNRYASTPVGKALSDACMGTIASFLSKYQDIIIEHQKVVKGNQKRLESLRELAGKENLEYPSVTLPPQPHTKEGVDAYNEVIARVRMWVNLNLWQKLKLSRDDAKPLLRLKGFPSFPLVERQANEVDWWDMVCNVKKLINEKKEDGKVFWQNLAGYKRQEALRPYLSSEEDRKKGKKFARYQLGDLLLHLEKKHGEDWGKVYDEAWERIDKKVEGLSKHIKLEEERRSEDAQSKAALTDWLRAKASFVIEGLKEADKDEFCRCELKLQKWYGDLRGKPFAIEAENSILDISGFSKQYNCAFIWQKDGVKKLNLYLIINYFKGGKLRFKKIKPEAFEANRFYTVINKKSGEIVPMEVNFNFDDPNLIILPLAFGKRQGREFIWNDLLSLETGSLKLANGRVIEKTLYNRRTRQDEPALFVALTFERREVLDSSNIKPMNLIGVDRGENIPAVIALTDPEGCPLSRFKDSLGNPTHILRIGESYKEKQRTIQAKKEVEQRRAGGYSRKYASKAKNLADDMVRNTARDLLYYAVTQDAMLIFENLSRGFGRQGKRTFMAERQYTRMEDWLTAKLAYEGLPSQTYLSKTLAQYTSKTCSNCGFTITSADYDRVLEKLKKTATGWMTTINGKELKVEGQITYYNRYKRQNVVKDLSVELDRLSEESVNNDISSWTKGRQGEALSLLKKRFSHRPVQEKFVCLNCGFETHADEQAALNIARSWLFLRSQEYKKYQTNKTTGNTDKRAFVETWQSFYRKKLKEVWKPAV

SEQ ID NO: 47548 - protein, 978 aa, synthetic construct
  REGION 1..978: note = engineered CasX variant
QEIKRINKIRRRLVKDSNTKKAGKTGPMKTLLVRVMTPDLRERLENLRKKPENIPQPISNTSRANLNKLLTDYTEMKKAILHVYWEEFQKDPVGLMSRVAQPASKKIDQNKLKPEMDEKGNLTTAGFACSQCGQPLFVYKLEQVSEKGKAYTNYFGRCNVAEHEKLILLAQLKPEKDSDEAVTYSLGKFGQRALDFYSIHVTKESTHPVKPLAQIAGNRYASAPVGKALSDACMGTIASFLSKYQDIIIEHQKVVKGNQKRLESLRELAGKENLEYPSVTLPPQPHTKEGVDAYNEVIARVRMWVNLNLWQKLKLSRDDAKPLLRLKGFPSFPLVERQANEVDWWDMVCNVKKLINEKKEDGKVFWQNLAGYKRQEALRPYLSSEEDRKKGKKFARYQLGDLLLHLEKKHGEDWGKVYDEAWERIDKKVEGLSKHIKLEEERRSEDAQSKAALTDWLRAKASFVIEGLKEADKDEFCRCELKLQKWYGDLRGKPFAIEAENSILDISGFSKQYNCAFIWQKDGVKKLNLYLIINYFKGGKLRFKKIKPEAFEANRFYTVINKKSGEIVPMEVNFNFDDPNLIILPLAFGKRQGREFIWNDLLSLETGSLKLANGRVIEKTLYNRRTRQDEPALFVALTFERREVLDSSNIKPMNLIGVDRGENIPAVIALTDPEGCPLSRFKDSLGNPTHILRIGESYKEKQRTIQAKKEVEQRRAGGYSRKYASKAKNLADDMVRNTARDLLYYAVTQDAMLIFENLSRGFGRQGKRTFMAERQYTRMEDWLTAKLAYEGLPSQTYLSKTLAQYTSKTCSNCGFTITSADYDRVLEKLKKTATGWMTTINGKELKVEGQITYYNRYKRQNVVKDLSVELDRLSEESVNNDISSWTKGRQGEALSLLKKRFSHRPVQEKFVCLNCGFETHADEQAALNIARSWLFLRSQEYKKYQTNKTTGNTDKRAFVETWQSFYRKKLKEVWKPAV

SEQ ID NO: 47549 - protein, 978 aa, synthetic construct
  REGION 1..978: note = engineered CasX variant
QEIKRINKIRRRLVKDSNTKKAGKTGPMKTLLVRVMTPDLRERLENLRKKPENIPQPISNTSRANLNKLLTDYTEMKKAILHVYWEEFQKDPVGLMSRVAQPASKKIDQNKLKPEMDEKGNLTTAGFACSQCGQPLFVYKLEQVSEKGKAYTNYFGRCNVAEHEKLILLAQLKPEKDSDEAVTYSLGKFGQRALDFYSIHVTKESTHPVKPLAQIAGNRYASVPVGKALSDACMGTIASFLSKYQDIIIEHQKVVKGNQKRLESLRELAGKENLEYPSVTLPPQPHTKEGVDAYNEVIARVRMWVNLNLWQKLKLSRDDAKPLLRLKGFPSFPLVERQANEVDWWDMVCNVKKLINEKKEDGKVFWQNLAGYKRQEALRPYLSSEEDRKKGKKFARYQLGDLLLHLEKKHGEDWGKVYDEAWERIDKKVEGLSKHIKLEEERRSEDAQSKAALTDWLRAKASFVIEGLKEADKDEFCRCELKLQKWYGDLRGKPFAIEAENSILDISGFSKQYNCAFIWQKDGVKKLNLYLIINYFKGGKLRFKKIKPEAFEANRFYTVINKKSGEIVPMEVNFNFDDPNLIILPLAFGKRQGREFIWNDLLSLETGSLKLANGRVIEKTLYNRRTRQDEPALFVALTFERREVLDSSNIKPMNLIGVDRGENIPAVIALTDPEGCPLSRFKDSLGNPTHILRIGESYKEKQRTIQAKKEVEQRRAGGYSRKYASKAKNLADDMVRNTARDLLYYAVTQDAMLIFENLSRGFGRQGKRTFMAERQYTRMEDWLTAKLAYEGLPSQTYLSKTLAQYTSKTCSNCGFTITSADYDRVLEKLKKTATGWMTTINGKELKVEGQITYYNRYKRQNVVKDLSVELDRLSEESVNNDISSWTKGRQGEALSLLKKRFSHRPVQEKFVCLNCGFETHADEQAALNIARSWLFLRSQEYKKYQTNKTTGNTDKRAFVETWQSFYRKKLKEVWKPAV

SEQ ID NO: 47550 - protein, 978 aa, synthetic construct
  REGION 1..978: note = engineered CasX variant
QEIKRINKIRRRLVKDSNTKKAGKTGPMKTLLVRVMTPDLRERLENLRKKPENIPQPISNTSRANLNKLLTDYTEMKKAILHVYWEEFQKDPVGLMSRVAQPASKKIDQNKLKPEMDEKGNLTTAGFACSQCGQPLFVYKLEQVSEKGKAYTNYFGRCNVAEHEKLIKLAQLKPEKDSDEAVTYSLGKFGQRALDFYSIHVTKESTHPVKPLAQIAGNRYASGPVGKALSDACMGTIASFLSKYQDIIIEHQKVVKGNQKRLESLRELAGKENLEYPSVTLPPQPHTKEGVDAYNEVIARVRMWVNLNLWQKLKLSRDDAKPLLRLKGFPSFPLVERQANEVDWWDMVCNVKKLINEKKEDGKVFWQNLAGYKRQEALRPYLSSEEDRKKGKKFARYQLGDLLLHLEKKHGEDWGKVYDEAWERIDKKVEGLSKHIKLEEERRSEDAQSKAALTDWLRAKASFVIEGLKEADKDEFCRCELKLQKWYGDLRGKPFAIEAENSILDISGFSKQYNCAFIWQKDGVKKLNLYLIINYFKGGKLRFKKIKPEAFEANRFYTVINKKSGEIVPMEVNFNFDDPNLIILPLAFGKRQGREFIWNDLLSLETGSLKLANGRVIEKTLYNRRTRQDEPALFVALTFERREVLDSSNIKPMNLIGVDRGENIPAVIALTDPEGCPLSRFKDSLGNPTHILRIGESYKEKQRTIQAKKEVEQRRAGGYSRKYASKAKNLADDMVRNTARDLLYYAVTQDAMLIFENLSRGFGRQGKRTFMAERQYTRMEDWLTAKLAYEGLPSQTYLSKTLAQYTSKTCSNCGFTITSADYDRVLEKLKKTATGWMTTINGKELKVEGQITYYNRYKRQNVVKDLSVELDRLSEESVNNDISSWTKGRQGEALSLLKKRFSHRPVQEKFVCLNCGFETHADEQAALNIARSWLFLRSQEYKKYQTNKTTGNTDKRAFVETWQSFYRKKLKEVWKPAV

SEQ ID NO: 47551 - protein, 977 aa, synthetic construct
  REGION 1..977: note = engineered CasX variant
QEIKRINKIRRRLVKDSNTKKAGKTGPMKTLLVRVMTPDLRERLENLRKKPENIPQPISNTSRANLNKLLTDYTEMKKAILHVYWEEFQKDPVGLMSRVAQPASKKIDQNKLKPEMDEKGNLTTAGFACSQCGQPLFVYKLEQVSEKGKAYTNYFGRCNVAEHEKLILLAQLKPEKDSDEAVTYSLGKFGQRALDFYSIHVTKESTHPVKPLAQIAGNRYASPVGKALSDACMGTIASFLSKYQDIIIEHQKVVKGNQKRLESLRELAGKENLEYPSVTLPPQPHTKEGVDAYNEVIARVRMWVNLNLWQKLKLSRDDAKPLLRLKGFPSFPLVERQANEVDWWDMVCNVKKLINEKKEDGKVFWQNLAGYKRQEALRPYLSSEEDRKKGKKFARYQLGDLLLHLEKKHGEDWGKVYDEAWERIDKKVEGLSKHIKLEEERRSEDAQSKAALTDWLRAKASFVIEGLKEADKDEFCRCELKLQKWYGDLRGKPFAIEAENSILDISGFSKQYNCAFIWQKDGVKKLNLYLIINYFKGGKLRFKKIKPEAFEANRFYTVINKKSGEIVPMEVNFNFDDPNLIILPLAFGKRQGREFIWNDLLSLETGSLKLANGRVIEKTLYNRRTRQDEPALFVALTFERREVLDSSNIKPMNLIGVDRGENIPAVIALTDPEGCPLSRFKDSLGNPTHILRIGESYKEKQRTIQAKKEVEQRRAGGYSRKYASKAKNLADDMVRNTARDLLYYAVTQDAMLIFENLSRGFGRQGKRTFMAERQYTRMEDWLTAKLAYEGLPSQTYLSKTLAQYTSKTCSNCGFTITSADYDRVLEKLKKTATGWMTTINGKELKVEGQITYYNRYKRQNVVKDLSVELDRLSEESVNNDISSWTKGRQGEALSLLKKRFSHRPVQEKFVCLNCGFETHADEQAALNIARSWLFLRSQEYKKYQTNKTTGNTDKRAFVETWQSFYRKKLKEVWKPAV

SEQ ID NO: 47552 - protein, 978 aa, synthetic construct
  REGION 1..978: note = engineered CasX variant
QEIKRINKIRRRLVKDSNTKKAGKTGPMKTLLVRVMTPDLRERLENLRKKPENIPQPISNTSRANLNKLLTDYTEMKKAILHVYWEEFQKDPVGLMSRVAQPASKKIDQNKLKPEMDEKGNLTTAGFACSQCGQPLFVYKLEQVSEKGKAYTNYFGRCNVAEHEKLILLAQLKPEKDSDEAVTYSLGKFGQRALDFYSIHVTKESTHPVKPLAQIAGNRYASYPVGKALSDACMGTIASFLSKYQDIIIEHQKVVKGNQKRLESLRELAGKENLEYPSVTLPPQPHTKEGVDAYNEVIARVRMWVNLNLWQKLKLSRDDAKPLLRLKGFPSFPLVERQANEVDWWDMVCNVKKLINEKKEDGKVFWQNLAGYKRQEALRPYLSSEEDRKKGKKFARYQLGDLLLHLEKKHGEDWGKVYDEAWERIDKKVEGLSKHIKLEEERRSEDAQSKAALTDWLRAKASFVIEGLKEADKDEFCRCELKLQKWYGDLRGKPFAIEAENSILDISGFSKQYNCAFIWQKDGVKKLNLYLIINYFKGGKLRFKKIKPEAFEANRFYTVINKKSGEIVPMEVNFNFDDPNLIILPLAFGKRQGREFIWNDLLSLETGSLKLANGRVIEKTLYNRRTRQDEPALFVALTFERREVLDSSNIKPMNLIGVDRGENIPAVIALTDPEGCPLSRFKDSLGNPTHILRIGESYKEKQRTIQAKKEVEQRRAGGYSRKYASKAKNLADDMVRNTARDLLYYAVTQDAMLIFENLSRGFGRQGKRTFMAERQYTRMEDWLTAKLAYNGLPSKTYLSKTLAQYTSKTCSNCGFTITSADYDRVLEKLKKTATGWMTTINGKELKVEGQITYYNRYKRQNVVKDLSVELDRLSEESVNNDISSWTKGRQGEALSLLKKRFSHRPVQEKFVCLNCGFETHADEQAALNIARSWLFLRSQEYKKYQTNKTTGNTDKRAFVETWQSFYRKKLKEVWKPAV

SEQ ID NO: 47553 - protein, 978 aa, synthetic construct
  REGION 1..978: note = engineered CasX variant
QEIKRINKIRRRLVKDSNTKKAGKTGPMKTLLVRVMTPDLRERLENLRKKPENIPQPISNTSRANLNKLLTDYTEMKKAILHVYWEEFQKDPVGLMSRVAQPASKKIDQNKLKPEMDEKGNLTTAGFACSQCGQPLFVYKLEQVSEKGKAYTNYFGRCNVAEHEKLILLAQLKPEKDSDEAVTYSLGKFGQRALDFYSIHVTKESTHPVKPLAQIAGNRYASHPVGKALSDACMGTIASFLSKYQDIIIEHQKVVKGNQKRLESLRELAGKENLEYPSVTLPPQPHTKEGVDAYNEVIARVRMWVNLNLWQKLKLSRDDAKPLLRLKGFPSFPLVERQANEVDWWDMVCNVKKLINEKKEDGKVFWQNLAGYKRQEALRPYLSSEEDRKKGKKFARYQLGDLLLHLEKKHGEDWGKVYDEAWERIDKKVEGLSKHIKLEEERRSEDAQSKAALTDWLRAKASFVIEGLKEADKDEFCRCELKLQKWYGDLRGKPFAIEAENSILDISGFSKQYNCAFIWQKDGVKKLNLYLIINYFKGGKLRFKKIKPEAFEANRFYTVINKKSGEIVPMEVNFNFDDPNLIILPLAFGKRQGREFIWNDLLSLETGSLKLANGRVIEKTLYNRRTRQDEPALFVALTFERREVLDSSNIKPMNLIGVDRGENIPAVIALTDPEGCPLSRFKDSLGNPTHILRIGESYKEKQRTIQAKKEVEQRRAGGYSRKYASKAKNLADDMVRNTARDLLYYAVTQDAMLIFENLSRGFGRQGKRTFMAERQYTRMEDWLTAKLAYNGLPSKTYLSKTLAQYTSKTCSNCGFTITSADYDRVLEKLKKTATGWMTTINGKELKVEGQITYYNRYKRQNVVKDLSVELDRLSEESVNNDISSWTKGRQGEALSLLKKRFSHRPVQEKFVCLNCGFETHADEQAALNIARSWLFLRSQEYKKYQTNKTTGNTDKRAFVETWQSFYRKKLKEVWKPAV

SEQ ID NO: 47554 - protein, 978 aa, synthetic construct
  REGION 1..978: note = engineered CasX variant
QEIKRINKIRRRLVKDSNTKKAGKTGPMKTLLVRVMTPDLRERLENLRKKPENIPQPISNTSRANLNKLLTDYTEMKKAILHVYWEEFQKDPVGLMSRVAQPASKKIDQNKLKPEMDEKGNLTTAGFACSQCGQPLFVYKLEQVSEKGKAYTNYFGRCNVAEHEKLILLAQLKPEKDSDEAVTYSLGKFGQRALDFYSIHVTKESTHPVKPLAQIAGNRYASSPVGKALSDACMGTIASFLSKYQDIIIEHQKVVKGNQKRLESLRELAGKENLEYPSVTLPPQPHTKEGVDAYNEVIARVRMWVNLNLWQKLKLSRDDAKPLLRLKGFPSFPLVERQANEVDWWDMVCNVKKLINEKKEDGKVFWQNLAGYKRQEALRPYLSSEEDRKKGKKFARYQLGDLLLHLEKKHGEDWGKVYDEAWERIDKKVEGLSKHIKLEEERRSEDAQSKAALTDWLRAKASFVIEGLKEADKDEFCRCELKLQKWYGDLRGKPFAIEAENSILDISGFSKQYNCAFIWQKDGVKKLNLYLIINYFKGGKLRFKKIKPEAFEANRFYTVINKKSGEIVPMEVNFNFDDPNLIILPLAFGKRQGREFIWNDLLSLETGSLKLANGRVIEKTLYNRRTRQDEPALFVALTFERREVLDSSNIKPMNLIGVDRGENIPAVIALTDPEGCPLSRFKDSLGNPTHILRIGESYKEKQRTIQAKKEVEQRRAGGYSRKYASKAKNLADDMVRNTARDLLYYAVTQDAMLIFENLSRGFGRQGKRTFMAERQYTRMEDWLTAKLAYNGLPSKTYLSKTLAQYTSKTCSNCGFTITSADYDRVLEKLKKTATGWMTTINGKELKVEGQITYYNRYKRQNVVKDLSVELDRLSEESVNNDISSWTKGRQGEALSLLKKRFSHRPVQEKFVCLNCGFETHADEQAALNIARSWLFLRSQEYKKYQTNKTTGNTDKRAFVETWQSFYRKKLKEVWKPAV

SEQ ID NO: 47555 - protein, 978 aa, synthetic construct
  REGION 1..978: note = engineered CasX variant
QEIKRINKIRRRLVKDSNTKKAGKTGPMKTLLVRVMTPDLRERLENLRKKPENIPQPISNTSRANLNKLLTDYTEMKKAILHVYWEEFQKDPVGLMSRVAQPASKKIDQNKLKPEMDEKGNLTTAGFACSQCGQPLFVYKLEQVSEKGKAYTNYFGRCNVAEHEKLILLAQLKPEKDSDEAVTYSLGKFGQRALDFYSIHVTKESTHPVKPLAQIAGNRYASTPVGKALSDACMGTIASFLSKYQDIIIEHQKVVKGNQKRLESLRELAGKENLEYPSVTLPPQPHTKEGVDAYNEVIARVRMWVNLNLWQKLKLSRDDAKPLLRLKGFPSFPLVERQANEVDWWDMVCNVKKLINEKKEDGKVFWQNLAGYKRQEALRPYLSSEEDRKKGKKFARYQLGDLLLHLEKKHGEDWGKVYDEAWERIDKKVEGLSKHIKLEEERRSEDAQSKAALTDWLRAKASFVIEGLKEADKDEFCRCELKLQKWYGDLRGKPFAIEAENSILDISGFSKQYNCAFIWQKDGVKKLNLYLIINYFKGGKLRFKKIKPEAFEANRFYTVINKKSGEIVPMEVNFNFDDPNLIILPLAFGKRQGREFIWNDLLSLETGSLKLANGRVIEKTLYNRRTRQDEPALFVALTFERREVLDSSNIKPMNLIGVDRGENIPAVIALTDPEGCPLSRFKDSLGNPTHILRIGESYKEKQRTIQAKKEVEQRRAGGYSRKYASKAKNLADDMVRNTARDLLYYAVTQDAMLIFENLSRGFGRQGKRTFMAERQYTRMEDWLTAKLAYNGLPSKTYLSKTLAQYTSKTCSNCGFTITSADYDRVLEKLKKTATGWMTTINGKELKVEGQITYYNRYKRQNVVKDLSVELDRLSEESVNNDISSWTKGRQGEALSLLKKRFSHRPVQEKFVCLNCGFETHADEQAALNIARSWLFLRSQEYKKYQTNKTTGNTDKRAFVETWQSFYRKKLKEVWKPAV

SEQ ID NO: 47556 - protein, 978 aa, synthetic construct
  REGION 1..978: note = engineered CasX variant
QEIKRINKIRRRLVKDSNTKKAGKTGPMKTLLVRVMTPDLRERLENLRKKPENIPQPISNTSRANLNKLLTDYTEMKKAILHVYWEEFQKDPVGLMSRVAQPASKKIDQNKLKPEMDEKGNLTTAGFACSQCGQPLFVYKLEQVSEKGKAYTNYFGRCNVAEHEKLILLAQLKPEKDSDEAVTYSLGKFGQRALDFYSIHVTKESTHPVKPLAQIAGNRYASAPVGKALSDACMGTIASFLSKYQDIIIEHQKVVKGNQKRLESLRELAGKENLEYPSVTLPPQPHTKEGVDAYNEVIARVRMWVNLNLWQKLKLSRDDAKPLLRLKGFPSFPLVERQANEVDWWDMVCNVKKLINEKKEDGKVFWQNLAGYKRQEALRPYLSSEEDRKKGKKFARYQLGDLLLHLEKKHGEDWGKVYDEAWERIDKKVEGLSKHIKLEEERRSEDAQSKAALTDWLRAKASFVIEGLKEADKDEFCRCELKLQKWYGDLRGKPFAIEAENSILDISGFSKQYNCAFIWQKDGVKKLNLYLIINYFKGGKLRFKKIKPEAFEANRFYTVINKKSGEIVPMEVNFNFDDPNLIILPLAFGKRQGREFIWNDLLSLETGSLKLANGRVIEKTLYNRRTRQDEPALFVALTFERREVLDSSNIKPMNLIGVDRGENIPAVIALTDPEGCPLSRFKDSLGNPTHILRIGESYKEKQRTIQAKKEVEQRRAGGYSRKYASKAKNLADDMVRNTARDLLYYAVTQDAMLIFENLSRGFGRQGKRTFMAERQYTRMEDWLTAKLAYNGLPSKTYLSKTLAQYTSKTCSNCGFTITSADYDRVLEKLKKTATGWMTTINGKELKVEGQITYYNRYKRQNVVKDLSVELDRLSEESVNNDISSWTKGRQGEALSLLKKRFSHRPVQEKFVCLNCGFETHADEQAALNIARSWLFLRSQEYKKYQTNKTTGNTDKRAFVETWQSFYRKKLKEVWKPAV

SEQ ID NO: 47557 - protein, 978 aa, synthetic construct
  REGION 1..978: note = engineered CasX variant
QEIKRINKIRRRLVKDSNTKKAGKTGPMKTLLVRVMTPDLRERLENLRKKPENIPQPISNTSRANLNKLLTDYTEMKKAILHVYWEEFQKDPVGLMSRVAQPASKKIDQNKLKPEMDEKGNLTTAGFACSQCGQPLFVYKLEQVSEKGKAYTNYFGRCNVAEHEKLILLAQLKPEKDSDEAVTYSLGKFGQRALDFYSIHVTKESTHPVKPLAQIAGNRYASVPVGKALSDACMGTIASFLSKYQDIIIEHQKVVKGNQKRLESLRELAGKENLEYPSVTLPPQPHTKEGVDAYNEVIARVRMWVNLNLWQKLKLSRDDAKPLLRLKGFPSFPLVERQANEVDWWDMVCNVKKLINEKKEDGKVFWQNLAGYKRQEALRPYLSSEEDRKKGKKFARYQLGDLLLHLEKKHGEDWGKVYDEAWERIDKKVEGLSKHIKLEEERRSEDAQSKAALTDWLRAKASFVIEGLKEADKDEFCRCELKLQKWYGDLRGKPFAIEAENSILDISGFSKQYNCAFIWQKDGVKKLNLYLIINYFKGGKLRFKKIKPEAFEANRFYTVINKKSGEIVPMEVNFNFDDPNLIILPLAFGKRQGREFIWNDLLSLETGSLKLANGRVIEKTLYNRRTRQDEPALFVALTFERREVLDSSNIKPMNLIGVDRGENIPAVIALTDPEGCPLSRFKDSLGNPTHILRIGESYKEKQRTIQAKKEVEQRRAGGYSRKYASKAKNLADDMVRNTARDLLYYAVTQDAMLIFENLSRGFGRQGKRTFMAERQYTRMEDWLTAKLAYNGLPSKTYLSKTLAQYTSKTCSNCGFTITSADYDRVLEKLKKTATGWMTTINGKELKVEGQITYYNRYKRQNVVKDLSVELDRLSEESVNNDISSWTKGRQGEALSLLKKRFSHRPVQEKFVCLNCGFETHADEQAALNIARSWLFLRSQEYKKYQTNKTTGNTDKRAFVETWQSFYRKKLKEVWKPAV

SEQ ID NO: 47558 - protein, 978 aa, synthetic construct
  REGION 1..978: note = engineered CasX variant
QEIKRINKIRRRLVKDSNTKKAGKTGPMKTLLVRVMTPDLRERLENLRKKPENIPQPISNTSRANLNKLLTDYTEMKKAILHVYWEEFQKDPVGLMSRVAQPASKKIDQNKLKPEMDEKGNLTTAGFACSQCGQPLFVYKLEQVSEKGKAYTNYFGRCNVAEHEKLIKLAQLKPEKDSDEAVTYSLGKFGQRALDFYSIHVTKESTHPVKPLAQIAGNRYASGPVGKALSDACMGTIASFLSKYQDIIIEHQKVVKGNQKRLESLRELAGKENLEYPSVTLPPQPHTKEGVDAYNEVIARVRMWVNLNLWQKLKLSRDDAKPLLRLKGFPSFPLVERQANEVDWWDMVCNVKKLINEKKEDGKVFWQNLAGYKRQEALRPYLSSEEDRKKGKKFARYQLGDLLLHLEKKHGEDWGKVYDEAWERIDKKVEGLSKHIKLEEERRSEDAQSKAALTDWLRAKASFVIEGLKEADKDEFCRCELKLQKWYGDLRGKPFAIEAENSILDISGFSKQYNCAFIWQKDGVKKLNLYLIINYFKGGKLRFKKIKPEAFEANRFYTVINKKSGEIVPMEVNFNFDDPNLIILPLAFGKRQGREFIWNDLLSLETGSLKLANGRVIEKTLYNRRTRQDEPALFVALTFERREVLDSSNIKPMNLIGVDRGENIPAVIALTDPEGCPLSRFKDSLGNPTHILRIGESYKEKQRTIQAKKEVEQRRAGGYSRKYASKAKNLADDMVRNTARDLLYYAVTQDAMLIFENLSRGFGRQGKRTFMAERQYTRMEDWLTAKLAYNGLPSKTYLSKTLAQYTSKTCSNCGFTITSADYDRVLEKLKKTATGWMTTINGKELKVEGQITYYNRYKRQNVVKDLSVELDRLSEESVNNDISSWTKGRQGEALSLLKKRFSHRPVQEKFVCLNCGFETHADEQAALNIARSWLFLRSQEYKKYQTNKTTGNTDKRAFVETWQSFYRKKLKEVWKPAV

SEQ ID NO: 47559 - protein, 977 aa, synthetic construct
  REGION 1..977: note = engineered CasX variant
QEIKRINKIRRRLVKDSNTKKAGKTGPMKTLLVRVMTPDLRERLENLRKKPENIPQPISNTSRANLNKLLTDYTEMKKAILHVYWEEFQKDPVGLMSRVAQPASKKIDQNKLKPEMDEKGNLTTAGFACSQCGQPLFVYKLEQVSEKGKAYTNYFGRCNVAEHEKLILLAQLKPEKDSDEAVTYSLGKFGQRALDFYSIHVTKESTHPVKPLAQIAGNRYASPVGKALSDACMGTIASFLSKYQDIIIEHQKVVKGNQKRLESLRELAGKENLEYPSVTLPPQPHTKEGVDAYNEVIARVRMWVNLNLWQKLKLSRDDAKPLLRLKGFPSFPLVERQANEVDWWDMVCNVKKLINEKKEDGKVFWQNLAGYKRQEALRPYLSSEEDRKKGKKFARYQLGDLLLHLEKKHGEDWGKVYDEAWERIDKKVEGLSKHIKLEEERRSEDAQSKAALTDWLRAKASFVIEGLKEADKDEFCRCELKLQKWYGDLRGKPFAIEAENSILDISGFSKQYNCAFIWQKDGVKKLNLYLIINYFKGGKLRFKKIKPEAFEANRFYTVINKKSGEIVPMEVNFNFDDPNLIILPLAFGKRQGREFIWNDLLSLETGSLKLANGRVIEKTLYNRRTRQDEPALFVALTFERREVLDSSNIKPMNLIGVDRGENIPAVIALTDPEGCPLSRFKDSLGNPTHILRIGESYKEKQRTIQAKKEVEQRRAGGYSRKYASKAKNLADDMVRNTARDLLYYAVTQDAMLIFENLSRGFGRQGKRTFMAERQYTRMEDWLTAKLAYNGLPSKTYLSKTLAQYTSKTCSNCGFTITSADYDRVLEKLKKTATGWMTTINGKELKVEGQITYYNRYKRQNVVKDLSVELDRLSEESVNNDISSWTKGRQGEALSLLKKRFSHRPVQEKFVCLNCGFETHADEQAALNIARSWLFLRSQEYKKYQTNKTTGNTDKRAFVETWQSFYRKKLKEVWKPAV

SEQ ID NO: 47560 - protein, 978 aa, synthetic construct
  REGION 1..978: note = engineered CasX variant
QEIKRINKIRRRLVKDSNTKKAGKTGPMKTLLVRVMTPDLRERLENLRKKPENIPQPISNTSRANLNKLLTDYTEMKKAILHVYWEEFQKDPVGLMSRVAQPASKKIDQNKLKPEMDEKGNLTTAGFACSQCGQPLFVYKLEQVSEKGKAYTNYFGRCNVAEHEKLIQLAQLKPEKDSDEAVTYSLGKFGQRALDFYSIHVTKESTHPVKPLAQIAGNRYASYPVGKALSDACMGTIASFLSKYQDIIIEHQKVVKGNQKRLESLRELAGKENLEYPSVTLPPQPHTKEGVDAYNEVIARVRMWVNLNLWQKLKLSRDDAKPLLRLKGFPSFPLVERQANEVDWWDMVCNVKKLINEKKEDGKVFWQNLAGYKRQEALRPYLSSEEDRKKGKKFARYQLGDLLLHLEKKHGEDWGKVYDEAWERIDKKVEGLSKHIKLEEERRSEDAQSKAALTDWLRAKASFVIEGLKEADKDEFCRCELKLQKWYGDLRGKPFAIEAENSILDISGFSKQYNCAFIWQKDGVKKLNLYLIINYFKGGKLRFKKIKPEAFEANRFYTVINKKSGEIVPMEVNFNFDDPNLIILPLAFGKRQGREFIWNDLLSLETGSLKLANGRVIEKTLYNRRTRQDEPALFVALTFERREVLDSSNIKPMNLIGVDRGENIPAVIALTDPEGCPLSRFKDSLGNPTHILRIGESYKEKQRTIQAKKEVEQRRAGGYSRKYASKAKNLADDMVRNTARDLLYYAVTQDAMLIFENLSRGFGRQGKRTFMAERQYTRMEDWLTAKLAYEGLPSKTYLSKTLAQYTSKTCSNCGFTITSADYDRVLEKLKKTATGWMTTINGKELKVEGQITYYNRYKRQNVVKDLSVELDRLSEESVNNDISSWTKGRQGEALSLLKKRFSHRPVQEKFVCLNCGFETHADEQAALNIARSWLFLRSQEYKKYQTNKTTGNTDKRAFVETWQSFYRKKLKEVWKPAV

SEQ ID NO: 47561 - protein, 978 aa, synthetic construct
  REGION 1..978: note = engineered CasX variant
QEIKRINKIRRRLVKDSNTKKAGKTGPMKTLLVRVMTPDLRERLENLRKKPENIPQPISNTSRANLNKLLTDYTEMKKAILHVYWEEFQKDPVGLMSRVAQPASKKIDQNKLKPEMDEKGNLTTAGFACSQCGQPLFVYKLEQVSEKGKAYTNYFGRCNVAEHEKLIQLAQLKPEKDSDEAVTYSLGKFGQRALDFYSIHVTKESTHPVKPLAQIAGNRYASHPVGKALSDACMGTIASFLSKYQDIIIEHQKVVKGNQKRLESLRELAGKENLEYPSVTLPPQPHTKEGVDAYNEVIARVRMWVNLNLWQKLKLSRDDAKPLLRLKGFPSFPLVERQANEVDWWDMVCNVKKLINEKKEDGKVFWQNLAGYKRQEALRPYLSSEEDRKKGKKFARYQLGDLLLHLEKKHGEDWGKVYDEAWERIDKKVEGLSKHIKLEEERRSEDAQSKAALTDWLRAKASFVIEGLKEADKDEFCRCELKLQKWYGDLRGKPFAIEAENSILDISGFSKQYNCAFIWQKDGVKKLNLYLIINYFKGGKLRFKKIKPEAFEANRFYTVINKKSGEIVPMEVNFNFDDPNLIILPLAFGKRQGREFIWNDLLSLETGSLKLANGRVIEKTLYNRRTRQDEPALFVALTFERREVLDSSNIKPMNLIGVDRGENIPAVIALTDPEGCPLSRFKDSLGNPTHILRIGESYKEKQRTIQAKKEVEQRRAGGYSRKYASKAKNLADDMVRNTARDLLYYAVTQDAMLIFENLSRGFGRQGKRTFMAERQYTRMEDWLTAKLAYEGLPSKTYLSKTLAQYTSKTCSNCGFTITSADYDRVLEKLKKTATGWMTTINGKELKVEGQITYYNRYKRQNVVKDLSVELDRLSEESVNNDISSWTKGRQGEALSLLKKRFSHRPVQEKFVCLNCGFETHADEQAALNIARSWLFLRSQEYKKYQTNKTTGNTDKRAFVETWQSFYRKKLKEVWKPAV

SEQ ID NO: 47562 - protein, 978 aa, synthetic construct
  REGION 1..978: note = engineered CasX variant
QEIKRINKIRRRLVKDSNTKKAGKTGPMKTLLVRVMTPDLRERLENLRKKPENIPQPISNTSRANLNKLLTDYTEMKKAILHVYWEEFQKDPVGLMSRVAQPASKKIDQNKLKPEMDEKGNLTTAGFACSQCGQPLFVYKLEQVSEKGKAYTNYFGRCNVAEHEKLIQLAQLKPEKDSDEAVTYSLGKFGQRALDFYSIHVTKESTHPVKPLAQIAGNRYASSPVGKALSDACMGTIASFLSKYQDIIIEHQKVVKGNQKRLESLRELAGKENLEYPSVTLPPQPHTKEGVDAYNEVIARVRMWVNLNLWQKLKLSRDDAKPLLRLKGFPSFPLVERQANEVDWWDMVCNVKKLINEKKEDGKVFWQNLAGYKRQEALRPYLSSEEDRKKGKKFARYQLGDLLLHLEKKHGEDWGKVYDEAWERIDKKVEGLSKHIKLEEERRSEDAQSKAALTDWLRAKASFVIEGLKEADKDEFCRCELKLQKWYGDLRGKPFAIEAENSILDISGFSKQYNCAFIWQKDGVKKLNLYLIINYFKGGKLRFKKIKPEAFEANRFYTVINKKSGEIVPMEVNFNFDDPNLIILPLAFGKRQGREFIWNDLLSLETGSLKLANGRVIEKTLYNRRTRQDEPALFVALTFERREVLDSSNIKPMNLIGVDRGENIPAVIALTDPEGCPLSRFKDSLGNPTHILRIGESYKEKQRTIQAKKEVEQRRAGGYSRKYASKAKNLADDMVRNTARDLLYYAVTQDAMLIFENLSRGFGRQGKRTFMAERQYTRMEDWLTAKLAYEGLPSKTYLSKTLAQYTSKTCSNCGFTITSADYDRVLEKLKKTATGWMTTINGKELKVEGQITYYNRYKRQNVVKDLSVELDRLSEESVNNDISSWTKGRQGEALSLLKKRFSHRPVQEKFVCLNCGFETHADEQAALNIARSWLFLRSQEYKKYQTNKTTGNTDKRAFVETWQSFYRKKLKEVWKPAV

SEQ ID NO: 47563 - protein, 978 aa, synthetic construct
  REGION 1..978: note = engineered CasX variant
QEIKRINKIRRRLVKDSNTKKAGKTGPMKTLLVRVMTPDLRERLENLRKKPENIPQPISNTSRANLNKLLTDYTEMKKAILHVYWEEFQKDPVGLMSRVAQPASKKIDQNKLKPEMDEKGNLTTAGFACSQCGQPLFVYKLEQVSEKGKAYTNYFGRCNVAEHEKLIQLAQLKPEKDSDEAVTYSLGKFGQRALDFYSIHVTKESTHPVKPLAQIAGNRYASTPVGKALSDACMGTIASFLSKYQDIIIEHQKVVKGNQKRLESLRELAGKENLEYPSVTLPPQPHTKEGVDAYNEVIARVRMWVNLNLWQKLKLSRDDAKPLLRLKGFPSFPLVERQANEVDWWDMVCNVKKLINEKKEDGKVFWQNLAGYKRQEALRPYLSSEEDRKKGKKFARYQLGDLLLHLEKKHGEDWGKVYDEAWERIDKKVEGLSKHIKLEEERRSEDAQSKAALTDWLRAKASFVIEGLKEADKDEFCRCELKLQKWYGDLRGKPFAIEAENSILDISGFSKQYNCAFIWQKDGVKKLNLYLIINYFKGGKLRFKKIKPEAFEANRFYTVINKKSGEIVPMEVNFNFDDPNLIILPLAFGKRQGREFIWNDLLSLETGSLKLANGRVIEKTLYNRRTRQDEPALFVALTFERREVLDSSNIKPMNLIGVDRGENIPAVIALTDPEGCPLSRFKDSLGNPTHILRIGESYKEKQRTIQAKKEVEQRRAGGYSRKYASKAKNLADDMVRNTARDLLYYAVTQDAMLIFENLSRGFGRQGKRTFMAERQYTRMEDWLTAKLAYEGLPSKTYLSKTLAQYTSKTCSNCGFTITSADYDRVLEKLKKTATGWMTTINGKELKVEGQITYYNRYKRQNVVKDLSVELDRLSEESVNNDISSWTKGRQGEALSLLKKRFSHRPVQEKFVCLNCGFETHADEQAALNIARSWLFLRSQEYKKYQTNKTTGNTDKRAFVETWQSFYRKKLKEVWKPAV

SEQ ID NO: 47564 - protein, 978 aa, synthetic construct
  REGION 1..978: note = engineered CasX variant
QEIKRINKIRRRLVKDSNTKKAGKTGPMKTLLVRVMTPDLRERLENLRKKPENIPQPISNTSRANLNKLLTDYTEMKKAILHVYWEEFQKDPVGLMSRVAQPASKKIDQNKLKPEMDEKGNLTTAGFACSQCGQPLFVYKLEQVSEKGKAYTNYFGRCNVAEHEKLIQLAQLKPEKDSDEAVTYSLGKFGQRALDFYSIHVTKESTHPVKPLAQIAGNRYASAPVGKALSDACMGTIASFLSKYQDIIIEHQKVVKGNQKRLESLRELAGKENLEYPSVTLPPQPHTKEGVDAYNEVIARVRMWVNLNLWQKLKLSRDDAKPLLRLKGFPSFPLVERQANEVDWWDMVCNVKKLINEKKEDGKVFWQNLAGYKRQEALRPYLSSEEDRKKGKKFARYQLGDLLLHLEKKHGEDWGKVYDEAWERIDKKVEGLSKHIKLEEERRSEDAQSKAALTDWLRAKASFVIEGLKEADKDEFCRCELKLQKWYGDLRGKPFAIEAENSILDISGFSKQYNCAFIWQKDGVKKLNLYLIINYFKGGKLRFKKIKPEAFEANRFYTVINKKSGEIVPMEVNFNFDDPNLIILPLAFGKRQGREFIWNDLLSLETGSLKLANGRVIEKTLYNRRTRQDEPALFVALTFERREVLDSSNIKPMNLIGVDRGENIPAVIALTDPEGCPLSRFKDSLGNPTHILRIGESYKEKQRTIQAKKEVEQRRAGGYSRKYASKAKNLADDMVRNTARDLLYYAVTQDAMLIFENLSRGFGRQGKRTFMAERQYTRMEDWLTAKLAYEGLPSKTYLSKTLAQYTSKTCSNCGFTITSADYDRVLEKLKKTATGWMTTINGKELKVEGQITYYNRYKRQNVVKDLSVELDRLSEESVNNDISSWTKGRQGEALSLLKKRFSHRPVQEKFVCLNCGFETHADEQAALNIARSWLFLRSQEYKKYQTNKTTGNTDKRAFVETWQSFYRKKLKEVWKPAV

SEQ ID NO: 47565 - protein, 978 aa, synthetic construct
  REGION 1..978: note = engineered CasX variant
QEIKRINKIRRRLVKDSNTKKAGKTGPMKTLLVRVMTPDLRERLENLRKKPENIPQPISNTSRANLNKLLTDYTEMKKAILHVYWEEFQKDPVGLMSRVAQPASKKIDQNKLKPEMDEKGNLTTAGFACSQCGQPLFVYKLEQVSEKGKAYTNYFGRCNVAEHEKLIQLAQLKPEKDSDEAVTYSLGKFGQRALDFYSIHVTKESTHPVKPLAQIAGNRYASVPVGKALSDACMGTIASFLSKYQDIIIEHQKVVKGNQKRLESLRELAGKENLEYPSVTLPPQPHTKEGVDAYNEVIARVRMWVNLNLWQKLKLSRDDAKPLLRLKGFPSFPLVERQANEVDWWDMVCNVKKLINEKKEDGKVFWQNLAGYKRQEALRPYLSSEEDRKKGKKFARYQLGDLLLHLEKKHGEDWGKVYDEAWERIDKKVEGLSKHIKLEEERRSEDAQSKAALTDWLRAKASFVIEGLKEADKDEFCRCELKLQKWYGDLRGKPFAIEAENSILDISGFSKQYNCAFIWQKDGVKKLNLYLIINYFKGGKLRFKKIKPEAFEANRFYTVINKKSGEIVPMEVNFNFDDPNLIILPLAFGKRQGREFIWNDLLSLETGSLKLANGRVIEKTLYNRRTRQDEPALFVALTFERREVLDSSNIKPMNLIGVDRGENIPAVIALTDPEGCPLSRFKDSLGNPTHILRIGESYKEKQRTIQAKKEVEQRRAGGYSRKYASKAKNLADDMVRNTARDLLYYAVTQDAMLIFENLSRGFGRQGKRTFMAERQYTRMEDWLTAKLAYEGLPSKTYLSKTLAQYTSKTCSNCGFTITSADYDRVLEKLKKTATGWMTTINGKELKVEGQITYYNRYKRQNVVKDLSVELDRLSEESVNNDISSWTKGRQGEALSLLKKRFSHRPVQEKFVCLNCGFETHADEQAALNIARSWLFLRSQEYKKYQTNKTTGNTDKRAFVETWQSFYRKKLKEVWKPAV

SEQ ID NO: 47566 - protein, 979 aa, synthetic construct
  REGION 1..979: note = engineered CasX variant
QEIKRINKIRRRLVKDSNTKKAGKTGPMKTLLVRVMTPDLRERLENLRKKPENIPQPISNTSRANLNKLLTDYTEMKKAILHVYWEEFQKDPVGLMSRVAQPASKKIDQNKLKPEMDEKGNLTTAGFACSQCGQPLFVYKLEQVSEKGKAYTNYFGRCNVAEHEKLIQKLAQLKPEKDSDEAVTYSLGKFGQRALDFYSIHVTKESTHPVKPLAQIAGNRYASGPVGKALSDACMGTIASFLSKYQDIIIEHQKVVKGNQKRLESLRELAGKENLEYPSVTLPPQPHTKEGVDAYNEVIARVRMWVNLNLWQKLKLSRDDAKPLLRLKGFPSFPLVERQANEVDWWDMVCNVKKLINEKKEDGKVFWQNLAGYKRQEALRPYLSSEEDRKKGKKFARYQLGDLLLHLEKKHGEDWGKVYDEAWERIDKKVEGLSKHIKLEEERRSEDAQSKAALTDWLRAKASFVIEGLKEADKDEFCRCELKLQKWYGDLRGKPFAIEAENSILDISGFSKQYNCAFIWQKDGVKKLNLYLIINYFKGGKLRFKKIKPEAFEANRFYTVINKKSGEIVPMEVNFNFDDPNLIILPLAFGKRQGREFIWNDLLSLETGSLKLANGRVIEKTLYNRRTRQDEPALFVALTFERREVLDSSNIKPMNLIGVDRGENIPAVIALTDPEGCPLSRFKDSLGNPTHILRIGESYKEKQRTIQAKKEVEQRRAGGYSRKYASKAKNLADDMVRNTARDLLYYAVTQDAMLIFENLSRGFGRQGKRTFMAERQYTRMEDWLTAKLAYEGLPSKTYLSKTLAQYTSKTCSNCGFTITSADYDRVLEKLKKTATGWMTTINGKELKVEGQITYYNRYKRQNVVKDLSVELDRLSEESVNNDISSWTKGRQGEALSLLKKRFSHRPVQEKFVCLNCGFETHADEQAALNIARSWLFLRSQEYKKYQTNKTTGNTDKRAFVETWQSFYRKKLKEVWKPAV

SEQ ID NO: 47567 - protein, 977 aa, synthetic construct
  REGION 1..977: note = engineered CasX variant
QEIKRINKIRRRLVKDSNTKKAGKTGPMKTLLVRVMTPDLRERLENLRKKPENIPQPISNTSRANLNKLLTDYTEMKKAILHVYWEEFQKDPVGLMSRVAQPASKKIDQNKLKPEMDEKGNLTTAGFACSQCGQPLFVYKLEQVSEKGKAYTNYFGRCNVAEHEKLIQLAQLKPEKDSDEAVTYSLGKFGQRALDFYSIHVTKESTHPVKPLAQIAGNRYASPVGKALSDACMGTIASFLSKYQDIIIEHQKVVKGNQKRLESLRELAGKENLEYPSVTLPPQPHTKEGVDAYNEVIARVRMWVNLNLWQKLKLSRDDAKPLLRLKGFPSFPLVERQANEVDWWDMVCNVKKLINEKKEDGKVFWQNLAGYKRQEALRPYLSSEEDRKKGKKFARYQLGDLLLHLEKKHGEDWGKVYDEAWERIDKKVEGLSKHIKLEEERRSEDAQSKAALTDWLRAKASFVIEGLKEADKDEFCRCELKLQKWYGDLRGKPFAIEAENSILDISGFSKQYNCAFIWQKDGVKKLNLYLIINYFKGGKLRFKKIKPEAFEANRFYTVINKKSGEIVPMEVNFNFDDPNLIILPLAFGKRQGREFIWNDLLSLETGSLKLANGRVIEKTLYNRRTRQDEPALFVALTFERREVLDSSNIKPMNLIGVDRGENIPAVIALTDPEGCPLSRFKDSLGNPTHILRIGESYKEKQRTIQAKKEVEQRRAGGYSRKYASKAKNLADDMVRNTARDLLYYAVTQDAMLIFENLSRGFGRQGKRTFMAERQYTRMEDWLTAKLAYEGLPSKTYLSKTLAQYTSKTCSNCGFTITSADYDRVLEKLKKTATGWMTTINGKELKVEGQITYYNRYKRQNVVKDLSVELDRLSEESVNNDISSWTKGRQGEALSLLKKRFSHRPVQEKFVCLNCGFETHADEQAALNIARSWLFLRSQEYKKYQTNKTTGNTDKRAFVETWQSFYRKKLKEVWKPAV

SEQ ID NO: 47568 - protein, 978 aa, synthetic construct
  REGION 1..978: note = engineered CasX variant
QEIKRINKIRRRLVKDSNTKKAGKTGPMKTLLVRVMTPDLRERLENLRKKPENIPQPISNTSRANLNKLLTDYTEMKKAILHVYWEEFQKDPVGLMSRVAQPASKKIDQNKLKPEMDEKGNLTTAGFACSQCGQPLFVYKLEQVSEKGKAYTNYFGRCNVAEHEKLILLAQLKPEKDSDEAVTYSLGKFGQRALDFYSIHVTKESTHPVKPLAQIAGNRYASYPVGKALSDACMGTIASFLSKYQDIIIEHQKVVKGNQKRLESLRELAGKENLEYPSVTLPPQPHTKEGVDAYNEVIARVRMWVNLNLWQKLKLSRDDAKPLLRLKGFPSFPLVERQANEVDWWDMVCNVKKLINEKKEDGKVFWQNLAIYKRQEALRPYLSSEEDRKKGKKFARYQLGDLLLHLEKKHGEDWGKVYDEAWERIDKKVEGLSKHIKLEEERRSEDAQSKAALTDWLRAKASFVIEGLKEADKDEFCRCELKLQKWYGDLRGKPFAIEAENSILDISGFSKQYNCAFIWQKDGVKKLNLYLIINYFKGGKLRFKKIKPEAFEANRFYTVINKKSGEIVPMEVNFNFDDPNLIILPLAFGKRQGREFIWNDLLSLETGSLKLANGRVIEKTLYNRRTRQDEPALFVALTFERREVLDSSNIKPMNLIGVDRGENIPAVIALTDPEGCPLSRFKDSLGNPTHILRIGESYKEKQRTIQAKKEVEQRRAGGYSRKYASKAKNLADDMVRNTARDLLYYAVTQDAMLIFENLSRGFGRQGKRTFMAERQYTRMEDWLTAKLAYEGLPSKTYLSKTLAQYTSKTCSNCGFTITSADYDRVLEKLKKTATGWMTTINGKELKVEGQITYYNRYKRQNVVKDLSVELDRLSEESVNNDISSWTKGRQGEALSLLKKRFSHRPVQEKFVCLNCGFETHADEQAALNIARSWLFLRSQEYKKYQTNKTTGNTDKRAFVETWQSFYRKKLKEVWKPAV

SEQ ID NO: 47569 - protein, 978 aa, synthetic construct
  REGION 1..978: note = engineered CasX variant
QEIKRINKIRRRLVKDSNTKKAGKTGPMKTLLVRVMTPDLRERLENLRKKPENIPQPISNTSRANLNKLLTDYTEMKKAILHVYWEEFQKDPVGLMSRVAQPASKKIDQNKLKPEMDEKGNLTTAGFACSQCGQPLFVYKLEQVSEKGKAYTNYFGRCNVAEHEKLILLAQLKPEKDSDEAVTYSLGKFGQRALDFYSIHVTKESTHPVKPLAQIAGNRYASHPVGKALSDACMGTIASFLSKYQDIIIEHQKVVKGNQKRLESLRELAGKENLEYPSVTLPPQPHTKEGVDAYNEVIARVRMWVNLNLWQKLKLSRDDAKPLLRLKGFPSFPLVERQANEVDWWDMVCNVKKLINEKKEDGKVFWQNLAIYKRQEALRPYLSSEEDRKKGKKFARYQLGDLLLHLEKKHGEDWGKVYDEAWERIDKKVEGLSKHIKLEEERRSEDAQSKAALTDWLRAKASFVIEGLKEADKDEFCRCELKLQKWYGDLRGKPFAIEAENSILDISGFSKQYNCAFIWQKDGVKKLNLYLIINYFKGGKLRFKKIKPEAFEANRFYTVINKKSGEIVPMEVNFNFDDPNLIILPLAFGKRQGREFIWNDLLSLETGSLKLANGRVIEKTLYNRRTRQDEPALFVALTFERREVLDSSNIKPMNLIGVDRGENIPAVIALTDPEGCPLSRFKDSLGNPTHILRIGESYKEKQRTIQAKKEVEQRRAGGYSRKYASKAKNLADDMVRNTARDLLYYAVTQDAMLIFENLSRGFGRQGKRTFMAERQYTRMEDWLTAKLAYEGLPSKTYLSKTLAQYTSKTCSNCGFTITSADYDRVLEKLKKTATGWMTTINGKELKVEGQITYYNRYKRQNVVKDLSVELDRLSEESVNNDISSWTKGRQGEALSLLKKRFSHRPVQEKFVCLNCGFETHADEQAALNIARSWLFLRSQEYKKYQTNKTTGNTDKRAFVETWQSFYRKKLKEVWKPAV

SEQ ID NO: 47570 - protein, 978 aa, synthetic construct
  REGION 1..978: note = engineered CasX variant
QEIKRINKIRRRLVKDSNTKKAGKTGPMKTLLVRVMTPDLRERLENLRKKPENIPQPISNTSRANLNKLLTDYTEMKKAILHVYWEEFQKDPVGLMSRVAQPASKKIDQNKLKPEMDEKGNLTTAGFACSQCGQPLFVYKLEQVSEKGKAYTNYFGRCNVAEHEKLILLAQLKPEKDSDEAVTYSLGKFGQRALDFYSIHVTKESTHPVKPLAQIAGNRYASSPVGKALSDACMGTIASFLSKYQDIIIEHQKVVKGNQKRLESLRELAGKENLEYPSVTLPPQPHTKEGVDAYNEVIARVRMWVNLNLWQKLKLSRDDAKPLLRLKGFPSFPLVERQANEVDWWDMVCNVKKLINEKKEDGKVFWQNLAIYKRQEALRPYLSSEEDRKKGKKFARYQLGDLLLHLEKKHGEDWGKVYDEAWERIDKKVEGLSKHIKLEEERRSEDAQSKAALTDWLRAKASFVIEGLKEADKDEFCRCELKLQKWYGDLRGKPFAIEAENSILDISGFSKQYNCAFIWQKDGVKKLNLYLIINYFKGGKLRFKKIKPEAFEANRFYTVINKKSGEIVPMEVNFNFDDPNLIILPLAFGKRQGREFIWNDLLSLETGSLKLANGRVIEKTLYNRRTRQDEPALFVALTFERREVLDSSNIKPMNLIGVDRGENIPAVIALTDPEGCPLSRFKDSLGNPTHILRIGESYKEKQRTIQAKKEVEQRRAGGYSRKYASKAKNLADDMVRNTARDLLYYAVTQDAMLIFENLSRGFGRQGKRTFMAERQYTRMEDWLTAKLAYEGLPSKTYLSKTLAQYTSKTCSNCGFTITSADYDRVLEKLKKTATGWMTTINGKELKVEGQITYYNRYKRQNVVKDLSVELDRLSEESVNNDISSWTKGRQGEALSLLKKRFSHRPVQEKFVCLNCGFETHADEQAALNIARSWLFLRSQEYKKYQTNKTTGNTDKRAFVETWQSFYRKKLKEVWKPAV

SEQ ID NO: 47571 - protein, 978 aa, synthetic construct
  REGION 1..978: note = engineered CasX variant
QEIKRINKIRRRLVKDSNTKKAGKTGPMKTLLVRVMTPDLRERLENLRKKPENIPQPISNTSRANLNKLLTDYTEMKKAILHVYWEEFQKDPVGLMSRVAQPASKKIDQNKLKPEMDEKGNLTTAGFACSQCGQPLFVYKLEQVSEKGKAYTNYFGRCNVAEHEKLILLAQLKPEKDSDEAVTYSLGKFGQRALDFYSIHVTKESTHPVKPLAQIAGNRYASTPVGKALSDACMGTIASFLSKYQDIIIEHQKVVKGNQKRLESLRELAGKENLEYPSVTLPPQPHTKEGVDAYNEVIARVRMWVNLNLWQKLKLSRDDAKPLLRLKGFPSFPLVERQANEVDWWDMVCNVKKLINEKKEDGKVFWQNLAIYKRQEALRPYLSSEEDRKKGKKFARYQLGDLLLHLEKKHGEDWGKVYDEAWERIDKKVEGLSKHIKLEEERRSEDAQSKAALTDWLRAKASFVIEGLKEADKDEFCRCELKLQKWYGDLRGKPFAIEAENSILDISGFSKQYNCAFIWQKDGVKKLNLYLIINYFKGGKLRFKKIKPEAFEANRFYTVINKKSGEIVPMEVNFNFDDPNLIILPLAFGKRQGREFIWNDLLSLETGSLKLANGRVIEKTLYNRRTRQDEPALFVALTFERREVLDSSNIKPMNLIGVDRGENIPAVIALTDPEGCPLSRFKDSLGNPTHILRIGESYKEKQRTIQAKKEVEQRRAGGYSRKYASKAKNLADDMVRNTARDLLYYAVTQDAMLIFENLSRGFGRQGKRTFMAERQYTRMEDWLTAKLAYEGLPSKTYLSKTLAQYTSKTCSNCGFTITSADYDRVLEKLKKTATGWMTTINGKELKVEGQITYYNRYKRQNVVKDLSVELDRLSEESVNNDISSWTKGRQGEALSLLKKRFSHRPVQEKFVCLNCGFETHADEQAALNIARSWLFLRSQEYKKYQTNKTTGNTDKRAFVETWQSFYRKKLKEVWKPAV

SEQ ID NO: 47572 - protein, 978 aa, synthetic construct
  REGION 1..978: note = engineered CasX variant
QEIKRINKIRRRLVKDSNTKKAGKTGPMKTLLVRVMTPDLRERLENLRKKPENIPQPISNTSRANLNKLLTDYTEMKKAILHVYWEEFQKDPVGLMSRVAQPASKKIDQNKLKPEMDEKGNLTTAGFACSQCGQPLFVYKLEQVSEKGKAYTNYFGRCNVAEHEKLILLAQLKPEKDSDEAVTYSLGKFGQRALDFYSIHVTKESTHPVKPLAQIAGNRYASAPVGKALSDACMGTIASFLSKYQDIIIEHQKVVKGNQKRLESLRELAGKENLEYPSVTLPPQPHTKEGVDAYNEVIARVRMWVNLNLWQKLKLSRDDAKPLLRLKGFPSFPLVERQANEVDWWDMVCNVKKLINEKKEDGKVFWQNLAIYKRQEALRPYLSSEEDRKKGKKFARYQLGDLLLHLEKKHGEDWGKVYDEAWERIDKKVEGLSKHIKLEEERRSEDAQSKAALTDWLRAKASFVIEGLKEADKDEFCRCELKLQKWYGDLRGKPFAIEAENSILDISGFSKQYNCAFIWQKDGVKKLNLYLIINYFKGGKLRFKKIKPEAFEANRFYTVINKKSGEIVPMEVNFNFDDPNLIILPLAFGKRQGREFIWNDLLSLETGSLKLANGRVIEKTLYNRRTRQDEPALFVALTFERREVLDSSNIKPMNLIGVDRGENIPAVIALTDPEGCPLSRFKDSLGNPTHILRIGESYKEKQRTIQAKKEVEQRRAGGYSRKYASKAKNLADDMVRNTARDLLYYAVTQDAMLIFENLSRGFGRQGKRTFMAERQYTRMEDWLTAKLAYEGLPSKTYLSKTLAQYTSKTCSNCGFTITSADYDRVLEKLKKTATGWMTTINGKELKVEGQITYYNRYKRQNVVKDLSVELDRLSEESVNNDISSWTKGRQGEALSLLKKRFSHRPVQEKFVCLNCGFETHADEQAALNIARSWLFLRSQEYKKYQTNKTTGNTDKRAFVETWQSFYRKKLKEVWKPAV

SEQ ID NO: 47573 - protein, 978 aa, synthetic construct
  REGION 1..978: note = engineered CasX variant
QEIKRINKIRRRLVKDSNTKKAGKTGPMKTLLVRVMTPDLRERLENLRKKPENIPQPISNTSRANLNKLLTDYTEMKKAILHVYWEEFQKDPVGLMSRVAQPASKKIDQNKLKPEMDEKGNLTTAGFACSQCGQPLFVYKLEQVSEKGKAYTNYFGRCNVAEHEKLILLAQLKPEKDSDEAVTYSLGKFGQRALDFYSIHVTKESTHPVKPLAQIAGNRYASVPVGKALSDACMGTIASFLSKYQDIIIEHQKVVKGNQKRLESLRELAGKENLEYPSVTLPPQPHTKEGVDAYNEVIARVRMWVNLNLWQKLKLSRDDAKPLLRLKGFPSFPLVERQANEVDWWDMVCNVKKLINEKKEDGKVFWQNLAIYKRQEALRPYLSSEEDRKKGKKFARYQLGDLLLHLEKKHGEDWGKVYDEAWERIDKKVEGLSKHIKLEEERRSEDAQSKAALTDWLRAKASFVIEGLKEADKDEFCRCELKLQKWYGDLRGKPFAIEAENSILDISGFSKQYNCAFIWQKDGVKKLNLYLIINYFKGGKLRFKKIKPEAFEANRFYTVINKKSGEIVPMEVNFNFDDPNLIILPLAFGKRQGREFIWNDLLSLETGSLKLANGRVIEKTLYNRRTRQDEPALFVALTFERREVLDSSNIKPMNLIGVDRGENIPAVIALTDPEGCPLSRFKDSLGNPTHILRIGESYKEKQRTIQAKKEVEQRRAGGYSRKYASKAKNLADDMVRNTARDLLYYAVTQDAMLIFENLSRGFGRQGKRTFMAERQYTRMEDWLTAKLAYEGLPSKTYLSKTLAQYTSKTCSNCGFTITSADYDRVLEKLKKTATGWMTTINGKELKVEGQITYYNRYKRQNVVKDLSVELDRLSEESVNNDISSWTKGRQGEALSLLKKRFSHRPVQEKFVCLNCGFETHADEQAALNIARSWLFLRSQEYKKYQTNKTTGNTDKRAFVETWQSFYRKKLKEVWKPAV

SEQ ID NO: 47574 - protein, 978 aa, synthetic construct
  REGION 1..978: note = engineered CasX variant
QEIKRINKIRRRLVKDSNTKKAGKTGPMKTLLVRVMTPDLRERLENLRKKPENIPQPISNTSRANLNKLLTDYTEMKKAILHVYWEEFQKDPVGLMSRVAQPASKKIDQNKLKPEMDEKGNLTTAGFACSQCGQPLFVYKLEQVSEKGKAYTNYFGRCNVAEHEKLIKLAQLKPEKDSDEAVTYSLGKFGQRALDFYSIHVTKESTHPVKPLAQIAGNRYASGPVGKALSDACMGTIASFLSKYQDIIIEHQKVVKGNQKRLESLRELAGKENLEYPSVTLPPQPHTKEGVDAYNEVIARVRMWVNLNLWQKLKLSRDDAKPLLRLKGFPSFPLVERQANEVDWWDMVCNVKKLINEKKEDGKVFWQNLAIYKRQEALRPYLSSEEDRKKGKKFARYQLGDLLLHLEKKHGEDWGKVYDEAWERIDKKVEGLSKHIKLEEERRSEDAQSKAALTDWLRAKASFVIEGLKEADKDEFCRCELKLQKWYGDLRGKPFAIEAENSILDISGFSKQYNCAFIWQKDGVKKLNLYLIINYFKGGKLRFKKIKPEAFEANRFYTVINKKSGEIVPMEVNFNFDDPNLIILPLAFGKRQGREFIWNDLLSLETGSLKLANGRVIEKTLYNRRTRQDEPALFVALTFERREVLDSSNIKPMNLIGVDRGENIPAVIALTDPEGCPLSRFKDSLGNPTHILRIGESYKEKQRTIQAKKEVEQRRAGGYSRKYASKAKNLADDMVRNTARDLLYYAVTQDAMLIFENLSRGFGRQGKRTFMAERQYTRMEDWLTAKLAYEGLPSKTYLSKTLAQYTSKTCSNCGFTITSADYDRVLEKLKKTATGWMTTINGKELKVEGQITYYNRYKRQNVVKDLSVELDRLSEESVNNDISSWTKGRQGEALSLLKKRFSHRPVQEKFVCLNCGFETHADEQAALNIARSWLFLRSQEYKKYQTNKTTGNTDKRAFVETWQSFYRKKLKEVWKPAV

SEQ ID NO: 47575 - protein, 977 aa, synthetic construct
  REGION 1..977: note = engineered CasX variant
QEIKRINKIRRRLVKDSNTKKAGKTGPMKTLLVRVMTPDLRERLENLRKKPENIPQPISNTSRANLNKLLTDYTEMKKAILHVYWEEFQKDPVGLMSRVAQPASKKIDQNKLKPEMDEKGNLTTAGFACSQCGQPLFVYKLEQVSEKGKAYTNYFGRCNVAEHEKLILLAQLKPEKDSDEAVTYSLGKFGQRALDFYSIHVTKESTHPVKPLAQIAGNRYASPVGKALSDACMGTIASFLSKYQDIIIEHQKVVKGNQKRLESLRELAGKENLEYPSVTLPPQPHTKEGVDAYNEVIARVRMWVNLNLWQKLKLSRDDAKPLLRLKGFPSFPLVERQANEVDWWDMVCNVKKLINEKKEDGKVFWQNLAIYKRQEALRPYLSSEEDRKKGKKFARYQLGDLLLHLEKKHGEDWGKVYDEAWERIDKKVEGLSKHIKLEEERRSEDAQSKAALTDWLRAKASFVIEGLKEADKDEFCRCELKLQKWYGDLRGKPFAIEAENSILDISGFSKQYNCAFIWQKDGVKKLNLYLIINYFKGGKLRFKKIKPEAFEANRFYTVINKKSGEIVPMEVNFNFDDPNLIILPLAFGKRQGREFIWNDLLSLETGSLKLANGRVIEKTLYNRRTRQDEPALFVALTFERREVLDSSNIKPMNLIGVDRGENIPAVIALTDPEGCPLSRFKDSLGNPTHILRIGESYKEKQRTIQAKKEVEQRRAGGYSRKYASKAKNLADDMVRNTARDLLYYAVTQDAMLIFENLSRGFGRQGKRTFMAERQYTRMEDWLTAKLAYEGLPSKTYLSKTLAQYTSKTCSNCGFTITSADYDRVLEKLKKTATGWMTTINGKELKVEGQITYYNRYKRQNVVKDLSVELDRLSEESVNNDISSWTKGRQGEALSLLKKRFSHRPVQEKFVCLNCGFETHADEQAALNIARSWLFLRSQEYKKYQTNKTTGNTDKRAFVETWQSFYRKKLKEVWKPAV

SEQ ID NO: 47576 - protein, 978 aa, synthetic construct
  REGION 1..978: note = engineered CasX variant
QEIKRINKIRRRLVKDSNTKKAGKTGPMKTLLVRVMTPDLRERLENLRKKPENIPQPISNTSRANLNKLLTDYTEMKKAILHVYWEEFQKDPVGLMSRVAQPASKKIDQNKLKPEMDEKGNLTTAGFACSQCGQPLFVYKLEQVSEKGKAYTNYFGRCNVAEHEKLILLAQLKPEKDSDEAVTYSLGKFGQRALDFYSIHVTKESTHPVKPLAQIAGNRYASYPVGKALSDACMGTIASFLSKYQDIIIEHQKVVKGNQKRLESLRELAGKENLEYPSVTLPPQPHTKEGVDAYNEVIARVRMWVNLNLWQKLKLSRDDAKPLLRLKGFPSFPLVERQANEVDWWDMVCNVKKLINEKKEDGKVFWQNLAGYKRQEALRPYLSSEEDREKGKKFARYQLGDLLLHLEKKHGEDWGKVYDEAWERIDKKVEGLSKHIKLEEERRSEDAQSKAALTDWLRAKASFVIEGLKEADKDEFCRCELKLQKWYGDLRGKPFAIEAENSILDISGFSKQYNCAFIWQKDGVKKLNLYLIINYFKGGKLRFKKIKPEAFEANRFYTVINKKSGEIVPMEVNFNFDDPNLIILPLAFGKRQGREFIWNDLLSLETGSLKLANGRVIEKTLYNRRTRQDEPALFVALTFERREVLDSSNIKPMNLIGVDRGENIPAVIALTDPEGCPLSRFKDSLGNPTHILRIGESYKEKQRTIQAKKEVEQRRAGGYSRKYASKAKNLADDMVRNTARDLLYYAVTQDAMLIFENLSRGFGRQGKRTFMAERQYTRMEDWLTAKLAYEGLPSKTYLSKTLAQYTSKTCSNCGFTITSADYDRVLEKLKKTATGWMTTINGKELKVEGQITYYNRYKRQNVVKDLSVELDRLSEESVNNDISSWTKGRQGEALSLLKKRFSHRPVQEKFVCLNCGFETHADEQAALNIARSWLFLRSQEYKKYQTNKTTGNTDKRAFVETWQSFYRKKLKEVWKPAV

SEQ ID NO: 47577 - protein, 978 aa, synthetic construct
  REGION 1..978: note = engineered CasX variant
QEIKRINKIRRRLVKDSNTKKAGKTGPMKTLLVRVMTPDLRERLENLRKKPENIPQPISNTSRANLNKLLTDYTEMKKAILHVYWEEFQKDPVGLMSRVAQPASKKIDQNKLKPEMDEKGNLTTAGFACSQCGQPLFVYKLEQVSEKGKAYTNYFGRCNVAEHEKLILLAQLKPEKDSDEAVTYSLGKFGQRALDFYSIHVTKESTHPVKPLAQIAGNRYASHPVGKALSDACMGTIASFLSKYQDIIIEHQKVVKGNQKRLESLRELAGKENLEYPSVTLPPQPHTKEGVDAYNEVIARVRMWVNLNLWQKLKLSRDDAKPLLRLKGFPSFPLVERQANEVDWWDMVCNVKKLINEKKEDGKVFWQNLAGYKRQEALRPYLSSEEDREKGKKFARYQLGDLLLHLEKKHGEDWGKVYDEAWERIDKKVEGLSKHIKLEEERRSEDAQSKAALTDWLRAKASFVIEGLKEADKDEFCRCELKLQKWYGDLRGKPFAIEAENSILDISGFSKQYNCAFIWQKDGVKKLNLYLIINYFKGGKLRFKKIKPEAFEANRFYTVINKKSGEIVPMEVNFNFDDPNLIILPLAFGKRQGREFIWNDLLSLETGSLKLANGRVIEKTLYNRRTRQDEPALFVALTFERREVLDSSNIKPMNLIGVDRGENIPAVIALTDPEGCPLSRFKDSLGNPTHILRIGESYKEKQRTIQAKKEVEQRRAGGYSRKYASKAKNLADDMVRNTARDLLYYAVTQDAMLIFENLSRGFGRQGKRTFMAERQYTRMEDWLTAKLAYEGLPSKTYLSKTLAQYTSKTCSNCGFTITSADYDRVLEKLKKTATGWMTTINGKELKVEGQITYYNRYKRQNVVKDLSVELDRLSEESVNNDISSWTKGRQGEALSLLKKRFSHRPVQEKFVCLNCGFETHADEQAALNIARSWLFLRSQEYKKYQTNKTTGNTDKRAFVETWQSFYRKKLKEVWKPAV

SEQ ID NO: 47578 - protein, 978 aa, synthetic construct
  REGION 1..978: note = engineered CasX variant
QEIKRINKIRRRLVKDSNTKKAGKTGPMKTLLVRVMTPDLRERLENLRKKPENIPQPISNTSRANLNKLLTDYTEMKKAILHVYWEEFQKDPVGLMSRVAQPASKKIDQNKLKPEMDEKGNLTTAGFACSQCGQPLFVYKLEQVSEKGKAYTNYFGRCNVAEHEKLILLAQLKPEKDSDEAVTYSLGKFGQRALDFYSIHVTKESTHPVKPLAQIAGNRYASSPVGKALSDACMGTIASFLSKYQDIIIEHQKVVKGNQKRLESLRELAGKENLEYPSVTLPPQPHTKEGVDAYNEVIARVRMWVNLNLWQKLKLSRDDAKPLLRLKGFPSFPLVERQANEVDWWDMVCNVKKLINEKKEDGKVFWQNLAGYKRQEALRPYLSSEEDREKGKKFARYQLGDLLLHLEKKHGEDWGKVYDEAWERIDKKVEGLSKHIKLEEERRSEDAQSKAALTDWLRAKASFVIEGLKEADKDEFCRCELKLQKWYGDLRGKPFAIEAENSILDISGFSKQYNCAFIWQKDGVKKLNLYLIINYFKGGKLRFKKIKPEAFEANRFYTVINKKSGEIVPMEVNFNFDDPNLIILPLAFGKRQGREFIWNDLLSLETGSLKLANGRVIEKTLYNRRTRQDEPALFVALTFERREVLDSSNIKPMNLIGVDRGENIPAVIALTDPEGCPLSRFKDSLGNPTHILRIGESYKEKQRTIQAKKEVEQRRAGGYSRKYASKAKNLADDMVRNTARDLLYYAVTQDAMLIFENLSRGFGRQGKRTFMAERQYTRMEDWLTAKLAYEGLPSKTYLSKTLAQYTSKTCSNCGFTITSADYDRVLEKLKKTATGWMTTINGKELKVEGQITYYNRYKRQNVVKDLSVELDRLSEESVNNDISSWTKGRQGEALSLLKKRFSHRPVQEKFVCLNCGFETHADEQAALNIARSWLFLRSQEYKKYQTNKTTGNTDKRAFVETWQSFYRKKLKEVWKPAV

SEQ ID NO: 47579 - protein, 978 aa, synthetic construct
  REGION 1..978: note = engineered CasX variant
QEIKRINKIRRRLVKDSNTKKAGKTGPMKTLLVRVMTPDLRERLENLRKKPENIPQPISNTSRANLNKLLTDYTEMKKAILHVYWEEFQKDPVGLMSRVAQPASKKIDQNKLKPEMDEKGNLTTAGFACSQCGQPLFVYKLEQVSEKGKAYTNYFGRCNVAEHEKLILLAQLKPEKDSDEAVTYSLGKFGQRALDFYSIHVTKESTHPVKPLAQIAGNRYASTPVGKALSDACMGTIASFLSKYQDIIIEHQKVVKGNQKRLESLRELAGKENLEYPSVTLPPQPHTKEGVDAYNEVIARVRMWVNLNLWQKLKLSRDDAKPLLRLKGFPSFPLVERQANEVDWWDMVCNVKKLINEKKEDGKVFWQNLAGYKRQEALRPYLSSEEDREKGKKFARYQLGDLLLHLEKKHGEDWGKVYDEAWERIDKKVEGLSKHIKLEEERRSEDAQSKAALTDWLRAKASFVIEGLKEADKDEFCRCELKLQKWYGDLRGKPFAIEAENSILDISGFSKQYNCAFIWQKDGVKKLNLYLIINYFKGGKLRFKKIKPEAFEANRFYTVINKKSGEIVPMEVNFNFDDPNLIILPLAFGKRQGREFIWNDLLSLETGSLKLANGRVIEKTLYNRRTRQDEPALFVALTFERREVLDSSNIKPMNLIGVDRGENIPAVIALTDPEGCPLSRFKDSLGNPTHILRIGESYKEKQRTIQAKKEVEQRRAGGYSRKYASKAKNLADDMVRNTARDLLYYAVTQDAMLIFENLSRGFGRQGKRTFMAERQYTRMEDWLTAKLAYEGLPSKTYLSKTLAQYTSKTCSNCGFTITSADYDRVLEKLKKTATGWMTTINGKELKVEGQITYYNRYKRQNVVKDLSVELDRLSEESVNNDISSWTKGRQGEALSLLKKRFSHRPVQEKFVCLNCGFETHADEQAALNIARSWLFLRSQEYKKYQTNKTTGNTDKRAFVETWQSFYRKKLKEVWKPAV

SEQ ID NO: 47580 - protein, 978 aa, synthetic construct
  REGION 1..978: note = engineered CasX variant
QEIKRINKIRRRLVKDSNTKKAGKTGPMKTLLVRVMTPDLRERLENLRKKPENIPQPISNTSRANLNKLLTDYTEMKKAILHVYWEEFQKDPVGLMSRVAQPASKKIDQNKLKPEMDEKGNLTTAGFACSQCGQPLFVYKLEQVSEKGKAYTNYFGRCNVAEHEKLILLAQLKPEKDSDEAVTYSLGKFGQRALDFYSIHVTKESTHPVKPLAQIAGNRYASAPVGKALSDACMGTIASFLSKYQDIIIEHQKVVKGNQKRLESLRELAGKENLEYPSVTLPPQPHTKEGVDAYNEVIARVRMWVNLNLWQKLKLSRDDAKPLLRLKGFPSFPLVERQANEVDWWDMVCNVKKLINEKKEDGKVFWQNLAGYKRQEALRPYLSSEEDREKGKKFARYQLGDLLLHLEKKHGEDWGKVYDEAWERIDKKVEGLSKHIKLEEERRSEDAQSKAALTDWLRAKASFVIEGLKEADKDEFCRCELKLQKWYGDLRGKPFAIEAENSILDISGFSKQYNCAFIWQKDGVKKLNLYLIINYFKGGKLRFKKIKPEAFEANRFYTVINKKSGEIVPMEVNFNFDDPNLIILPLAFGKRQGREFIWNDLLSLETGSLKLANGRVIEKTLYNRRTRQDEPALFVALTFERREVLDSSNIKPMNLIGVDRGENIPAVIALTDPEGCPLSRFKDSLGNPTHILRIGESYKEKQRTIQAKKEVEQRRAGGYSRKYASKAKNLADDMVRNTARDLLYYAVTQDAMLIFENLSRGFGRQGKRTFMAERQYTRMEDWLTAKLAYEGLPSKTYLSKTLAQYTSKTCSNCGFTITSADYDRVLEKLKKTATGWMTTINGKELKVEGQITYYNRYKRQNVVKDLSVELDRLSEESVNNDISSWTKGRQGEALSLLKKRFSHRPVQEKFVCLNCGFETHADEQAALNIARSWLFLRSQEYKKYQTNKTTGNTDKRAFVETWQSFYRKKLKEVWKPAV

SEQ ID NO: 47581 - protein, 978 aa, synthetic construct
  REGION 1..978: note = engineered CasX variant
QEIKRINKIRRRLVKDSNTKKAGKTGPMKTLLVRVMTPDLRERLENLRKKPENIPQPISNTSRANLNKLLTDYTEMKKAILHVYWEEFQKDPVGLMSRVAQPASKKIDQNKLKPEMDEKGNLTTAGFACSQCGQPLFVYKLEQVSEKGKAYTNYFGRCNVAEHEKLILLAQLKPEKDSDEAVTYSLGKFGQRALDFYSIHVTKESTHPVKPLAQIAGNRYASVPVGKALSDACMGTIASFLSKYQDIIIEHQKVVKGNQKRLESLRELAGKENLEYPSVTLPPQPHTKEGVDAYNEVIARVRMWVNLNLWQKLKLSRDDAKPLLRLKGFPSFPLVERQANEVDWWDMVCNVKKLINEKKEDGKVFWQNLAGYKRQEALRPYLSSEEDREKGKKFARYQLGDLLLHLEKKHGEDWGKVYDEAWERIDKKVEGLSKHIKLEEERRSEDAQSKAALTDWLRAKASFVIEGLKEADKDEFCRCELKLQKWYGDLRGKPFAIEAENSILDISGFSKQYNCAFIWQKDGVKKLNLYLIINYFKGGKLRFKKIKPEAFEANRFYTVINKKSGEIVPMEVNFNFDDPNLIILPLAFGKRQGREFIWNDLLSLETGSLKLANGRVIEKTLYNRRTRQDEPALFVALTFERREVLDSSNIKPMNLIGVDRGENIPAVIALTDPEGCPLSRFKDSLGNPTHILRIGESYKEKQRTIQAKKEVEQRRAGGYSRKYASKAKNLADDMVRNTARDLLYYAVTQDAMLIFENLSRGFGRQGKRTFMAERQYTRMEDWLTAKLAYEGLPSKTYLSKTLAQYTSKTCSNCGFTITSADYDRVLEKLKKTATGWMTTINGKELKVEGQITYYNRYKRQNVVKDLSVELDRLSEESVNNDISSWTKGRQGEALSLLKKRFSHRPVQEKFVCLNCGFETHADEQAALNIARSWLFLRSQEYKKYQTNKTTGNTDKRAFVETWQSFYRKKLKEVWKPAV

SEQ ID NO: 47582 - protein, 978 aa, synthetic construct
  REGION 1..978: note = engineered CasX variant
QEIKRINKIRRRLVKDSNTKKAGKTGPMKTLLVRVMTPDLRERLENLRKKPENIPQPISNTSRANLNKLLTDYTEMKKAILHVYWEEFQKDPVGLMSRVAQPASKKIDQNKLKPEMDEKGNLTTAGFACSQCGQPLFVYKLEQVSEKGKAYTNYFGRCNVAEHEKLIKLAQLKPEKDSDEAVTYSLGKFGQRALDFYSIHVTKESTHPVKPLAQIAGNRYASGPVGKALSDACMGTIASFLSKYQDIIIEHQKVVKGNQKRLESLRELAGKENLEYPSVTLPPQPHTKEGVDAYNEVIARVRMWVNLNLWQKLKLSRDDAKPLLRLKGFPSFPLVERQANEVDWWDMVCNVKKLINEKKEDGKVFWQNLAGYKRQEALRPYLSSEEDREKGKKFARYQLGDLLLHLEKKHGEDWGKVYDEAWERIDKKVEGLSKHIKLEEERRSEDAQSKAALTDWLRAKASFVIEGLKEADKDEFCRCELKLQKWYGDLRGKPFAIEAENSILDISGFSKQYNCAFIWQKDGVKKLNLYLIINYFKGGKLRFKKIKPEAFEANRFYTVINKKSGEIVPMEVNFNFDDPNLIILPLAFGKRQGREFIWNDLLSLETGSLKLANGRVIEKTLYNRRTRQDEPALFVALTFERREVLDSSNIKPMNLIGVDRGENIPAVIALTDPEGCPLSRFKDSLGNPTHILRIGESYKEKQRTIQAKKEVEQRRAGGYSRKYASKAKNLADDMVRNTARDLLYYAVTQDAMLIFENLSRGFGRQGKRTFMAERQYTRMEDWLTAKLAYEGLPSKTYLSKTLAQYTSKTCSNCGFTITSADYDRVLEKLKKTATGWMTTINGKELKVEGQITYYNRYKRQNVVKDLSVELDRLSEESVNNDISSWTKGRQGEALSLLKKRFSHRPVQEKFVCLNCGFETHADEQAALNIARSWLFLRSQEYKKYQTNKTTGNTDKRAFVETWQSFYRKKLKEVWKPAV

SEQ ID NO: 47583 - protein, 977 aa, synthetic construct
  REGION 1..977: note = engineered CasX variant
QEIKRINKIRRRLVKDSNTKKAGKTGPMKTLLVRVMTPDLRERLENLRKKPENIPQPISNTSRANLNKLLTDYTEMKKAILHVYWEEFQKDPVGLMSRVAQPASKKIDQNKLKPEMDEKGNLTTAGFACSQCGQPLFVYKLEQVSEKGKAYTNYFGRCNVAEHEKLILLAQLKPEKDSDEAVTYSLGKFGQRALDFYSIHVTKESTHPVKPLAQIAGNRYASPVGKALSDACMGTIASFLSKYQDIIIEHQKVVKGNQKRLESLRELAGKENLEYPSVTLPPQPHTKEGVDAYNEVIARVRMWVNLNLWQKLKLSRDDAKPLLRLKGFPSFPLVERQANEVDWWDMVCNVKKLINEKKEDGKVFWQNLAGYKRQEALRPYLSSEEDREKGKKFARYQLGDLLLHLEKKHGEDWGKVYDEAWERIDKKVEGLSKHIKLEEERRSEDAQSKAALTDWLRAKASFVIEGLKEADKDEFCRCELKLQKWYGDLRGKPFAIEAENSILDISGFSKQYNCAFIWQKDGVKKLNLYLIINYFKGGKLRFKKIKPEAFEANRFYTVINKKSGEIVPMEVNFNFDDPNLIILPLAFGKRQGREFIWNDLLSLETGSLKLANGRVIEKTLYNRRTRQDEPALFVALTFERREVLDSSNIKPMNLIGVDRGENIPAVIALTDPEGCPLSRFKDSLGNPTHILRIGESYKEKQRTIQAKKEVEQRRAGGYSRKYASKAKNLADDMVRNTARDLLYYAVTQDAMLIFENLSRGFGRQGKRTFMAERQYTRMEDWLTAKLAYEGLPSKTYLSKTLAQYTSKTCSNCGFTITSADYDRVLEKLKKTATGWMTTINGKELKVEGQITYYNRYKRQNVVKDLSVELDRLSEESVNNDISSWTKGRQGEALSLLKKRFSHRPVQEKFVCLNCGFETHADEQAALNIARSWLFLRSQEYKKYQTNKTTGNTDKRAFVETWQSFYRKKLKEVWKPAV

SEQ ID NO: 47584 - protein, 978 aa, synthetic construct
  REGION 1..978: note = engineered CasX variant
QEIKRINKIRRRLVKDSNTKKAGKTGPMKTLLVRVMTPDLRERLENLRKKPENIPQPISNTSRANLNKLLTDYTEMKKAILHVYWEEFQKDPVGLMSRVAQPASKKIDQNKLKPEMDEKGNLTTAGFACSQCGQPLFVYKLEQVSEKGKAYTNYFGRCNVAEHEKLILLAQLKPEKDSDEAVTYSLGKFGQRALDFYSIHVTKESTHPVKPLAQIAGNRYASYPVGKALSDACMGTIASFLSKYQDIIIEHQKVVKGNQKRLESLRELAGKENLEYPSVTLPPQPHTKEGVDAYNEVIARVRMWVNLNLWQKLKLSRDDAKPLLRLKGFPSFPLVERQANEVDWWDMVCNVKKLINEKKEDGKVFWQNLAGYKRQEALRPYLSSEEDRKKGKKFARYQLGDLLLHLEKKHGEDWGKVYDEAWERIDKKVEGLSKHIKLEEERRSEDAQSKAALTDWLRAKASFVIEGLKEADKDEFCRCELKLQKWYGDLRGKPFAIEAENSILDISGFSKQYNCAFIWQKDGVKKLNLYLIINYFKGGKLRFKKIKPEAFEANRFYTVINKKSGEIVIMEVNFNFDDPNLIILPLAFGKRQGREFIWNDLLSLETGSLKLANGRVIEKTLYNRRTRQDEPALFVALTFERREVLDSSNIKPMNLIGVDRGENIPAVIALTDPEGCPLSRFKDSLGNPTHILRIGESYKEKQRTIQAKKEVEQRRAGGYSRKYASKAKNLADDMVRNTARDLLYYAVTQDAMLIFENLSRGFGRQGKRTFMAERQYTRMEDWLTAKLAYEGLPSKTYLSKTLAQYTSKTCSNCGFTITSADYDRVLEKLKKTATGWMTTINGKELKVEGQITYYNRYKRQNVVKDLSVELDRLSEESVNNDISSWTKGRQGEALSLLKKRFSHRPVQEKFVCLNCGFETHADEQAALNIARSWLFLRSQEYKKYQTNKTTGNTDKRAFVETWQSFYRKKLKEVWKPAV

SEQ ID NO: 47585 - protein, 978 aa, synthetic construct
  REGION 1..978: note = engineered CasX variant
QEIKRINKIRRRLVKDSNTKKAGKTGPMKTLLVRVMTPDLRERLENLRKKPENIPQPISNTSRANLNKLLTDYTEMKKAILHVYWEEFQKDPVGLMSRVAQPASKKIDQNKLKPEMDEKGNLTTAGFACSQCGQPLFVYKLEQVSEKGKAYTNYFGRCNVAEHEKLILLAQLKPEKDSDEAVTYSLGKFGQRALDFYSIHVTKESTHPVKPLAQIAGNRYASHPVGKALSDACMGTIASFLSKYQDIIIEHQKVVKGNQKRLESLRELAGKENLEYPSVTLPPQPHTKEGVDAYNEVIARVRMWVNLNLWQKLKLSRDDAKPLLRLKGFPSFPLVERQANEVDWWDMVCNVKKLINEKKEDGKVFWQNLAGYKRQEALRPYLSSEEDRKKGKKFARYQLGDLLLHLEKKHGEDWGKVYDEAWERIDKKVEGLSKHIKLEEERRSEDAQSKAALTDWLRAKASFVIEGLKEADKDEFCRCELKLQKWYGDLRGKPFAIEAENSILDISGFSKQYNCAFIWQKDGVKKLNLYLIINYFKGGKLRFKKIKPEAFEANRFYTVINKKSGEIVIMEVNFNFDDPNLIILPLAFGKRQGREFIWNDLLSLETGSLKLANGRVIEKTLYNRRTRQDEPALFVALTFERREVLDSSNIKPMNLIGVDRGENIPAVIALTDPEGCPLSRFKDSLGNPTHILRIGESYKEKQRTIQAKKEVEQRRAGGYSRKYASKAKNLADDMVRNTARDLLYYAVTQDAMLIFENLSRGFGRQGKRTFMAERQYTRMEDWLTAKLAYEGLPSKTYLSKTLAQYTSKTCSNCGFTITSADYDRVLEKLKKTATGWMTTINGKELKVEGQITYYNRYKRQNVVKDLSVELDRLSEESVNNDISSWTKGRQGEALSLLKKRFSHRPVQEKFVCLNCGFETHADEQAALNIARSWLFLRSQEYKKYQTNKTTGNTDKRAFVETWQSFYRKKLKEVWKPAV

SEQ ID NO: 47586 - protein, 978 aa, synthetic construct
  REGION 1..978: note = engineered CasX variant
QEIKRINKIRRRLVKDSNTKKAGKTGPMKTLLVRVMTPDLRERLENLRKKPENIPQPISNTSRANLNKLLTDYTEMKKAILHVYWEEFQKDPVGLMSRVAQPASKKIDQNKLKPEMDEKGNLTTAGFACSQCGQPLFVYKLEQVSEKGKAYTNYFGRCNVAEHEKLILLAQLKPEKDSDEAVTYSLGKFGQRALDFYSIHVTKESTHPVKPLAQIAGNRYASSPVGKALSDACMGTIASFLSKYQDIIIEHQKVVKGNQKRLESLRELAGKENLEYPSVTLPPQPHTKEGVDAYNEVIARVRMWVNLNLWQKLKLSRDDAKPLLRLKGFPSFPLVERQANEVDWWDMVCNVKKLINEKKEDGKVFWQNLAGYKRQEALRPYLSSEEDRKKGKKFARYQLGDLLLHLEKKHGEDWGKVYDEAWERIDKKVEGLSKHIKLEEERRSEDAQSKAALTDWLRAKASFVIEGLKEADKDEFCRCELKLQKWYGDLRGKPFAIEAENSILDISGFSKQYNCAFIWQKDGVKKLNLYLIINYFKGGKLRFKKIKPEAFEANRFYTVINKKSGEIVIMEVNFNFDDPNLIILPLAFGKRQGREFIWNDLLSLETGSLKLANGRVIEKTLYNRRTRQDEPALFVALTFERREVLDSSNIKPMNLIGVDRGENIPAVIALTDPEGCPLSRFKDSLGNPTHILRIGESYKEKQRTIQAKKEVEQRRAGGYSRKYASKAKNLADDMVRNTARDLLYYAVTQDAMLIFENLSRGFGRQGKRTFMAERQYTRMEDWLTAKLAYEGLPSKTYLSKTLAQYTSKTCSNCGFTITSADYDRVLEKLKKTATGWMTTINGKELKVEGQITYYNRYKRQNVVKDLSVELDRLSEESVNNDISSWTKGRQGEALSLLKKRFSHRPVQEKFVCLNCGFETHADEQAALNIARSWLFLRSQEYKKYQTNKTTGNTDKRAFVETWQSFYRKKLKEVWKPAV

SEQ ID NO: 47587 - protein, 978 aa, synthetic construct
  REGION 1..978: note = engineered CasX variant
QEIKRINKIRRRLVKDSNTKKAGKTGPMKTLLVRVMTPDLRERLENLRKKPENIPQPISNTSRANLNKLLTDYTEMKKAILHVYWEEFQKDPVGLMSRVAQPASKKIDQNKLKPEMDEKGNLTTAGFACSQCGQPLFVYKLEQVSEKGKAYTNYFGRCNVAEHEKLILLAQLKPEKDSDEAVTYSLGKFGQRALDFYSIHVTKESTHPVKPLAQIAGNRYASTPVGKALSDACMGTIASFLSKYQDIIIEHQKVVKGNQKRLESLRELAGKENLEYPSVTLPPQPHTKEGVDAYNEVIARVRMWVNLNLWQKLKLSRDDAKPLLRLKGFPSFPLVERQANEVDWWDMVCNVKKLINEKKEDGKVFWQNLAGYKRQEALRPYLSSEEDRKKGKKFARYQLGDLLLHLEKKHGEDWGKVYDEAWERIDKKVEGLSKHIKLEEERRSEDAQSKAALTDWLRAKASFVIEGLKEADKDEFCRCELKLQKWYGDLRGKPFAIEAENSILDISGFSKQYNCAFIWQKDGVKKLNLYLIINYFKGGKLRFKKIKPEAFEANRFYTVINKKSGEIVIMEVNFNFDDPNLIILPLAFGKRQGREFIWNDLLSLETGSLKLANGRVIEKTLYNRRTRQDEPALFVALTFERREVLDSSNIKPMNLIGVDRGENIPAVIALTDPEGCPLSRFKDSLGNPTHILRIGESYKEKQRTIQAKKEVEQRRAGGYSRKYASKAKNLADDMVRNTARDLLYYAVTQDAMLIFENLSRGFGRQGKRTFMAERQYTRMEDWLTAKLAYEGLPSKTYLSKTLAQYTSKTCSNCGFTITSADYDRVLEKLKKTATGWMTTINGKELKVEGQITYYNRYKRQNVVKDLSVELDRLSEESVNNDISSWTKGRQGEALSLLKKRFSHRPVQEKFVCLNCGFETHADEQAALNIARSWLFLRSQEYKKYQTNKTTGNTDKRAFVETWQSFYRKKLKEVWKPAV

SEQ ID NO: 47588 - protein, 978 aa, synthetic construct
  REGION 1..978: note = engineered CasX variant
QEIKRINKIRRRLVKDSNTKKAGKTGPMKTLLVRVMTPDLRERLENLRKKPENIPQPISNTSRANLNKLLTDYTEMKKAILHVYWEEFQKDPVGLMSRVAQPASKKIDQNKLKPEMDEKGNLTTAGFACSQCGQPLFVYKLEQVSEKGKAYTNYFGRCNVAEHEKLILLAQLKPEKDSDEAVTYSLGKFGQRALDFYSIHVTKESTHPVKPLAQIAGNRYASAPVGKALSDACMGTIASFLSKYQDIIIEHQKVVKGNQKRLESLRELAGKENLEYPSVTLPPQPHTKEGVDAYNEVIARVRMWVNLNLWQKLKLSRDDAKPLLRLKGFPSFPLVERQANEVDWWDMVCNVKKLINEKKEDGKVFWQNLAGYKRQEALRPYLSSEEDRKKGKKFARYQLGDLLLHLEKKHGEDWGKVYDEAWERIDKKVEGLSKHIKLEEERRSEDAQSKAALTDWLRAKASFVIEGLKEADKDEFCRCELKLQKWYGDLRGKPFAIEAENSILDISGFSKQYNCAFIWQKDGVKKLNLYLIINYFKGGKLRFKKIKPEAFEANRFYTVINKKSGEIVIMEVNFNFDDPNLIILPLAFGKRQGREFIWNDLLSLETGSLKLANGRVIEKTLYNRRTRQDEPALFVALTFERREVLDSSNIKPMNLIGVDRGENIPAVIALTDPEGCPLSRFKDSLGNPTHILRIGESYKEKQRTIQAKKEVEQRRAGGYSRKYASKAKNLADDMVRNTARDLLYYAVTQDAMLIFENLSRGFGRQGKRTFMAERQYTRMEDWLTAKLAYEGLPSKTYLSKTLAQYTSKTCSNCGFTITSADYDRVLEKLKKTATGWMTTINGKELKVEGQITYYNRYKRQNVVKDLSVELDRLSEESVNNDISSWTKGRQGEALSLLKKRFSHRPVQEKFVCLNCGFETHADEQAALNIARSWLFLRSQEYKKYQTNKTTGNTDKRAFVETWQSFYRKKLKEVWKPAV

SEQ ID NO: 47589 - protein, 978 aa, synthetic construct
  REGION 1..978: note = engineered CasX variant
QEIKRINKIRRRLVKDSNTKKAGKTGPMKTLLVRVMTPDLRERLENLRKKPENIPQPISNTSRANLNKLLTDYTEMKKAILHVYWEEFQKDPVGLMSRVAQPASKKIDQNKLKPEMDEKGNLTTAGFACSQCGQPLFVYKLEQVSEKGKAYTNYFGRCNVAEHEKLILLAQLKPEKDSDEAVTYSLGKFGQRALDFYSIHVTKESTHPVKPLAQIAGNRYASVPVGKALSDACMGTIASFLSKYQDIIIEHQKVVKGNQKRLESLRELAGKENLEYPSVTLPPQPHTKEGVDAYNEVIARVRMWVNLNLWQKLKLSRDDAKPLLRLKGFPSFPLVERQANEVDWWDMVCNVKKLINEKKEDGKVFWQNLAGYKRQEALRPYLSSEEDRKKGKKFARYQLGDLLLHLEKKHGEDWGKVYDEAWERIDKKVEGLSKHIKLEEERRSEDAQSKAALTDWLRAKASFVIEGLKEADKDEFCRCELKLQKWYGDLRGKPFAIEAENSILDISGFSKQYNCAFIWQKDGVKKLNLYLIINYFKGGKLRFKKIKPEAFEANRFYTVINKKSGEIVIMEVNFNFDDPNLIILPLAFGKRQGREFIWNDLLSLETGSLKLANGRVIEKTLYNRRTRQDEPALFVALTFERREVLDSSNIKPMNLIGVDRGENIPAVIALTDPEGCPLSRFKDSLGNPTHILRIGESYKEKQRTIQAKKEVEQRRAGGYSRKYASKAKNLADDMVRNTARDLLYYAVTQDAMLIFENLSRGFGRQGKRTFMAERQYTRMEDWLTAKLAYEGLPSKTYLSKTLAQYTSKTCSNCGFTITSADYDRVLEKLKKTATGWMTTINGKELKVEGQITYYNRYKRQNVVKDLSVELDRLSEESVNNDISSWTKGRQGEALSLLKKRFSHRPVQEKFVCLNCGFETHADEQAALNIARSWLFLRSQEYKKYQTNKTTGNTDKRAFVETWQSFYRKKLKEVWKPAV

SEQ ID NO: 47590 - protein, 978 aa, synthetic construct
  REGION 1..978: note = engineered CasX variant
QEIKRINKIRRRLVKDSNTKKAGKTGPMKTLLVRVMTPDLRERLENLRKKPENIPQPISNTSRANLNKLLTDYTEMKKAILHVYWEEFQKDPVGLMSRVAQPASKKIDQNKLKPEMDEKGNLTTAGFACSQCGQPLFVYKLEQVSEKGKAYTNYFGRCNVAEHEKLIKLAQLKPEKDSDEAVTYSLGKFGQRALDFYSIHVTKESTHPVKPLAQIAGNRYASGPVGKALSDACMGTIASFLSKYQDIIIEHQKVVKGNQKRLESLRELAGKENLEYPSVTLPPQPHTKEGVDAYNEVIARVRMWVNLNLWQKLKLSRDDAKPLLRLKGFPSFPLVERQANEVDWWDMVCNVKKLINEKKEDGKVFWQNLAGYKRQEALRPYLSSEEDRKKGKKFARYQLGDLLLHLEKKHGEDWGKVYDEAWERIDKKVEGLSKHIKLEEERRSEDAQSKAALTDWLRAKASFVIEGLKEADKDEFCRCELKLQKWYGDLRGKPFAIEAENSILDISGFSKQYNCAFIWQKDGVKKLNLYLIINYFKGGKLRFKKIKPEAFEANRFYTVINKKSGEIVIMEVNFNFDDPNLIILPLAFGKRQGREFIWNDLLSLETGSLKLANGRVIEKTLYNRRTRQDEPALFVALTFERREVLDSSNIKPMNLIGVDRGENIPAVIALTDPEGCPLSRFKDSLGNPTHILRIGESYKEKQRTIQAKKEVEQRRAGGYSRKYASKAKNLADDMVRNTARDLLYYAVTQDAMLIFENLSRGFGRQGKRTFMAERQYTRMEDWLTAKLAYEGLPSKTYLSKTLAQYTSKTCSNCGFTITSADYDRVLEKLKKTATGWMTTINGKELKVEGQITYYNRYKRQNVVKDLSVELDRLSEESVNNDISSWTKGRQGEALSLLKKRFSHRPVQEKFVCLNCGFETHADEQAALNIARSWLFLRSQEYKKYQTNKTTGNTDKRAFVETWQSFYRKKLKEVWKPAV

SEQ ID NO: 47591 - protein, 977 aa, synthetic construct
  REGION 1..977: note = engineered CasX variant
QEIKRINKIRRRLVKDSNTKKAGKTGPMKTLLVRVMTPDLRERLENLRKKPENIPQPISNTSRANLNKLLTDYTEMKKAILHVYWEEFQKDPVGLMSRVAQPASKKIDQNKLKPEMDEKGNLTTAGFACSQCGQPLFVYKLEQVSEKGKAYTNYFGRCNVAEHEKLILLAQLKPEKDSDEAVTYSLGKFGQRALDFYSIHVTKESTHPVKPLAQIAGNRYASPVGKALSDACMGTIASFLSKYQDIIIEHQKVVKGNQKRLESLRELAGKENLEYPSVTLPPQPHTKEGVDAYNEVIARVRMWVNLNLWQKLKLSRDDAKPLLRLKGFPSFPLVERQANEVDWWDMVCNVKKLINEKKEDGKVFWQNLAGYKRQEALRPYLSSEEDRKKGKKFARYQLGDLLLHLEKKHGEDWGKVYDEAWERIDKKVEGLSKHIKLEEERRSEDAQSKAALTDWLRAKASFVIEGLKEADKDEFCRCELKLQKWYGDLRGKPFAIEAENSILDISGFSKQYNCAFIWQKDGVKKLNLYLIINYFKGGKLRFKKIKPEAFEANRFYTVINKKSGEIVIMEVNFNFDDPNLIILPLAFGKRQGREFIWNDLLSLETGSLKLANGRVIEKTLYNRRTRQDEPALFVALTFERREVLDSSNIKPMNLIGVDRGENIPAVIALTDPEGCPLSRFKDSLGNPTHILRIGESYKEKQRTIQAKKEVEQRRAGGYSRKYASKAKNLADDMVRNTARDLLYYAVTQDAMLIFENLSRGFGRQGKRTFMAERQYTRMEDWLTAKLAYEGLPSKTYLSKTLAQYTSKTCSNCGFTITSADYDRVLEKLKKTATGWMTTINGKELKVEGQITYYNRYKRQNVVKDLSVELDRLSEESVNNDISSWTKGRQGEALSLLKKRFSHRPVQEKFVCLNCGFETHADEQAALNIARSWLFLRSQEYKKYQTNKTTGNTDKRAFVETWQSFYRKKLKEVWKPAV

SEQ ID NO: 47592 - protein, 978 aa, synthetic construct
  REGION 1..978: note = engineered CasX variant
QEIKRINKIRRRLVKDSNTKKAGKTGPMKTLLVRVMTPDLRERLENLRKKPENIPQPISNTSRANLNKLLTDYTEMKKAILHVYWEEFQKDPVGLMSRVAQPASKKIDQNKLKPEMDEKGNLTTAGFACSQCGQPLFVYKLEQVSEKGKAYTNYFGRCNVAEHEKLILLAQLKPEKDSDEAVTYSLGKFGQRALDFYSIHVTKESTHPVKPLAQIAGNRYASYPVGKALSGACMGTIASFLSKYQDIIIEHQKVVKGNQKRLESLRELAGKENLEYPSVTLPPQPHTKEGVDAYNEVIARVRMWVNLNLWQKLKLSRDDAKPLLRLKGFPSFPLVERQANEVDWWDMVCNVKKLINEKKEDGKVFWQNLAGYKRQEALRPYLSSEEDRKKGKKFARYQLGDLLLHLEKKHGEDWGKVYDEAWERIDKKVEGLSKHIKLEEERRSEDAQSKAALTDWLRAKASFVIEGLKEADKDEFCRCELKLQKWYGDLRGKPFAIEAENSILDISGFSKQYNCAFIWQKDGVKKLNLYLIINYFKGGKLRFKKIKPEAFEANRFYTVINKKSGEIVPMEVNFNFDDPNLIILPLAFGKRQGREFIWNDLLSLETGSLKLANGRVIEKTLYNRRTRQDEPALFVALTFERREVLDSSNIKPMNLIGVDRGENIPAVIALTDPEGCPLSRFKDSLGNPTHILRIGESYKEKQRTIQAKKEVEQRRAGGYSRKYASKAKNLADDMVRNTARDLLYYAVTQDAMLIFENLSRGFGRQGKRTFMAERQYTRMEDWLTAKLAYEGLPSKTYLSKTLAQYTSKTCSNCGFTITSADYDRVLEKLKKTATGWMTTINGKELKVEGQITYYNRYKRQNVVKDLSVELDRLSEESVNNDISSWTKGRSGEALSLLKKRFSHRPVQEKFVCLNCEFETHADEQAALNIARSWLFLRSQEYKKYQTNKTTGNTDKRAFVETWQSFYRKKLKEVWKPAV

SEQ ID NO: 47593 - protein, 978 aa, synthetic construct
  REGION 1..978: note = engineered CasX variant
QEIKRINKIRRRLVKDSNTKKAGKTGPMKTLLVRVMTPDLRERLENLRKKPENIPQPISNTSRANLNKLLTDYTEMKKAILHVYWEEFQKDPVGLMSRVAQPASKKIDQNKLKPEMDEKGNLTTAGFACSQCGQPLFVYKLEQVSEKGKAYTNYFGRCNVAEHEKLILLAQLKPEKDSDEAVTYSLGKFGQRALDFYSIHVTKESTHPVKPLAQIAGNRYASHPVGKALSGACMGTIASFLSKYQDIIIEHQKVVKGNQKRLESLRELAGKENLEYPSVTLPPQPHTKEGVDAYNEVIARVRMWVNLNLWQKLKLSRDDAKPLLRLKGFPSFPLVERQANEVDWWDMVCNVKKLINEKKEDGKVFWQNLAGYKRQEALRPYLSSEEDRKKGKKFARYQLGDLLLHLEKKHGEDWGKVYDEAWERIDKKVEGLSKHIKLEEERRSEDAQSKAALTDWLRAKASFVIEGLKEADKDEFCRCELKLQKWYGDLRGKPFAIEAENSILDISGFSKQYNCAFIWQKDGVKKLNLYLIINYFKGGKLRFKKIKPEAFEANRFYTVINKKSGEIVPMEVNFNFDDPNLIILPLAFGKRQGREFIWNDLLSLETGSLKLANGRVIEKTLYNRRTRQDEPALFVALTFERREVLDSSNIKPMNLIGVDRGENIPAVIALTDPEGCPLSRFKDSLGNPTHILRIGESYKEKQRTIQAKKEVEQRRAGGYSRKYASKAKNLADDMVRNTARDLLYYAVTQDAMLIFENLSRGFGRQGKRTFMAERQYTRMEDWLTAKLAYEGLPSKTYLSKTLAQYTSKTCSNCGFTITSADYDRVLEKLKKTATGWMTTINGKELKVEGQITYYNRYKRQNVVKDLSVELDRLSEESVNNDISSWTKGRSGEALSLLKKRFSHRPVQEKFVCLNCEFETHADEQAALNIARSWLFLRSQEYKKYQTNKTTGNTDKRAFVETWQSFYRKKLKEVWKPAV

SEQ ID NO: 47594 - protein, 978 aa, synthetic construct
  REGION 1..978: note = engineered CasX variant
QEIKRINKIRRRLVKDSNTKKAGKTGPMKTLLVRVMTPDLRERLENLRKKPENIPQPISNTSRANLNKLLTDYTEMKKAILHVYWEEFQKDPVGLMSRVAQPASKKIDQNKLKPEMDEKGNLTTAGFACSQCGQPLFVYKLEQVSEKGKAYTNYFGRCNVAEHEKLILLAQLKPEKDSDEAVTYSLGKFGQRALDFYSIHVTKESTHPVKPLAQIAGNRYASSPVGKALSGACMGTIASFLSKYQDIIIEHQKVVKGNQKRLESLRELAGKENLEYPSVTLPPQPHTKEGVDAYNEVIARVRMWVNLNLWQKLKLSRDDAKPLLRLKGFPSFPLVERQANEVDWWDMVCNVKKLINEKKEDGKVFWQNLAGYKRQEALRPYLSSEEDRKKGKKFARYQLGDLLLHLEKKHGEDWGKVYDEAWERIDKKVEGLSKHIKLEEERRSEDAQSKAALTDWLRAKASFVIEGLKEADKDEFCRCELKLQKWYGDLRGKPFAIEAENSILDISGFSKQYNCAFIWQKDGVKKLNLYLIINYFKGGKLRFKKIKPEAFEANRFYTVINKKSGEIVPMEVNFNFDDPNLIILPLAFGKRQGREFIWNDLLSLETGSLKLANGRVIEKTLYNRRTRQDEPALFVALTFERREVLDSSNIKPMNLIGVDRGENIPAVIALTDPEGCPLSRFKDSLGNPTHILRIGESYKEKQRTIQAKKEVEQRRAGGYSRKYASKAKNLADDMVRNTARDLLYYAVTQDAMLIFENLSRGFGRQGKRTFMAERQYTRMEDWLTAKLAYEGLPSKTYLSKTLAQYTSKTCSNCGFTITSADYDRVLEKLKKTATGWMTTINGKELKVEGQITYYNRYKRQNVVKDLSVELDRLSEESVNNDISSWTKGRSGEALSLLKKRFSHRPVQEKFVCLNCEFETHADEQAALNIARSWLFLRSQEYKKYQTNKTTGNTDKRAFVETWQSFYRKKLKEVWKPAV

SEQ ID NO: 47595 - protein, 978 aa, synthetic construct
  REGION 1..978: note = engineered CasX variant
QEIKRINKIRRRLVKDSNTKKAGKTGPMKTLLVRVMTPDLRERLENLRKKPENIPQPISNTSRANLNKLLTDYTEMKKAILHVYWEEFQKDPVGLMSRVAQPASKKIDQNKLKPEMDEKGNLTTAGFACSQCGQPLFVYKLEQVSEKGKAYTNYFGRCNVAEHEKLILLAQLKPEKDSDEAVTYSLGKFGQRALDFYSIHVTKESTHPVKPLAQIAGNRYASTPVGKALSGACMGTIASFLSKYQDIIIEHQKVVKGNQKRLESLRELAGKENLEYPSVTLPPQPHTKEGVDAYNEVIARVRMWVNLNLWQKLKLSRDDAKPLLRLKGFPSFPLVERQANEVDWWDMVCNVKKLINEKKEDGKVFWQNLAGYKRQEALRPYLSSEEDRKKGKKFARYQLGDLLLHLEKKHGEDWGKVYDEAWERIDKKVEGLSKHIKLEEERRSEDAQSKAALTDWLRAKASFVIEGLKEADKDEFCRCELKLQKWYGDLRGKPFAIEAENSILDISGFSKQYNCAFIWQKDGVKKLNLYLIINYFKGGKLRFKKIKPEAFEANRFYTVINKKSGEIVPMEVNFNFDDPNLIILPLAFGKRQGREFIWNDLLSLETGSLKLANGRVIEKTLYNRRTRQDEPALFVALTFERREVLDSSNIKPMNLIGVDRGENIPAVIALTDPEGCPLSRFKDSLGNPTHILRIGESYKEKQRTIQAKKEVEQRRAGGYSRKYASKAKNLADDMVRNTARDLLYYAVTQDAMLIFENLSRGFGRQGKRTFMAERQYTRMEDWLTAKLAYEGLPSKTYLSKTLAQYTSKTCSNCGFTITSADYDRVLEKLKKTATGWMTTINGKELKVEGQITYYNRYKRQNVVKDLSVELDRLSEESVNNDISSWTKGRSGEALSLLKKRFSHRPVQEKFVCLNCEFETHADEQAALNIARSWLFLRSQEYKKYQTNKTTGNTDKRAFVETWQSFYRKKLKEVWKPAV

SEQ ID NO: 47596 - protein, 978 aa, synthetic construct
  REGION 1..978: note = engineered CasX variant
QEIKRINKIRRRLVKDSNTKKAGKTGPMKTLLVRVMTPDLRERLENLRKKPENIPQPISNTSRANLNKLLTDYTEMKKAILHVYWEEFQKDPVGLMSRVAQPASKKIDQNKLKPEMDEKGNLTTAGFACSQCGQPLFVYKLEQVSEKGKAYTNYFGRCNVAEHEKLILLAQLKPEKDSDEAVTYSLGKFGQRALDFYSIHVTKESTHPVKPLAQIAGNRYASAPVGKALSGACMGTIASFLSKYQDIIIEHQKVVKGNQKRLESLRELAGKENLEYPSVTLPPQPHTKEGVDAYNEVIARVRMWVNLNLWQKLKLSRDDAKPLLRLKGFPSFPLVERQANEVDWWDMVCNVKKLINEKKEDGKVFWQNLAGYKRQEALRPYLSSEEDRKKGKKFARYQLGDLLLHLEKKHGEDWGKVYDEAWERIDKKVEGLSKHIKLEEERRSEDAQSKAALTDWLRAKASFVIEGLKEADKDEFCRCELKLQKWYGDLRGKPFAIEAENSILDISGFSKQYNCAFIWQKDGVKKLNLYLIINYFKGGKLRFKKIKPEAFEANRFYTVINKKSGEIVPMEVNFNFDDPNLIILPLAFGKRQGREFIWNDLLSLETGSLKLANGRVIEKTLYNRRTRQDEPALFVALTFERREVLDSSNIKPMNLIGVDRGENIPAVIALTDPEGCPLSRFKDSLGNPTHILRIGESYKEKQRTIQAKKEVEQRRAGGYSRKYASKAKNLADDMVRNTARDLLYYAVTQDAMLIFENLSRGFGRQGKRTFMAERQYTRMEDWLTAKLAYEGLPSKTYLSKTLAQYTSKTCSNCGFTITSADYDRVLEKLKKTATGWMTTINGKELKVEGQITYYNRYKRQNVVKDLSVELDRLSEESVNNDISSWTKGRSGEALSLLKKRFSHRPVQEKFVCLNCEFETHADEQAALNIARSWLFLRSQEYKKYQTNKTTGNTDKRAFVETWQSFYRKKLKEVWKPAV

SEQ ID NO: 47597 - protein, 978 aa, synthetic construct
  REGION 1..978: note = engineered CasX variant
QEIKRINKIRRRLVKDSNTKKAGKTGPMKTLLVRVMTPDLRERLENLRKKPENIPQPISNTSRANLNKLLTDYTEMKKAILHVYWEEFQKDPVGLMSRVAQPASKKIDQNKLKPEMDEKGNLTTAGFACSQCGQPLFVYKLEQVSEKGKAYTNYFGRCNVAEHEKLILLAQLKPEKDSDEAVTYSLGKFGQRALDFYSIHVTKESTHPVKPLAQIAGNRYASVPVGKALSGACMGTIASFLSKYQDIIIEHQKVVKGNQKRLESLRELAGKENLEYPSVTLPPQPHTKEGVDAYNEVIARVRMWVNLNLWQKLKLSRDDAKPLLRLKGFPSFPLVERQANEVDWWDMVCNVKKLINEKKEDGKVFWQNLAGYKRQEALRPYLSSEEDRKKGKKFARYQLGDLLLHLEKKHGEDWGKVYDEAWERIDKKVEGLSKHIKLEEERRSEDAQSKAALTDWLRAKASFVIEGLKEADKDEFCRCELKLQKWYGDLRGKPFAIEAENSILDISGFSKQYNCAFIWQKDGVKKLNLYLIINYFKGGKLRFKKIKPEAFEANRFYTVINKKSGEIVPMEVNFNFDDPNLIILPLAFGKRQGREFIWNDLLSLETGSLKLANGRVIEKTLYNRRTRQDEPALFVALTFERREVLDSSNIKPMNLIGVDRGENIPAVIALTDPEGCPLSRFKDSLGNPTHILRIGESYKEKQRTIQAKKEVEQRRAGGYSRKYASKAKNLADDMVRNTARDLLYYAVTQDAMLIFENLSRGFGRQGKRTFMAERQYTRMEDWLTAKLAYEGLPSKTYLSKTLAQYTSKTCSNCGFTITSADYDRVLEKLKKTATGWMTTINGKELKVEGQITYYNRYKRQNVVKDLSVELDRLSEESVNNDISSWTKGRSGEALSLLKKRFSHRPVQEKFVCLNCEFETHADEQAALNIARSWLFLRSQEYKKYQTNKTTGNTDKRAFVETWQSFYRKKLKEVWKPAV

SEQ ID NO: 47598 - protein, 978 aa, synthetic construct
  REGION 1..978: note = engineered CasX variant
QEIKRINKIRRRLVKDSNTKKAGKTGPMKTLLVRVMTPDLRERLENLRKKPENIPQPISNTSRANLNKLLTDYTEMKKAILHVYWEEFQKDPVGLMSRVAQPASKKIDQNKLKPEMDEKGNLTTAGFACSQCGQPLFVYKLEQVSEKGKAYTNYFGRCNVAEHEKLIKLAQLKPEKDSDEAVTYSLGKFGQRALDFYSIHVTKESTHPVKPLAQIAGNRYASGPVGKALSGACMGTIASFLSKYQDIIIEHQKVVKGNQKRLESLRELAGKENLEYPSVTLPPQPHTKEGVDAYNEVIARVRMWVNLNLWQKLKLSRDDAKPLLRLKGFPSFPLVERQANEVDWWDMVCNVKKLINEKKEDGKVFWQNLAGYKRQEALRPYLSSEEDRKKGKKFARYQLGDLLLHLEKKHGEDWGKVYDEAWERIDKKVEGLSKHIKLEEERRSEDAQSKAALTDWLRAKASFVIEGLKEADKDEFCRCELKLQKWYGDLRGKPFAIEAENSILDISGFSKQYNCAFIWQKDGVKKLNLYLIINYFKGGKLRFKKIKPEAFEANRFYTVINKKSGEIVPMEVNFNFDDPNLIILPLAFGKRQGREFIWNDLLSLETGSLKLANGRVIEKTLYNRRTRQDEPALFVALTFERREVLDSSNIKPMNLIGVDRGENIPAVIALTDPEGCPLSRFKDSLGNPTHILRIGESYKEKQRTIQAKKEVEQRRAGGYSRKYASKAKNLADDMVRNTARDLLYYAVTQDAMLIFENLSRGFGRQGKRTFMAERQYTRMEDWLTAKLAYEGLPSKTYLSKTLAQYTSKTCSNCGFTITSADYDRVLEKLKKTATGWMTTINGKELKVEGQITYYNRYKRQNVVKDLSVELDRLSEESVNNDISSWTKGRSGEALSLLKKRFSHRPVQEKFVCLNCEFETHADEQAALNIARSWLFLRSQEYKKYQTNKTTGNTDKRAFVETWQSFYRKKLKEVWKPAV

SEQ ID NO: 47599 - protein, 977 aa, synthetic construct
  REGION 1..977: note = engineered CasX variant
QEIKRINKIRRRLVKDSNTKKAGKTGPMKTLLVRVMTPDLRERLENLRKKPENIPQPISNTSRANLNKLLTDYTEMKKAILHVYWEEFQKDPVGLMSRVAQPASKKIDQNKLKPEMDEKGNLTTAGFACSQCGQPLFVYKLEQVSEKGKAYTNYFGRCNVAEHEKLILLAQLKPEKDSDEAVTYSLGKFGQRALDFYSIHVTKESTHPVKPLAQIAGNRYASPVGKALSGACMGTIASFLSKYQDIIIEHQKVVKGNQKRLESLRELAGKENLEYPSVTLPPQPHTKEGVDAYNEVIARVRMWVNLNLWQKLKLSRDDAKPLLRLKGFPSFPLVERQANEVDWWDMVCNVKKLINEKKEDGKVFWQNLAGYKRQEALRPYLSSEEDRKKGKKFARYQLGDLLLHLEKKHGEDWGKVYDEAWERIDKKVEGLSKHIKLEEERRSEDAQSKAALTDWLRAKASFVIEGLKEADKDEFCRCELKLQKWYGDLRGKPFAIEAENSILDISGFSKQYNCAFIWQKDGVKKLNLYLIINYFKGGKLRFKKIKPEAFEANRFYTVINKKSGEIVPMEVNFNFDDPNLIILPLAFGKRQGREFIWNDLLSLETGSLKLANGRVIEKTLYNRRTRQDEPALFVALTFERREVLDSSNIKPMNLIGVDRGENIPAVIALTDPEGCPLSRFKDSLGNPTHILRIGESYKEKQRTIQAKKEVEQRRAGGYSRKYASKAKNLADDMVRNTARDLLYYAVTQDAMLIFENLSRGFGRQGKRTFMAERQYTRMEDWLTAKLAYEGLPSKTYLSKTLAQYTSKTCSNCGFTITSADYDRVLEKLKKTATGWMTTINGKELKVEGQITYYNRYKRQNVVKDLSVELDRLSEESVNNDISSWTKGRSGEALSLLKKRFSHRPVQEKFVCLNCEFETHADEQAALNIARSWLFLRSQEYKKYQTNKTTGNTDKRAFVETWQSFYRKKLKEVWKPAV

SEQ ID NO: 47600 - protein, 978 aa, synthetic construct
  REGION 1..978: note = engineered CasX variant
QEIKRINKIRRRLVKDSNTKKAGKTGPMKTLLVRVMTPDLRERLENLRKKPENIPQPISNTSRANLNKLLTDYTEMKKAILHVYWEEFQKDPVGLMSRVAQPASKKIDQNKLKPEMDEKGNLTTAGFACSQCGQPLFVYKLEQVSEKGKAYTNYFGRCNVAEHEKLILLAQLKPEKDSDEAVTYSLGKFGQRALDFYSIHVTKESTHPVKPLAQIAGNRYASYPVGKALSDACMGTIASFLSKYQDIIIEHQKVVKGNQKRLESLRELAGKENLEYPSVTLPPQPHTKEGVDAYNEVIARVRMWVNLNLWQKLKLSRDDAKPLLRLKNFPSFPLVERQANEVDWWDMVCNVKKLINEKKEDGKVFWQNLAGYKRQEALRPYLSSEEDRKKGKKFARYQLGDLLLHLEKKHGEDWGKVYDEAWERIDKKVEGLSKHIKLEEERRSEDAQSKAALTDWLRAKASFVIEGLKEADKDEFCRCELKLQKWYGDLRGKPFAIEAENSILDISGFSKQYNCAFIWQKDGVKKLNLYLIINYFKGGKLRFKKIKPEAFEANRFYTVINKKSGEIVPMEVNFNFDDPNLIILPLAFGKRQGREFIWNDLLSLETGSLKLANGRVIEKTLYNRRTRQDEPALFVALTFERREVLDSSNIKPMNLIGVDRGENIPAVIALTDPEGCPLSRFKDSLGNPTHILRIGESYKEKQRTIQAKKEVEQRRAGGYSRKYASKAKNLADDMVRNTARDLLYYAVTQDAMLIFENLSRGFGRQGKRTFMAERQYTRMEDWLTAKLAYEGLPSKTYLSKTLAQYTSKTCSNCGFTITSADYDRVLEKLKKTATGWMTTINGKELKVEGQITYYNRYKRQNVVKDLSVELDRLSEESVNNDISSWTKGRSGEALSLLKKRFSHRPVQEKFVCLNCEFETHADEQAALNIARSWLFLRSQEYKKYQTNKTTGNTDKRAFVETWQSFYRKKLKEVWKPAV

SEQ ID NO: 47601 - protein, 978 aa, synthetic construct
  REGION 1..978: note = engineered CasX variant
QEIKRINKIRRRLVKDSNTKKAGKTGPMKTLLVRVMTPDLRERLENLRKKPENIPQPISNTSRANLNKLLTDYTEMKKAILHVYWEEFQKDPVGLMSRVAQPASKKIDQNKLKPEMDEKGNLTTAGFACSQCGQPLFVYKLEQVSEKGKAYTNYFGRCNVAEHEKLILLAQLKPEKDSDEAVTYSLGKFGQRALDFYSIHVTKESTHPVKPLAQIAGNRYASHPVGKALSDACMGTIASFLSKYQDIIIEHQKVVKGNQKRLESLRELAGKENLEYPSVTLPPQPHTKEGVDAYNEVIARVRMWVNLNLWQKLKLSRDDAKPLLRLKNFPSFPLVERQANEVDWWDMVCNVKKLINEKKEDGKVFWQNLAGYKRQEALRPYLSSEEDRKKGKKFARYQLGDLLLHLEKKHGEDWGKVYDEAWERIDKKVEGLSKHIKLEEERRSEDAQSKAALTDWLRAKASFVIEGLKEADKDEFCRCELKLQKWYGDLRGKPFAIEAENSILDISGFSKQYNCAFIWQKDGVKKLNLYLIINYFKGGKLRFKKIKPEAFEANRFYTVINKKSGEIVPMEVNFNFDDPNLIILPLAFGKRQGREFIWNDLLSLETGSLKLANGRVIEKTLYNRRTRQDEPALFVALTFERREVLDSSNIKPMNLIGVDRGENIPAVIALTDPEGCPLSRFKDSLGNPTHILRIGESYKEKQRTIQAKKEVEQRRAGGYSRKYASKAKNLADDMVRNTARDLLYYAVTQDAMLIFENLSRGFGRQGKRTFMAERQYTRMEDWLTAKLAYEGLPSKTYLSKTLAQYTSKTCSNCGFTITSADYDRVLEKLKKTATGWMTTINGKELKVEGQITYYNRYKRQNVVKDLSVELDRLSEESVNNDISSWTKGRSGEALSLLKKRFSHRPVQEKFVCLNCEFETHADEQAALNIARSWLFLRSQEYKKYQTNKTTGNTDKRAFVETWQSFYRKKLKEVWKPAV

SEQ ID NO: 47602 - protein, 978 aa, synthetic construct
  REGION 1..978: note = engineered CasX variant
QEIKRINKIRRRLVKDSNTKKAGKTGPMKTLLVRVMTPDLRERLENLRKKPENIPQPISNTSRANLNKLLTDYTEMKKAILHVYWEEFQKDPVGLMSRVAQPASKKIDQNKLKPEMDEKGNLTTAGFACSQCGQPLFVYKLEQVSEKGKAYTNYFGRCNVAEHEKLILLAQLKPEKDSDEAVTYSLGKFGQRALDFYSIHVTKESTHPVKPLAQIAGNRYASSPVGKALSDACMGTIASFLSKYQDIIIEHQKVVKGNQKRLESLRELAGKENLEYPSVTLPPQPHTKEGVDAYNEVIARVRMWVNLNLWQKLKLSRDDAKPLLRLKNFPSFPLVERQANEVDWWDMVCNVKKLINEKKEDGKVFWQNLAGYKRQEALRPYLSSEEDRKKGKKFARYQLGDLLLHLEKKHGEDWGKVYDEAWERIDKKVEGLSKHIKLEEERRSEDAQSKAALTDWLRAKASFVIEGLKEADKDEFCRCELKLQKWYGDLRGKPFAIEAENSILDISGFSKQYNCAFIWQKDGVKKLNLYLIINYFKGGKLRFKKIKPEAFEANRFYTVINKKSGEIVPMEVNFNFDDPNLIILPLAFGKRQGREFIWNDLLSLETGSLKLANGRVIEKTLYNRRTRQDEPALFVALTFERREVLDSSNIKPMNLIGVDRGENIPAVIALTDPEGCPLSRFKDSLGNPTHILRIGESYKEKQRTIQAKKEVEQRRAGGYSRKYASKAKNLADDMVRNTARDLLYYAVTQDAMLIFENLSRGFGRQGKRTFMAERQYTRMEDWLTAKLAYEGLPSKTYLSKTLAQYTSKTCSNCGFTITSADYDRVLEKLKKTATGWMTTINGKELKVEGQITYYNRYKRQNVVKDLSVELDRLSEESVNNDISSWTKGRSGEALSLLKKRFSHRPVQEKFVCLNCEFETHADEQAALNIARSWLFLRSQEYKKYQTNKTTGNTDKRAFVETWQSFYRKKLKEVWKPAV

SEQ ID NO: 47603 - protein, 978 aa, synthetic construct
  REGION 1..978: note = engineered CasX variant
QEIKRINKIRRRLVKDSNTKKAGKTGPMKTLLVRVMTPDLRERLENLRKKPENIPQPISNTSRANLNKLLTDYTEMKKAILHVYWEEFQKDPVGLMSRVAQPASKKIDQNKLKPEMDEKGNLTTAGFACSQCGQPLFVYKLEQVSEKGKAYTNYFGRCNVAEHEKLILLAQLKPEKDSDEAVTYSLGKFGQRALDFYSIHVTKESTHPVKPLAQIAGNRYASTPVGKALSDACMGTIASFLSKYQDIIIEHQKVVKGNQKRLESLRELAGKENLEYPSVTLPPQPHTKEGVDAYNEVIARVRMWVNLNLWQKLKLSRDDAKPLLRLKNFPSFPLVERQANEVDWWDMVCNVKKLINEKKEDGKVFWQNLAGYKRQEALRPYLSSEEDRKKGKKFARYQLGDLLLHLEKKHGEDWGKVYDEAWERIDKKVEGLSKHIKLEEERRSEDAQSKAALTDWLRAKASFVIEGLKEADKDEFCRCELKLQKWYGDLRGKPFAIEAENSILDISGFSKQYNCAFIWQKDGVKKLNLYLIINYFKGGKLRFKKIKPEAFEANRFYTVINKKSGEIVPMEVNFNFDDPNLIILPLAFGKRQGREFIWNDLLSLETGSLKLANGRVIEKTLYNRRTRQDEPALFVALTFERREVLDSSNIKPMNLIGVDRGENIPAVIALTDPEGCPLSRFKDSLGNPTHILRIGESYKEKQRTIQAKKEVEQRRAGGYSRKYASKAKNLADDMVRNTARDLLYYAVTQDAMLIFENLSRGFGRQGKRTFMAERQYTRMEDWLTAKLAYEGLPSKTYLSKTLAQYTSKTCSNCGFTITSADYDRVLEKLKKTATGWMTTINGKELKVEGQITYYNRYKRQNVVKDLSVELDRLSEESVNNDISSWTKGRSGEALSLLKKRFSHRPVQEKFVCLNCEFETHADEQAALNIARSWLFLRSQEYKKYQTNKTTGNTDKRAFVETWQSFYRKKLKEVWKPAV

SEQ ID NO: 47604 - protein, 978 aa, synthetic construct
  REGION 1..978: note = engineered CasX variant
QEIKRINKIRRRLVKDSNTKKAGKTGPMKTLLVRVMTPDLRERLENLRKKPENIPQPISNTSRANLNKLLTDYTEMKKAILHVYWEEFQKDPVGLMSRVAQPASKKIDQNKLKPEMDEKGNLTTAGFACSQCGQPLFVYKLEQVSEKGKAYTNYFGRCNVAEHEKLILLAQLKPEKDSDEAVTYSLGKFGQRALDFYSIHVTKESTHPVKPLAQIAGNRYASAPVGKALSDACMGTIASFLSKYQDIIIEHQKVVKGNQKRLESLRELAGKENLEYPSVTLPPQPHTKEGVDAYNEVIARVRMWVNLNLWQKLKLSRDDAKPLLRLKNFPSFPLVERQANEVDWWDMVCNVKKLINEKKEDGKVFWQNLAGYKRQEALRPYLSSEEDRKKGKKFARYQLGDLLLHLEKKHGEDWGKVYDEAWERIDKKVEGLSKHIKLEEERRSEDAQSKAALTDWLRAKASFVIEGLKEADKDEFCRCELKLQKWYGDLRGKPFAIEAENSILDISGFSKQYNCAFIWQKDGVKKLNLYLIINYFKGGKLRFKKIKPEAFEANRFYTVINKKSGEIVPMEVNFNFDDPNLIILPLAFGKRQGREFIWNDLLSLETGSLKLANGRVIEKTLYNRRTRQDEPALFVALTFERREVLDSSNIKPMNLIGVDRGENIPAVIALTDPEGCPLSRFKDSLGNPTHILRIGESYKEKQRTIQAKKEVEQRRAGGYSRKYASKAKNLADDMVRNTARDLLYYAVTQDAMLIFENLSRGFGRQGKRTFMAERQYTRMEDWLTAKLAYEGLPSKTYLSKTLAQYTSKTCSNCGFTITSADYDRVLEKLKKTATGWMTTINGKELKVEGQITYYNRYKRQNVVKDLSVELDRLSEESVNNDISSWTKGRSGEALSLLKKRFSHRPVQEKFVCLNCEFETHADEQAALNIARSWLFLRSQEYKKYQTNKTTGNTDKRAFVETWQSFYRKKLKEVWKPAV

SEQ ID NO: 47605 - protein, 978 aa, synthetic construct
  REGION 1..978: note = engineered CasX variant
QEIKRINKIRRRLVKDSNTKKAGKTGPMKTLLVRVMTPDLRERLENLRKKPENIPQPISNTSRANLNKLLTDYTEMKKAILHVYWEEFQKDPVGLMSRVAQPASKKIDQNKLKPEMDEKGNLTTAGFACSQCGQPLFVYKLEQVSEKGKAYTNYFGRCNVAEHEKLILLAQLKPEKDSDEAVTYSLGKFGQRALDFYSIHVTKESTHPVKPLAQIAGNRYASVPVGKALSDACMGTIASFLSKYQDIIIEHQKVVKGNQKRLESLRELAGKENLEYPSVTLPPQPHTKEGVDAYNEVIARVRMWVNLNLWQKLKLSRDDAKPLLRLKNFPSFPLVERQANEVDWWDMVCNVKKLINEKKEDGKVFWQNLAGYKRQEALRPYLSSEEDRKKGKKFARYQLGDLLLHLEKKHGEDWGKVYDEAWERIDKKVEGLSKHIKLEEERRSEDAQSKAALTDWLRAKASFVIEGLKEADKDEFCRCELKLQKWYGDLRGKPFAIEAENSILDISGFSKQYNCAFIWQKDGVKKLNLYLIINYFKGGKLRFKKIKPEAFEANRFYTVINKKSGEIVPMEVNFNFDDPNLIILPLAFGKRQGREFIWNDLLSLETGSLKLANGRVIEKTLYNRRTRQDEPALFVALTFERREVLDSSNIKPMNLIGVDRGENIPAVIALTDPEGCPLSRFKDSLGNPTHILRIGESYKEKQRTIQAKKEVEQRRAGGYSRKYASKAKNLADDMVRNTARDLLYYAVTQDAMLIFENLSRGFGRQGKRTFMAERQYTRMEDWLTAKLAYEGLPSKTYLSKTLAQYTSKTCSNCGFTITSADYDRVLEKLKKTATGWMTTINGKELKVEGQITYYNRYKRQNVVKDLSVELDRLSEESVNNDISSWTKGRSGEALSLLKKRFSHRPVQEKFVCLNCEFETHADEQAALNIARSWLFLRSQEYKKYQTNKTTGNTDKRAFVETWQSFYRKKLKEVWKPAV

SEQ ID NO: 47606 - protein, 978 aa, synthetic construct
  REGION 1..978: note = engineered CasX variant
QEIKRINKIRRRLVKDSNTKKAGKTGPMKTLLVRVMTPDLRERLENLRKKPENIPQPISNTSRANLNKLLTDYTEMKKAILHVYWEEFQKDPVGLMSRVAQPASKKIDQNKLKPEMDEKGNLTTAGFACSQCGQPLFVYKLEQVSEKGKAYTNYFGRCNVAEHEKLIKLAQLKPEKDSDEAVTYSLGKFGQRALDFYSIHVTKESTHPVKPLAQIAGNRYASGPVGKALSDACMGTIASFLSKYQDIIIEHQKVVKGNQKRLESLRELAGKENLEYPSVTLPPQPHTKEGVDAYNEVIARVRMWVNLNLWQKLKLSRDDAKPLLRLKNFPSFPLVERQANEVDWWDMVCNVKKLINEKKEDGKVFWQNLAGYKRQEALRPYLSSEEDRKKGKKFARYQLGDLLLHLEKKHGEDWGKVYDEAWERIDKKVEGLSKHIKLEEERRSEDAQSKAALTDWLRAKASFVIEGLKEADKDEFCRCELKLQKWYGDLRGKPFAIEAENSILDISGFSKQYNCAFIWQKDGVKKLNLYLIINYFKGGKLRFKKIKPEAFEANRFYTVINKKSGEIVPMEVNFNFDDPNLIILPLAFGKRQGREFIWNDLLSLETGSLKLANGRVIEKTLYNRRTRQDEPALFVALTFERREVLDSSNIKPMNLIGVDRGENIPAVIALTDPEGCPLSRFKDSLGNPTHILRIGESYKEKQRTIQAKKEVEQRRAGGYSRKYASKAKNLADDMVRNTARDLLYYAVTQDAMLIFENLSRGFGRQGKRTFMAERQYTRMEDWLTAKLAYEGLPSKTYLSKTLAQYTSKTCSNCGFTITSADYDRVLEKLKKTATGWMTTINGKELKVEGQITYYNRYKRQNVVKDLSVELDRLSEESVNNDISSWTKGRSGEALSLLKKRFSHRPVQEKFVCLNCEFETHADEQAALNIARSWLFLRSQEYKKYQTNKTTGNTDKRAFVETWQSFYRKKLKEVWKPAV

SEQ ID NO: 47607 - protein, 977 aa, synthetic construct
  REGION 1..977: note = engineered CasX variant
QEIKRINKIRRRLVKDSNTKKAGKTGPMKTLLVRVMTPDLRERLENLRKKPENIPQPISNTSRANLNKLLTDYTEMKKAILHVYWEEFQKDPVGLMSRVAQPASKKIDQNKLKPEMDEKGNLTTAGFACSQCGQPLFVYKLEQVSEKGKAYTNYFGRCNVAEHEKLILLAQLKPEKDSDEAVTYSLGKFGQRALDFYSIHVTKESTHPVKPLAQIAGNRYASPVGKALSDACMGTIASFLSKYQDIIIEHQKVVKGNQKRLESLRELAGKENLEYPSVTLPPQPHTKEGVDAYNEVIARVRMWVNLNLWQKLKLSRDDAKPLLRLKNFPSFPLVERQANEVDWWDMVCNVKKLINEKKEDGKVFWQNLAGYKRQEALRPYLSSEEDRKKGKKFARYQLGDLLLHLEKKHGEDWGKVYDEAWERIDKKVEGLSKHIKLEEERRSEDAQSKAALTDWLRAKASFVIEGLKEADKDEFCRCELKLQKWYGDLRGKPFAIEAENSILDISGFSKQYNCAFIWQKDGVKKLNLYLIINYFKGGKLRFKKIKPEAFEANRFYTVINKKSGEIVPMEVNFNFDDPNLIILPLAFGKRQGREFIWNDLLSLETGSLKLANGRVIEKTLYNRRTRQDEPALFVALTFERREVLDSSNIKPMNLIGVDRGENIPAVIALTDPEGCPLSRFKDSLGNPTHILRIGESYKEKQRTIQAKKEVEQRRAGGYSRKYASKAKNLADDMVRNTARDLLYYAVTQDAMLIFENLSRGFGRQGKRTFMAERQYTRMEDWLTAKLAYEGLPSKTYLSKTLAQYTSKTCSNCGFTITSADYDRVLEKLKKTATGWMTTINGKELKVEGQITYYNRYKRQNVVKDLSVELDRLSEESVNNDISSWTKGRSGEALSLLKKRFSHRPVQEKFVCLNCEFETHADEQAALNIARSWLFLRSQEYKKYQTNKTTGNTDKRAFVETWQSFYRKKLKEVWKPAV

SEQ ID NO: 47608 - protein, 978 aa, synthetic construct
  REGION 1..978: note = engineered CasX variant
QEIKRINKIRRRLVKDSNTKKAGKTGPMKTLLVRVMTPDLRERLENLRKKPENIPQPISNTSRANLNKLLTDYTEMKKAILHVYWEEFQKDPVGLMSRVAQPASKKIDQNKLKPEMDEKGNLTTAGFACSQCGQPLFVYKLEQVSEKGKAYTNYFGRCNVAEHEKLILLAQLKPEKDSDEAVTYSLGKFGQRALDFYSIHVTKESTHPVKPLAQIAGNRYASYPVGKALSDACMGTIASFLSKYQDIIIEHQKVVKGNQKRLESLRELAGKENLEYPSVTLPPQPHTKEGVDAYNEVIARVRMWVNLNLWQKLKLSRDDAKPLLRLKGFPSFPLVERQANEVDWWDMVCNVKKLINEKKEDGKVFWQNLAGYKRQEALRPYLSSEEDRKKGKKFARYQLGDLLNHLEKKHGEDWGKVYDEAWERIDKKVEGLSKHIKLEEERRSEDAQSKAALTDWLRAKASFVIEGLKEADKDEFCRCELKLQKWYGDLRGKPFAIEAENSILDISGFSKQYNCAFIWQKDGVKKLNLYLIINYFKGGKLRFKKIKPEAFEANRFYTVINKKSGEIVPMEVNFNFDDPNLIILPLAFGKRQGREFIWNDLLSLETGSLKLANGRVIEKTLYNRRTRQDEPALFVALTFERREVLDSSNIKPMNLIGVDRGENIPAVIALTDPEGCPLSRFKDSLGNPTHILRIGESYKEKQRTIQAKKEVEQRRAGGYSRKYASKAKNLADDMVRNTARDLLYYAVTQDAMLIFENLSRGFGRQGKRTFMAERQYTRMEDWLTAKLAYEGLPSKTYLSKTLAQYTSKTCSNCGFTITSADYDRVLEKLKKTATGWMTTINGKELKVEGQITYYNRYKRQNVVKDLSVELDRLSEESVNNDISSWTKGRSGEALSLLKKRFSHRPVQEKFVCLNCEFETHADEQAALNIARSWLFLRSQEYKKYQTNKTTGNTDKRAFVETWQSFYRKKLKEVWKPAV

SEQ ID NO: 47609 - protein, 978 aa, synthetic construct
  REGION 1..978: note = engineered CasX variant
QEIKRINKIRRRLVKDSNTKKAGKTGPMKTLLVRVMTPDLRERLENLRKKPENIPQPISNTSRANLNKLLTDYTEMKKAILHVYWEEFQKDPVGLMSRVAQPASKKIDQNKLKPEMDEKGNLTTAGFACSQCGQPLFVYKLEQVSEKGKAYTNYFGRCNVAEHEKLILLAQLKPEKDSDEAVTYSLGKFGQRALDFYSIHVTKESTHPVKPLAQIAGNRYASHPVGKALSDACMGTIASFLSKYQDIIIEHQKVVKGNQKRLESLRELAGKENLEYPSVTLPPQPHTKEGVDAYNEVIARVRMWVNLNLWQKLKLSRDDAKPLLRLKGFPSFPLVERQANEVDWWDMVCNVKKLINEKKEDGKVFWQNLAGYKRQEALRPYLSSEEDRKKGKKFARYQLGDLLNHLEKKHGEDWGKVYDEAWERIDKKVEGLSKHIKLEEERRSEDAQSKAALTDWLRAKASFVIEGLKEADKDEFCRCELKLQKWYGDLRGKPFAIEAENSILDISGFSKQYNCAFIWQKDGVKKLNLYLIINYFKGGKLRFKKIKPEAFEANRFYTVINKKSGEIVPMEVNFNFDDPNLIILPLAFGKRQGREFIWNDLLSLETGSLKLANGRVIEKTLYNRRTRQDEPALFVALTFERREVLDSSNIKPMNLIGVDRGENIPAVIALTDPEGCPLSRFKDSLGNPTHILRIGESYKEKQRTIQAKKEVEQRRAGGYSRKYASKAKNLADDMVRNTARDLLYYAVTQDAMLIFENLSRGFGRQGKRTFMAERQYTRMEDWLTAKLAYEGLPSKTYLSKTLAQYTSKTCSNCGFTITSADYDRVLEKLKKTATGWMTTINGKELKVEGQITYYNRYKRQNVVKDLSVELDRLSEESVNNDISSWTKGRSGEALSLLKKRFSHRPVQEKFVCLNCEFETHADEQAALNIARSWLFLRSQEYKKYQTNKTTGNTDKRAFVETWQSFYRKKLKEVWKPAV

SEQ ID NO: 47610 - protein, 978 aa, synthetic construct
  REGION 1..978: note = engineered CasX variant
QEIKRINKIRRRLVKDSNTKKAGKTGPMKTLLVRVMTPDLRERLENLRKKPENIPQPISNTSRANLNKLLTDYTEMKKAILHVYWEEFQKDPVGLMSRVAQPASKKIDQNKLKPEMDEKGNLTTAGFACSQCGQPLFVYKLEQVSEKGKAYTNYFGRCNVAEHEKLILLAQLKPEKDSDEAVTYSLGKFGQRALDFYSIHVTKESTHPVKPLAQIAGNRYASSPVGKALSDACMGTIASFLSKYQDIIIEHQKVVKGNQKRLESLRELAGKENLEYPSVTLPPQPHTKEGVDAYNEVIARVRMWVNLNLWQKLKLSRDDAKPLLRLKGFPSFPLVERQANEVDWWDMVCNVKKLINEKKEDGKVFWQNLAGYKRQEALRPYLSSEEDRKKGKKFARYQLGDLLNHLEKKHGEDWGKVYDEAWERIDKKVEGLSKHIKLEEERRSEDAQSKAALTDWLRAKASFVIEGLKEADKDEFCRCELKLQKWYGDLRGKPFAIEAENSILDISGFSKQYNCAFIWQKDGVKKLNLYLIINYFKGGKLRFKKIKPEAFEANRFYTVINKKSGEIVPMEVNFNFDDPNLIILPLAFGKRQGREFIWNDLLSLETGSLKLANGRVIEKTLYNRRTRQDEPALFVALTFERREVLDSSNIKPMNLIGVDRGENIPAVIALTDPEGCPLSRFKDSLGNPTHILRIGESYKEKQRTIQAKKEVEQRRAGGYSRKYASKAKNLADDMVRNTARDLLYYAVTQDAMLIFENLSRGFGRQGKRTFMAERQYTRMEDWLTAKLAYEGLPSKTYLSKTLAQYTSKTCSNCGFTITSADYDRVLEKLKKTATGWMTTINGKELKVEGQITYYNRYKRQNVVKDLSVELDRLSEESVNNDISSWTKGRSGEALSLLKKRFSHRPVQEKFVCLNCEFETHADEQAALNIARSWLFLRSQEYKKYQTNKTTGNTDKRAFVETWQSFYRKKLKEVWKPAV

SEQ ID NO: 47611 - protein, 978 aa, synthetic construct
  REGION 1..978: note = engineered CasX variant
QEIKRINKIRRRLVKDSNTKKAGKTGPMKTLLVRVMTPDLRERLENLRKKPENIPQPISNTSRANLNKLLTDYTEMKKAILHVYWEEFQKDPVGLMSRVAQPASKKIDQNKLKPEMDEKGNLTTAGFACSQCGQPLFVYKLEQVSEKGKAYTNYFGRCNVAEHEKLILLAQLKPEKDSDEAVTYSLGKFGQRALDFYSIHVTKESTHPVKPLAQIAGNRYASTPVGKALSDACMGTIASFLSKYQDIIIEHQKVVKGNQKRLESLRELAGKENLEYPSVTLPPQPHTKEGVDAYNEVIARVRMWVNLNLWQKLKLSRDDAKPLLRLKGFPSFPLVERQANEVDWWDMVCNVKKLINEKKEDGKVFWQNLAGYKRQEALRPYLSSEEDRKKGKKFARYQLGDLLNHLEKKHGEDWGKVYDEAWERIDKKVEGLSKHIKLEEERRSEDAQSKAALTDWLRAKASFVIEGLKEADKDEFCRCELKLQKWYGDLRGKPFAIEAENSILDISGFSKQYNCAFIWQKDGVKKLNLYLIINYFKGGKLRFKKIKPEAFEANRFYTVINKKSGEIVPMEVNFNFDDPNLIILPLAFGKRQGREFIWNDLLSLETGSLKLANGRVIEKTLYNRRTRQDEPALFVALTFERREVLDSSNIKPMNLIGVDRGENIPAVIALTDPEGCPLSRFKDSLGNPTHILRIGESYKEKQRTIQAKKEVEQRRAGGYSRKYASKAKNLADDMVRNTARDLLYYAVTQDAMLIFENLSRGFGRQGKRTFMAERQYTRMEDWLTAKLAYEGLPSKTYLSKTLAQYTSKTCSNCGFTITSADYDRVLEKLKKTATGWMTTINGKELKVEGQITYYNRYKRQNVVKDLSVELDRLSEESVNNDISSWTKGRSGEALSLLKKRFSHRPVQEKFVCLNCEFETHADEQAALNIARSWLFLRSQEYKKYQTNKTTGNTDKRAFVETWQSFYRKKLKEVWKPAV

SEQ ID NO: 47612 - protein, 978 aa, synthetic construct
  REGION 1..978: note = engineered CasX variant
QEIKRINKIRRRLVKDSNTKKAGKTGPMKTLLVRVMTPDLRERLENLRKKPENIPQPISNTSRANLNKLLTDYTEMKKAILHVYWEEFQKDPVGLMSRVAQPASKKIDQNKLKPEMDEKGNLTTAGFACSQCGQPLFVYKLEQVSEKGKAYTNYFGRCNVAEHEKLILLAQLKPEKDSDEAVTYSLGKFGQRALDFYSIHVTKESTHPVKPLAQIAGNRYASAPVGKALSDACMGTIASFLSKYQDIIIEHQKVVKGNQKRLESLRELAGKENLEYPSVTLPPQPHTKEGVDAYNEVIARVRMWVNLNLWQKLKLSRDDAKPLLRLKGFPSFPLVERQANEVDWWDMVCNVKKLINEKKEDGKVFWQNLAGYKRQEALRPYLSSEEDRKKGKKFARYQLGDLLNHLEKKHGEDWGKVYDEAWERIDKKVEGLSKHIKLEEERRSEDAQSKAALTDWLRAKASFVIEGLKEADKDEFCRCELKLQKWYGDLRGKPFAIEAENSILDISGFSKQYNCAFIWQKDGVKKLNLYLIINYFKGGKLRFKKIKPEAFEANRFYTVINKKSGEIVPMEVNFNFDDPNLIILPLAFGKRQGREFIWNDLLSLETGSLKLANGRVIEKTLYNRRTRQDEPALFVALTFERREVLDSSNIKPMNLIGVDRGENIPAVIALTDPEGCPLSRFKDSLGNPTHILRIGESYKEKQRTIQAKKEVEQRRAGGYSRKYASKAKNLADDMVRNTARDLLYYAVTQDAMLIFENLSRGFGRQGKRTFMAERQYTRMEDWLTAKLAYEGLPSKTYLSKTLAQYTSKTCSNCGFTITSADYDRVLEKLKKTATGWMTTINGKELKVEGQITYYNRYKRQNVVKDLSVELDRLSEESVNNDISSWTKGRSGEALSLLKKRFSHRPVQEKFVCLNCEFETHADEQAALNIARSWLFLRSQEYKKYQTNKTTGNTDKRAFVETWQSFYRKKLKEVWKPAV

SEQ ID NO: 47613 - protein, 978 aa, synthetic construct
  REGION 1..978: note = engineered CasX variant
QEIKRINKIRRRLVKDSNTKKAGKTGPMKTLLVRVMTPDLRERLENLRKKPENIPQPISNTSRANLNKLLTDYTEMKKAILHVYWEEFQKDPVGLMSRVAQPASKKIDQNKLKPEMDEKGNLTTAGFACSQCGQPLFVYKLEQVSEKGKAYTNYFGRCNVAEHEKLILLAQLKPEKDSDEAVTYSLGKFGQRALDFYSIHVTKESTHPVKPLAQIAGNRYASVPVGKALSDACMGTIASFLSKYQDIIIEHQKVVKGNQKRLESLRELAGKENLEYPSVTLPPQPHTKEGVDAYNEVIARVRMWVNLNLWQKLKLSRDDAKPLLRLKGFPSFPLVERQANEVDWWDMVCNVKKLINEKKEDGKVFWQNLAGYKRQEALRPYLSSEEDRKKGKKFARYQLGDLLNHLEKKHGEDWGKVYDEAWERIDKKVEGLSKHIKLEEERRSEDAQSKAALTDWLRAKASFVIEGLKEADKDEFCRCELKLQKWYGDLRGKPFAIEAENSILDISGFSKQYNCAFIWQKDGVKKLNLYLIINYFKGGKLRFKKIKPEAFEANRFYTVINKKSGEIVPMEVNFNFDDPNLIILPLAFGKRQGREFIWNDLLSLETGSLKLANGRVIEKTLYNRRTRQDEPALFVALTFERREVLDSSNIKPMNLIGVDRGENIPAVIALTDPEGCPLSRFKDSLGNPTHILRIGESYKEKQRTIQAKKEVEQRRAGGYSRKYASKAKNLADDMVRNTARDLLYYAVTQDAMLIFENLSRGFGRQGKRTFMAERQYTRMEDWLTAKLAYEGLPSKTYLSKTLAQYTSKTCSNCGFTITSADYDRVLEKLKKTATGWMTTINGKELKVEGQITYYNRYKRQNVVKDLSVELDRLSEESVNNDISSWTKGRSGEALSLLKKRFSHRPVQEKFVCLNCEFETHADEQAALNIARSWLFLRSQEYKKYQTNKTTGNTDKRAFVETWQSFYRKKLKEVWKPAV

SEQ ID NO: 47614 - protein, 978 aa, synthetic construct
  REGION 1..978: note = engineered CasX variant
QEIKRINKIRRRLVKDSNTKKAGKTGPMKTLLVRVMTPDLRERLENLRKKPENIPQPISNTSRANLNKLLTDYTEMKKAILHVYWEEFQKDPVGLMSRVAQPASKKIDQNKLKPEMDEKGNLTTAGFACSQCGQPLFVYKLEQVSEKGKAYTNYFGRCNVAEHEKLIKLAQLKPEKDSDEAVTYSLGKFGQRALDFYSIHVTKESTHPVKPLAQIAGNRYASGPVGKALSDACMGTIASFLSKYQDIIIEHQKVVKGNQKRLESLRELAGKENLEYPSVTLPPQPHTKEGVDAYNEVIARVRMWVNLNLWQKLKLSRDDAKPLLRLKGFPSFPLVERQANEVDWWDMVCNVKKLINEKKEDGKVFWQNLAGYKRQEALRPYLSSEEDRKKGKKFARYQLGDLLNHLEKKHGEDWGKVYDEAWERIDKKVEGLSKHIKLEEERRSEDAQSKAALTDWLRAKASFVIEGLKEADKDEFCRCELKLQKWYGDLRGKPFAIEAENSILDISGFSKQYNCAFIWQKDGVKKLNLYLIINYFKGGKLRFKKIKPEAFEANRFYTVINKKSGEIVPMEVNFNFDDPNLIILPLAFGKRQGREFIWNDLLSLETGSLKLANGRVIEKTLYNRRTRQDEPALFVALTFERREVLDSSNIKPMNLIGVDRGENIPAVIALTDPEGCPLSRFKDSLGNPTHILRIGESYKEKQRTIQAKKEVEQRRAGGYSRKYASKAKNLADDMVRNTARDLLYYAVTQDAMLIFENLSRGFGRQGKRTFMAERQYTRMEDWLTAKLAYEGLPSKTYLSKTLAQYTSKTCSNCGFTITSADYDRVLEKLKKTATGWMTTINGKELKVEGQITYYNRYKRQNVVKDLSVELDRLSEESVNNDISSWTKGRSGEALSLLKKRFSHRPVQEKFVCLNCEFETHADEQAALNIARSWLFLRSQEYKKYQTNKTTGNTDKRAFVETWQSFYRKKLKEVWKPAV

SEQ ID NO: 47615 - protein, 977 aa, synthetic construct
  REGION 1..977: note = engineered CasX variant
QEIKRINKIRRRLVKDSNTKKAGKTGPMKTLLVRVMTPDLRERLENLRKKPENIPQPISNTSRANLNKLLTDYTEMKKAILHVYWEEFQKDPVGLMSRVAQPASKKIDQNKLKPEMDEKGNLTTAGFACSQCGQPLFVYKLEQVSEKGKAYTNYFGRCNVAEHEKLILLAQLKPEKDSDEAVTYSLGKFGQRALDFYSIHVTKESTHPVKPLAQIAGNRYASPVGKALSDACMGTIASFLSKYQDIIIEHQKVVKGNQKRLESLRELAGKENLEYPSVTLPPQPHTKEGVDAYNEVIARVRMWVNLNLWQKLKLSRDDAKPLLRLKGFPSFPLVERQANEVDWWDMVCNVKKLINEKKEDGKVFWQNLAGYKRQEALRPYLSSEEDRKKGKKFARYQLGDLLNHLEKKHGEDWGKVYDEAWERIDKKVEGLSKHIKLEEERRSEDAQSKAALTDWLRAKASFVIEGLKEADKDEFCRCELKLQKWYGDLRGKPFAIEAENSILDISGFSKQYNCAFIWQKDGVKKLNLYLIINYFKGGKLRFKKIKPEAFEANRFYTVINKKSGEIVPMEVNFNFDDPNLIILPLAFGKRQGREFIWNDLLSLETGSLKLANGRVIEKTLYNRRTRQDEPALFVALTFERREVLDSSNIKPMNLIGVDRGENIPAVIALTDPEGCPLSRFKDSLGNPTHILRIGESYKEKQRTIQAKKEVEQRRAGGYSRKYASKAKNLADDMVRNTARDLLYYAVTQDAMLIFENLSRGFGRQGKRTFMAERQYTRMEDWLTAKLAYEGLPSKTYLSKTLAQYTSKTCSNCGFTITSADYDRVLEKLKKTATGWMTTINGKELKVEGQITYYNRYKRQNVVKDLSVELDRLSEESVNNDISSWTKGRSGEALSLLKKRFSHRPVQEKFVCLNCEFETHADEQAALNIARSWLFLRSQEYKKYQTNKTTGNTDKRAFVETWQSFYRKKLKEVWKPAV

SEQ ID NO: 47616 - protein, 978 aa, synthetic construct
  REGION 1..978: note = engineered CasX variant
QEIKRINKIRRRLVKDSNTKKAGKTGPMKTLLVRVMTPDLRERLENLRKKPENIPQPISNTSRANLNKLLTDYTEMKKAILHVYWEEFQKDPVGLMSRVAQPASKKIDQNKLKPEMDEKGNLTTAGFACSQCGQPLFVYKLEQVSEKGKAYTNYFGRCNVAEHEKLILLAQLKPEKDSDEAVTYSLGKFGQRALDFYSIHVTKESTHPVKPLAQIAGNRYASYPVGKALSDACMGTIASFLSKYQDIIIEHQKVVKGNQKRLESLRELAGKENLEYPSVTLPPQPHTKEGVDAYNEVIARVRMWVNLNLWQKLKLSRDDAKPLLRLKGFPSFPLVERQANEVDWWDMVCNVKKLINEKKEDGKVFWQNLAGYKRQEALRPYLSSEEDRKKGKKFARYQLGDLLWHLEKKHGEDWGKVYDEAWERIDKKVEGLSKHIKLEEERRSEDAQSKAALTDWLRAKASFVIEGLKEADKDEFCRCELKLQKWYGDLRGKPFAIEAENSILDISGFSKQYNCAFIWQKDGVKKLNLYLIINYFKGGKLRFKKIKPEAFEANRFYTVINKKSGEIVPMEVNFNFDDPNLIILPLAFGKRQGREFIWNDLLSLETGSLKLANGRVIEKTLYNRRTRQDEPALFVALTFERREVLDSSNIKPMNLIGVDRGENIPAVIALTDPEGCPLSRFKDSLGNPTHILRIGESYKEKQRTIQAKKEVEQRRAGGYSRKYASKAKNLADDMVRNTARDLLYYAVTQDAMLIFENLSRGFGRQGKRTFMAERQYTRMEDWLTAKLAYEGLPSKTYLSKTLAQYTSKTCSNCGFTITSADYDRVLEKLKKTATGWMTTINGKELKVEGQITYYNRYKRQNVVKDLSVELDRLSEESVNNDISSWTKGRSGEALSLLKKRFSHRPVQEKFVCLNCEFETHADEQAALNIARSWLFLRSQEYKKYQTNKTTGNTDKRAFVETWQSFYRKKLKEVWKPAV

SEQ ID NO: 47617 - protein, 978 aa, synthetic construct
  REGION 1..978: note = engineered CasX variant
QEIKRINKIRRRLVKDSNTKKAGKTGPMKTLLVRVMTPDLRERLENLRKKPENIPQPISNTSRANLNKLLTDYTEMKKAILHVYWEEFQKDPVGLMSRVAQPASKKIDQNKLKPEMDEKGNLTTAGFACSQCGQPLFVYKLEQVSEKGKAYTNYFGRCNVAEHEKLILLAQLKPEKDSDEAVTYSLGKFGQRALDFYSIHVTKESTHPVKPLAQIAGNRYASHPVGKALSDACMGTIASFLSKYQDIIIEHQKVVKGNQKRLESLRELAGKENLEYPSVTLPPQPHTKEGVDAYNEVIARVRMWVNLNLWQKLKLSRDDAKPLLRLKGFPSFPLVERQANEVDWWDMVCNVKKLINEKKEDGKVFWQNLAGYKRQEALRPYLSSEEDRKKGKKFARYQLGDLLWHLEKKHGEDWGKVYDEAWERIDKKVEGLSKHIKLEEERRSEDAQSKAALTDWLRAKASFVIEGLKEADKDEFCRCELKLQKWYGDLRGKPFAIEAENSILDISGFSKQYNCAFIWQKDGVKKLNLYLIINYFKGGKLRFKKIKPEAFEANRFYTVINKKSGEIVPMEVNFNFDDPNLIILPLAFGKRQGREFIWNDLLSLETGSLKLANGRVIEKTLYNRRTRQDEPALFVALTFERREVLDSSNIKPMNLIGVDRGENIPAVIALTDPEGCPLSRFKDSLGNPTHILRIGESYKEKQRTIQAKKEVEQRRAGGYSRKYASKAKNLADDMVRNTARDLLYYAVTQDAMLIFENLSRGFGRQGKRTFMAERQYTRMEDWLTAKLAYEGLPSKTYLSKTLAQYTSKTCSNCGFTITSADYDRVLEKLKKTATGWMTTINGKELKVEGQITYYNRYKRQNVVKDLSVELDRLSEESVNNDISSWTKGRSGEALSLLKKRFSHRPVQEKFVCLNCEFETHADEQAALNIARSWLFLRSQEYKKYQTNKTTGNTDKRAFVETWQSFYRKKLKEVWKPAV

SEQ ID NO: 47618 - protein, 978 aa, synthetic construct
  REGION 1..978: note = engineered CasX variant
QEIKRINKIRRRLVKDSNTKKAGKTGPMKTLLVRVMTPDLRERLENLRKKPENIPQPISNTSRANLNKLLTDYTEMKKAILHVYWEEFQKDPVGLMSRVAQPASKKIDQNKLKPEMDEKGNLTTAGFACSQCGQPLFVYKLEQVSEKGKAYTNYFGRCNVAEHEKLILLAQLKPEKDSDEAVTYSLGKFGQRALDFYSIHVTKESTHPVKPLAQIAGNRYASSPVGKALSDACMGTIASFLSKYQDIIIEHQKVVKGNQKRLESLRELAGKENLEYPSVTLPPQPHTKEGVDAYNEVIARVRMWVNLNLWQKLKLSRDDAKPLLRLKGFPSFPLVERQANEVDWWDMVCNVKKLINEKKEDGKVFWQNLAGYKRQEALRPYLSSEEDRKKGKKFARYQLGDLLWHLEKKHGEDWGKVYDEAWERIDKKVEGLSKHIKLEEERRSEDAQSKAALTDWLRAKASFVIEGLKEADKDEFCRCELKLQKWYGDLRGKPFAIEAENSILDISGFSKQYNCAFIWQKDGVKKLNLYLIINYFKGGKLRFKKIKPEAFEANRFYTVINKKSGEIVPMEVNFNFDDPNLIILPLAFGKRQGREFIWNDLLSLETGSLKLANGRVIEKTLYNRRTRQDEPALFVALTFERREVLDSSNIKPMNLIGVDRGENIPAVIALTDPEGCPLSRFKDSLGNPTHILRIGESYKEKQRTIQAKKEVEQRRAGGYSRKYASKAKNLADDMVRNTARDLLYYAVTQDAMLIFENLSRGFGRQGKRTFMAERQYTRMEDWLTAKLAYEGLPSKTYLSKTLAQYTSKTCSNCGFTITSADYDRVLEKLKKTATGWMTTINGKELKVEGQITYYNRYKRQNVVKDLSVELDRLSEESVNNDISSWTKGRSGEALSLLKKRFSHRPVQEKFVCLNCEFETHADEQAALNIARSWLFLRSQEYKKYQTNKTTGNTDKRAFVETWQSFYRKKLKEVWKPAV

SEQ ID NO: 47619 - protein, 978 aa, synthetic construct
  REGION 1..978: note = engineered CasX variant
QEIKRINKIRRRLVKDSNTKKAGKTGPMKTLLVRVMTPDLRERLENLRKKPENIPQPISNTSRANLNKLLTDYTEMKKAILHVYWEEFQKDPVGLMSRVAQPASKKIDQNKLKPEMDEKGNLTTAGFACSQCGQPLFVYKLEQVSEKGKAYTNYFGRCNVAEHEKLILLAQLKPEKDSDEAVTYSLGKFGQRALDFYSIHVTKESTHPVKPLAQIAGNRYASTPVGKALSDACMGTIASFLSKYQDIIIEHQKVVKGNQKRLESLRELAGKENLEYPSVTLPPQPHTKEGVDAYNEVIARVRMWVNLNLWQKLKLSRDDAKPLLRLKGFPSFPLVERQANEVDWWDMVCNVKKLINEKKEDGKVFWQNLAGYKRQEALRPYLSSEEDRKKGKKFARYQLGDLLWHLEKKHGEDWGKVYDEAWERIDKKVEGLSKHIKLEEERRSEDAQSKAALTDWLRAKASFVIEGLKEADKDEFCRCELKLQKWYGDLRGKPFAIEAENSILDISGFSKQYNCAFIWQKDGVKKLNLYLIINYFKGGKLRFKKIKPEAFEANRFYTVINKKSGEIVPMEVNFNFDDPNLIILPLAFGKRQGREFIWNDLLSLETGSLKLANGRVIEKTLYNRRTRQDEPALFVALTFERREVLDSSNIKPMNLIGVDRGENIPAVIALTDPEGCPLSRFKDSLGNPTHILRIGESYKEKQRTIQAKKEVEQRRAGGYSRKYASKAKNLADDMVRNTARDLLYYAVTQDAMLIFENLSRGFGRQGKRTFMAERQYTRMEDWLTAKLAYEGLPSKTYLSKTLAQYTSKTCSNCGFTITSADYDRVLEKLKKTATGWMTTINGKELKVEGQITYYNRYKRQNVVKDLSVELDRLSEESVNNDISSWTKGRSGEALSLLKKRFSHRPVQEKFVCLNCEFETHADEQAALNIARSWLFLRSQEYKKYQTNKTTGNTDKRAFVETWQSFYRKKLKEVWKPAV

SEQ ID NO: 47620 - protein, 978 aa, synthetic construct
  REGION 1..978: note = engineered CasX variant
QEIKRINKIRRRLVKDSNTKKAGKTGPMKTLLVRVMTPDLRERLENLRKKPENIPQPISNTSRANLNKLLTDYTEMKKAILHVYWEEFQKDPVGLMSRVAQPASKKIDQNKLKPEMDEKGNLTTAGFACSQCGQPLFVYKLEQVSEKGKAYTNYFGRCNVAEHEKLILLAQLKPEKDSDEAVTYSLGKFGQRALDFYSIHVTKESTHPVKPLAQIAGNRYASAPVGKALSDACMGTIASFLSKYQDIIIEHQKVVKGNQKRLESLRELAGKENLEYPSVTLPPQPHTKEGVDAYNEVIARVRMWVNLNLWQKLKLSRDDAKPLLRLKGFPSFPLVERQANEVDWWDMVCNVKKLINEKKEDGKVFWQNLAGYKRQEALRPYLSSEEDRKKGKKFARYQLGDLLWHLEKKHGEDWGKVYDEAWERIDKKVEGLSKHIKLEEERRSEDAQSKAALTDWLRAKASFVIEGLKEADKDEFCRCELKLQKWYGDLRGKPFAIEAENSILDISGFSKQYNCAFIWQKDGVKKLNLYLIINYFKGGKLRFKKIKPEAFEANRFYTVINKKSGEIVPMEVNFNFDDPNLIILPLAFGKRQGREFIWNDLLSLETGSLKLANGRVIEKTLYNRRTRQDEPALFVALTFERREVLDSSNIKPMNLIGVDRGENIPAVIALTDPEGCPLSRFKDSLGNPTHILRIGESYKEKQRTIQAKKEVEQRRAGGYSRKYASKAKNLADDMVRNTARDLLYYAVTQDAMLIFENLSRGFGRQGKRTFMAERQYTRMEDWLTAKLAYEGLPSKTYLSKTLAQYTSKTCSNCGFTITSADYDRVLEKLKKTATGWMTTINGKELKVEGQITYYNRYKRQNVVKDLSVELDRLSEESVNNDISSWTKGRSGEALSLLKKRFSHRPVQEKFVCLNCEFETHADEQAALNIARSWLFLRSQEYKKYQTNKTTGNTDKRAFVETWQSFYRKKLKEVWKPAV

SEQ ID NO: 47621 - protein, 978 aa, synthetic construct
  REGION 1..978: note = engineered CasX variant
QEIKRINKIRRRLVKDSNTKKAGKTGPMKTLLVRVMTPDLRERLENLRKKPENIPQPISNTSRANLNKLLTDYTEMKKAILHVYWEEFQKDPVGLMSRVAQPASKKIDQNKLKPEMDEKGNLTTAGFACSQCGQPLFVYKLEQVSEKGKAYTNYFGRCNVAEHEKLILLAQLKPEKDSDEAVTYSLGKFGQRALDFYSIHVTKESTHPVKPLAQIAGNRYASVPVGKALSDACMGTIASFLSKYQDIIIEHQKVVKGNQKRLESLRELAGKENLEYPSVTLPPQPHTKEGVDAYNEVIARVRMWVNLNLWQKLKLSRDDAKPLLRLKGFPSFPLVERQANEVDWWDMVCNVKKLINEKKEDGKVFWQNLAGYKRQEALRPYLSSEEDRKKGKKFARYQLGDLLWHLEKKHGEDWGKVYDEAWERIDKKVEGLSKHIKLEEERRSEDAQSKAALTDWLRAKASFVIEGLKEADKDEFCRCELKLQKWYGDLRGKPFAIEAENSILDISGFSKQYNCAFIWQKDGVKKLNLYLIINYFKGGKLRFKKIKPEAFEANRFYTVINKKSGEIVPMEVNFNFDDPNLIILPLAFGKRQGREFIWNDLLSLETGSLKLANGRVIEKTLYNRRTRQDEPALFVALTFERREVLDSSNIKPMNLIGVDRGENIPAVIALTDPEGCPLSRFKDSLGNPTHILRIGESYKEKQRTIQAKKEVEQRRAGGYSRKYASKAKNLADDMVRNTARDLLYYAVTQDAMLIFENLSRGFGRQGKRTFMAERQYTRMEDWLTAKLAYEGLPSKTYLSKTLAQYTSKTCSNCGFTITSADYDRVLEKLKKTATGWMTTINGKELKVEGQITYYNRYKRQNVVKDLSVELDRLSEESVNNDISSWTKGRSGEALSLLKKRFSHRPVQEKFVCLNCEFETHADEQAALNIARSWLFLRSQEYKKYQTNKTTGNTDKRAFVETWQSFYRKKLKEVWKPAV

SEQ ID NO: 47622 - protein, 978 aa, synthetic construct
  REGION 1..978: note = engineered CasX variant
QEIKRINKIRRRLVKDSNTKKAGKTGPMKTLLVRVMTPDLRERLENLRKKPENIPQPISNTSRANLNKLLTDYTEMKKAILHVYWEEFQKDPVGLMSRVAQPASKKIDQNKLKPEMDEKGNLTTAGFACSQCGQPLFVYKLEQVSEKGKAYTNYFGRCNVAEHEKLIKLAQLKPEKDSDEAVTYSLGKFGQRALDFYSIHVTKESTHPVKPLAQIAGNRYASGPVGKALSDACMGTIASFLSKYQDIIIEHQKVVKGNQKRLESLRELAGKENLEYPSVTLPPQPHTKEGVDAYNEVIARVRMWVNLNLWQKLKLSRDDAKPLLRLKGFPSFPLVERQANEVDWWDMVCNVKKLINEKKEDGKVFWQNLAGYKRQEALRPYLSSEEDRKKGKKFARYQLGDLLWHLEKKHGEDWGKVYDEAWERIDKKVEGLSKHIKLEEERRSEDAQSKAALTDWLRAKASFVIEGLKEADKDEFCRCELKLQKWYGDLRGKPFAIEAENSILDISGFSKQYNCAFIWQKDGVKKLNLYLIINYFKGGKLRFKKIKPEAFEANRFYTVINKKSGEIVPMEVNFNFDDPNLIILPLAFGKRQGREFIWNDLLSLETGSLKLANGRVIEKTLYNRRTRQDEPALFVALTFERREVLDSSNIKPMNLIGVDRGENIPAVIALTDPEGCPLSRFKDSLGNPTHILRIGESYKEKQRTIQAKKEVEQRRAGGYSRKYASKAKNLADDMVRNTARDLLYYAVTQDAMLIFENLSRGFGRQGKRTFMAERQYTRMEDWLTAKLAYEGLPSKTYLSKTLAQYTSKTCSNCGFTITSADYDRVLEKLKKTATGWMTTINGKELKVEGQITYYNRYKRQNVVKDLSVELDRLSEESVNNDISSWTKGRSGEALSLLKKRFSHRPVQEKFVCLNCEFETHADEQAALNIARSWLFLRSQEYKKYQTNKTTGNTDKRAFVETWQSFYRKKLKEVWKPAV

SEQ ID NO: 47623 - protein, 977 aa, synthetic construct
  REGION 1..977: note = engineered CasX variant
QEIKRINKIRRRLVKDSNTKKAGKTGPMKTLLVRVMTPDLRERLENLRKKPENIPQPISNTSRANLNKLLTDYTEMKKAILHVYWEEFQKDPVGLMSRVAQPASKKIDQNKLKPEMDEKGNLTTAGFACSQCGQPLFVYKLEQVSEKGKAYTNYFGRCNVAEHEKLILLAQLKPEKDSDEAVTYSLGKFGQRALDFYSIHVTKESTHPVKPLAQIAGNRYASPVGKALSDACMGTIASFLSKYQDIIIEHQKVVKGNQKRLESLRELAGKENLEYPSVTLPPQPHTKEGVDAYNEVIARVRMWVNLNLWQKLKLSRDDAKPLLRLKGFPSFPLVERQANEVDWWDMVCNVKKLINEKKEDGKVFWQNLAGYKRQEALRPYLSSEEDRKKGKKFARYQLGDLLWHLEKKHGEDWGKVYDEAWERIDKKVEGLSKHIKLEEERRSEDAQSKAALTDWLRAKASFVIEGLKEADKDEFCRCELKLQKWYGDLRGKPFAIEAENSILDISGFSKQYNCAFIWQKDGVKKLNLYLIINYFKGGKLRFKKIKPEAFEANRFYTVINKKSGEIVPMEVNFNFDDPNLIILPLAFGKRQGREFIWNDLLSLETGSLKLANGRVIEKTLYNRRTRQDEPALFVALTFERREVLDSSNIKPMNLIGVDRGENIPAVIALTDPEGCPLSRFKDSLGNPTHILRIGESYKEKQRTIQAKKEVEQRRAGGYSRKYASKAKNLADDMVRNTARDLLYYAVTQDAMLIFENLSRGFGRQGKRTFMAERQYTRMEDWLTAKLAYEGLPSKTYLSKTLAQYTSKTCSNCGFTITSADYDRVLEKLKKTATGWMTTINGKELKVEGQITYYNRYKRQNVVKDLSVELDRLSEESVNNDISSWTKGRSGEALSLLKKRFSHRPVQEKFVCLNCEFETHADEQAALNIARSWLFLRSQEYKKYQTNKTTGNTDKRAFVETWQSFYRKKLKEVWKPAV

SEQ ID NO: 47624 - protein, 978 aa, synthetic construct
  REGION 1..978: note = engineered CasX variant
QEIKRINKIRRRLVKDSNTKKAGKTGPMKTLLVRVMTPDLRERLENLRKKPENIPQPISNTSRANLNKLLTDYTEMKKAILHVYWEEFQKDPVGLMSRVAQPASKKIDQNKLKPEMDEKGNLTTAGFACSQCGQPLFVYKLEQVSEKGKAYTNYFGRCNVAEHEKLILLAQLKPEKDSDEAVTYSLGKFGQRALDFYSIHVTKESTHPVKPLAQIAGNRYASYPVGKALSDACMGTIASFLSKYQDIIIEHQKVVKGNQKRLESLRELAGKENLEYPSVTLPPQPHTKEGVDAYNEVIARVRMWVNLNLWQKLKLSRDDAKPLLRLKGFPSFPLVERQANEVDWWDMVCNVKKLINEKKEDGKVFWQNLAGYKRQEALRPYLSSEEDRKKGKKFARYQLGDLLLHLYKKHGEDWGKVYDEAWERIDKKVEGLSKHIKLEEERRSEDAQSKAALTDWLRAKASFVIEGLKEADKDEFCRCELKLQKWYGDLRGKPFAIEAENSILDISGFSKQYNCAFIWQKDGVKKLNLYLIINYFKGGKLRFKKIKPEAFEANRFYTVINKKSGEIVPMEVNFNFDDPNLIILPLAFGKRQGREFIWNDLLSLETGSLKLANGRVIEKTLYNRRTRQDEPALFVALTFERREVLDSSNIKPMNLIGVDRGENIPAVIALTDPEGCPLSRFKDSLGNPTHILRIGESYKEKQRTIQAKKEVEQRRAGGYSRKYASKAKNLADDMVRNTARDLLYYAVTQDAMLIFENLSRGFGRQGKRTFMAERQYTRMEDWLTAKLAYEGLPSKTYLSKTLAQYTSKTCSNCGFTITSADYDRVLEKLKKTATGWMTTINGKELKVEGQITYYNRYKRQNVVKDLSVELDRLSEESVNNDISSWTKGRSGEALSLLKKRFSHRPVQEKFVCLNCEFETHADEQAALNIARSWLFLRSQEYKKYQTNKTTGNTDKRAFVETWQSFYRKKLKEVWKPAV

SEQ ID NO: 47625 - protein, 978 aa, synthetic construct
  REGION 1..978: note = engineered CasX variant
QEIKRINKIRRRLVKDSNTKKAGKTGPMKTLLVRVMTPDLRERLENLRKKPENIPQPISNTSRANLNKLLTDYTEMKKAILHVYWEEFQKDPVGLMSRVAQPASKKIDQNKLKPEMDEKGNLTTAGFACSQCGQPLFVYKLEQVSEKGKAYTNYFGRCNVAEHEKLILLAQLKPEKDSDEAVTYSLGKFGQRALDFYSIHVTKESTHPVKPLAQIAGNRYASHPVGKALSDACMGTIASFLSKYQDIIIEHQKVVKGNQKRLESLRELAGKENLEYPSVTLPPQPHTKEGVDAYNEVIARVRMWVNLNLWQKLKLSRDDAKPLLRLKGFPSFPLVERQANEVDWWDMVCNVKKLINEKKEDGKVFWQNLAGYKRQEALRPYLSSEEDRKKGKKFARYQLGDLLLHLYKKHGEDWGKVYDEAWERIDKKVEGLSKHIKLEEERRSEDAQSKAALTDWLRAKASFVIEGLKEADKDEFCRCELKLQKWYGDLRGKPFAIEAENSILDISGFSKQYNCAFIWQKDGVKKLNLYLIINYFKGGKLRFKKIKPEAFEANRFYTVINKKSGEIVPMEVNFNFDDPNLIILPLAFGKRQGREFIWNDLLSLETGSLKLANGRVIEKTLYNRRTRQDEPALFVALTFERREVLDSSNIKPMNLIGVDRGENIPAVIALTDPEGCPLSRFKDSLGNPTHILRIGESYKEKQRTIQAKKEVEQRRAGGYSRKYASKAKNLADDMVRNTARDLLYYAVTQDAMLIFENLSRGFGRQGKRTFMAERQYTRMEDWLTAKLAYEGLPSKTYLSKTLAQYTSKTCSNCGFTITSADYDRVLEKLKKTATGWMTTINGKELKVEGQITYYNRYKRQNVVKDLSVELDRLSEESVNNDISSWTKGRSGEALSLLKKRFSHRPVQEKFVCLNCEFETHADEQAALNIARSWLFLRSQEYKKYQTNKTTGNTDKRAFVETWQSFYRKKLKEVWKPAV

SEQ ID NO: 47626 - protein, 978 aa, synthetic construct
  REGION 1..978: note = engineered CasX variant
QEIKRINKIRRRLVKDSNTKKAGKTGPMKTLLVRVMTPDLRERLENLRKKPENIPQPISNTSRANLNKLLTDYTEMKKAILHVYWEEFQKDPVGLMSRVAQPASKKIDQNKLKPEMDEKGNLTTAGFACSQCGQPLFVYKLEQVSEKGKAYTNYFGRCNVAEHEKLILLAQLKPEKDSDEAVTYSLGKFGQRALDFYSIHVTKESTHPVKPLAQIAGNRYASSPVGKALSDACMGTIASFLSKYQDIIIEHQKVVKGNQKRLESLRELAGKENLEYPSVTLPPQPHTKEGVDAYNEVIARVRMWVNLNLWQKLKLSRDDAKPLLRLKGFPSFPLVERQANEVDWWDMVCNVKKLINEKKEDGKVFWQNLAGYKRQEALRPYLSSEEDRKKGKKFARYQLGDLLLHLYKKHGEDWGKVYDEAWERIDKKVEGLSKHIKLEEERRSEDAQSKAALTDWLRAKASFVIEGLKEADKDEFCRCELKLQKWYGDLRGKPFAIEAENSILDISGFSKQYNCAFIWQKDGVKKLNLYLIINYFKGGKLRFKKIKPEAFEANRFYTVINKKSGEIVPMEVNFNFDDPNLIILPLAFGKRQGREFIWNDLLSLETGSLKLANGRVIEKTLYNRRTRQDEPALFVALTFERREVLDSSNIKPMNLIGVDRGENIPAVIALTDPEGCPLSRFKDSLGNPTHILRIGESYKEKQRTIQAKKEVEQRRAGGYSRKYASKAKNLADDMVRNTARDLLYYAVTQDAMLIFENLSRGFGRQGKRTFMAERQYTRMEDWLTAKLAYEGLPSKTYLSKTLAQYTSKTCSNCGFTITSADYDRVLEKLKKTATGWMTTINGKELKVEGQITYYNRYKRQNVVKDLSVELDRLSEESVNNDISSWTKGRSGEALSLLKKRFSHRPVQEKFVCLNCEFETHADEQAALNIARSWLFLRSQEYKKYQTNKTTGNTDKRAFVETWQSFYRKKLKEVWKPAV

SEQ ID NO: 47627 - protein, 978 aa, synthetic construct
  REGION 1..978: note = engineered CasX variant
QEIKRINKIRRRLVKDSNTKKAGKTGPMKTLLVRVMTPDLRERLENLRKKPENIPQPISNTSRANLNKLLTDYTEMKKAILHVYWEEFQKDPVGLMSRVAQPASKKIDQNKLKPEMDEKGNLTTAGFACSQCGQPLFVYKLEQVSEKGKAYTNYFGRCNVAEHEKLILLAQLKPEKDSDEAVTYSLGKFGQRALDFYSIHVTKESTHPVKPLAQIAGNRYASTPVGKALSDACMGTIASFLSKYQDIIIEHQKVVKGNQKRLESLRELAGKENLEYPSVTLPPQPHTKEGVDAYNEVIARVRMWVNLNLWQKLKLSRDDAKPLLRLKGFPSFPLVERQANEVDWWDMVCNVKKLINEKKEDGKVFWQNLAGYKRQEALRPYLSSEEDRKKGKKFARYQLGDLLLHLYKKHGEDWGKVYDEAWERIDKKVEGLSKHIKLEEERRSEDAQSKAALTDWLRAKASFVIEGLKEADKDEFCRCELKLQKWYGDLRGKPFAIEAENSILDISGFSKQYNCAFIWQKDGVKKLNLYLIINYFKGGKLRFKKIKPEAFEANRFYTVINKKSGEIVPMEVNFNFDDPNLIILPLAFGKRQGREFIWNDLLSLETGSLKLANGRVIEKTLYNRRTRQDEPALFVALTFERREVLDSSNIKPMNLIGVDRGENIPAVIALTDPEGCPLSRFKDSLGNPTHILRIGESYKEKQRTIQAKKEVEQRRAGGYSRKYASKAKNLADDMVRNTARDLLYYAVTQDAMLIFENLSRGFGRQGKRTFMAERQYTRMEDWLTAKLAYEGLPSKTYLSKTLAQYTSKTCSNCGFTITSADYDRVLEKLKKTATGWMTTINGKELKVEGQITYYNRYKRQNVVKDLSVELDRLSEESVNNDISSWTKGRSGEALSLLKKRFSHRPVQEKFVCLNCEFETHADEQAALNIARSWLFLRSQEYKKYQTNKTTGNTDKRAFVETWQSFYRKKLKEVWKPAV

SEQ ID NO: 47628 - protein, 978 aa, synthetic construct
  REGION 1..978: note = engineered CasX variant
QEIKRINKIRRRLVKDSNTKKAGKTGPMKTLLVRVMTPDLRERLENLRKKPENIPQPISNTSRANLNKLLTDYTEMKKAILHVYWEEFQKDPVGLMSRVAQPASKKIDQNKLKPEMDEKGNLTTAGFACSQCGQPLFVYKLEQVSEKGKAYTNYFGRCNVAEHEKLILLAQLKPEKDSDEAVTYSLGKFGQRALDFYSIHVTKESTHPVKPLAQIAGNRYASAPVGKALSDACMGTIASFLSKYQDIIIEHQKVVKGNQKRLESLRELAGKENLEYPSVTLPPQPHTKEGVDAYNEVIARVRMWVNLNLWQKLKLSRDDAKPLLRLKGFPSFPLVERQANEVDWWDMVCNVKKLINEKKEDGKVFWQNLAGYKRQEALRPYLSSEEDRKKGKKFARYQLGDLLLHLYKKHGEDWGKVYDEAWERIDKKVEGLSKHIKLEEERRSEDAQSKAALTDWLRAKASFVIEGLKEADKDEFCRCELKLQKWYGDLRGKPFAIEAENSILDISGFSKQYNCAFIWQKDGVKKLNLYLIINYFKGGKLRFKKIKPEAFEANRFYTVINKKSGEIVPMEVNFNFDDPNLIILPLAFGKRQGREFIWNDLLSLETGSLKLANGRVIEKTLYNRRTRQDEPALFVALTFERREVLDSSNIKPMNLIGVDRGENIPAVIALTDPEGCPLSRFKDSLGNPTHILRIGESYKEKQRTIQAKKEVEQRRAGGYSRKYASKAKNLADDMVRNTARDLLYYAVTQDAMLIFENLSRGFGRQGKRTFMAERQYTRMEDWLTAKLAYEGLPSKTYLSKTLAQYTSKTCSNCGFTITSADYDRVLEKLKKTATGWMTTINGKELKVEGQITYYNRYKRQNVVKDLSVELDRLSEESVNNDISSWTKGRSGEALSLLKKRFSHRPVQEKFVCLNCEFETHADEQAALNIARSWLFLRSQEYKKYQTNKTTGNTDKRAFVETWQSFYRKKLKEVWKPAV

SEQ ID NO: 47629 - protein, 978 aa, synthetic construct
  REGION 1..978: note = engineered CasX variant
QEIKRINKIRRRLVKDSNTKKAGKTGPMKTLLVRVMTPDLRERLENLRKKPENIPQPISNTSRANLNKLLTDYTEMKKAILHVYWEEFQKDPVGLMSRVAQPASKKIDQNKLKPEMDEKGNLTTAGFACSQCGQPLFVYKLEQVSEKGKAYTNYFGRCNVAEHEKLILLAQLKPEKDSDEAVTYSLGKFGQRALDFYSIHVTKESTHPVKPLAQIAGNRYASVPVGKALSDACMGTIASFLSKYQDIIIEHQKVVKGNQKRLESLRELAGKENLEYPSVTLPPQPHTKEGVDAYNEVIARVRMWVNLNLWQKLKLSRDDAKPLLRLKGFPSFPLVERQANEVDWWDMVCNVKKLINEKKEDGKVFWQNLAGYKRQEALRPYLSSEEDRKKGKKFARYQLGDLLLHLYKKHGEDWGKVYDEAWERIDKKVEGLSKHIKLEEERRSEDAQSKAALTDWLRAKASFVIEGLKEADKDEFCRCELKLQKWYGDLRGKPFAIEAENSILDISGFSKQYNCAFIWQKDGVKKLNLYLIINYFKGGKLRFKKIKPEAFEANRFYTVINKKSGEIVPMEVNFNFDDPNLIILPLAFGKRQGREFIWNDLLSLETGSLKLANGRVIEKTLYNRRTRQDEPALFVALTFERREVLDSSNIKPMNLIGVDRGENIPAVIALTDPEGCPLSRFKDSLGNPTHILRIGESYKEKQRTIQAKKEVEQRRAGGYSRKYASKAKNLADDMVRNTARDLLYYAVTQDAMLIFENLSRGFGRQGKRTFMAERQYTRMEDWLTAKLAYEGLPSKTYLSKTLAQYTSKTCSNCGFTITSADYDRVLEKLKKTATGWMTTINGKELKVEGQITYYNRYKRQNVVKDLSVELDRLSEESVNNDISSWTKGRSGEALSLLKKRFSHRPVQEKFVCLNCEFETHADEQAALNIARSWLFLRSQEYKKYQTNKTTGNTDKRAFVETWQSFYRKKLKEVWKPAV

SEQ ID NO: 47630 - protein, 978 aa, synthetic construct
  REGION 1..978: note = engineered CasX variant
QEIKRINKIRRRLVKDSNTKKAGKTGPMKTLLVRVMTPDLRERLENLRKKPENIPQPISNTSRANLNKLLTDYTEMKKAILHVYWEEFQKDPVGLMSRVAQPASKKIDQNKLKPEMDEKGNLTTAGFACSQCGQPLFVYKLEQVSEKGKAYTNYFGRCNVAEHEKLIKLAQLKPEKDSDEAVTYSLGKFGQRALDFYSIHVTKESTHPVKPLAQIAGNRYASGPVGKALSDACMGTIASFLSKYQDIIIEHQKVVKGNQKRLESLRELAGKENLEYPSVTLPPQPHTKEGVDAYNEVIARVRMWVNLNLWQKLKLSRDDAKPLLRLKGFPSFPLVERQANEVDWWDMVCNVKKLINEKKEDGKVFWQNLAGYKRQEALRPYLSSEEDRKKGKKFARYQLGDLLLHLYKKHGEDWGKVYDEAWERIDKKVEGLSKHIKLEEERRSEDAQSKAALTDWLRAKASFVIEGLKEADKDEFCRCELKLQKWYGDLRGKPFAIEAENSILDISGFSKQYNCAFIWQKDGVKKLNLYLIINYFKGGKLRFKKIKPEAFEANRFYTVINKKSGEIVPMEVNFNFDDPNLIILPLAFGKRQGREFIWNDLLSLETGSLKLANGRVIEKTLYNRRTRQDEPALFVALTFERREVLDSSNIKPMNLIGVDRGENIPAVIALTDPEGCPLSRFKDSLGNPTHILRIGESYKEKQRTIQAKKEVEQRRAGGYSRKYASKAKNLADDMVRNTARDLLYYAVTQDAMLIFENLSRGFGRQGKRTFMAERQYTRMEDWLTAKLAYEGLPSKTYLSKTLAQYTSKTCSNCGFTITSADYDRVLEKLKKTATGWMTTINGKELKVEGQITYYNRYKRQNVVKDLSVELDRLSEESVNNDISSWTKGRSGEALSLLKKRFSHRPVQEKFVCLNCEFETHADEQAALNIARSWLFLRSQEYKKYQTNKTTGNTDKRAFVETWQSFYRKKLKEVWKPAV

SEQ ID NO: 47631 - protein, 977 aa, synthetic construct
  REGION 1..977: note = engineered CasX variant
QEIKRINKIRRRLVKDSNTKKAGKTGPMKTLLVRVMTPDLRERLENLRKKPENIPQPISNTSRANLNKLLTDYTEMKKAILHVYWEEFQKDPVGLMSRVAQPASKKIDQNKLKPEMDEKGNLTTAGFACSQCGQPLFVYKLEQVSEKGKAYTNYFGRCNVAEHEKLILLAQLKPEKDSDEAVTYSLGKFGQRALDFYSIHVTKESTHPVKPLAQIAGNRYASPVGKALSDACMGTIASFLSKYQDIIIEHQKVVKGNQKRLESLRELAGKENLEYPSVTLPPQPHTKEGVDAYNEVIARVRMWVNLNLWQKLKLSRDDAKPLLRLKGFPSFPLVERQANEVDWWDMVCNVKKLINEKKEDGKVFWQNLAGYKRQEALRPYLSSEEDRKKGKKFARYQLGDLLLHLYKKHGEDWGKVYDEAWERIDKKVEGLSKHIKLEEERRSEDAQSKAALTDWLRAKASFVIEGLKEADKDEFCRCELKLQKWYGDLRGKPFAIEAENSILDISGFSKQYNCAFIWQKDGVKKLNLYLIINYFKGGKLRFKKIKPEAFEANRFYTVINKKSGEIVPMEVNFNFDDPNLIILPLAFGKRQGREFIWNDLLSLETGSLKLANGRVIEKTLYNRRTRQDEPALFVALTFERREVLDSSNIKPMNLIGVDRGENIPAVIALTDPEGCPLSRFKDSLGNPTHILRIGESYKEKQRTIQAKKEVEQRRAGGYSRKYASKAKNLADDMVRNTARDLLYYAVTQDAMLIFENLSRGFGRQGKRTFMAERQYTRMEDWLTAKLAYEGLPSKTYLSKTLAQYTSKTCSNCGFTITSADYDRVLEKLKKTATGWMTTINGKELKVEGQITYYNRYKRQNVVKDLSVELDRLSEESVNNDISSWTKGRSGEALSLLKKRFSHRPVQEKFVCLNCEFETHADEQAALNIARSWLFLRSQEYKKYQTNKTTGNTDKRAFVETWQSFYRKKLKEVWKPAV

SEQ ID NO: 47632 - protein, 978 aa, synthetic construct
  REGION 1..978: note = engineered CasX variant
QEIKRINKIRRRLVKDSNTKKAGKTGPMKTLLVRVMTPDLRERLENLRKKPENIPQPISNTSRANLNKLLTDYTEMKKAILHVYWEEFQKDPVGLMSRVAQPASKKIDQNKLKPEMDEKGNLTTAGFACSQCGQPLFVYKLEQVSEKGKAYTNYFGRCNVAEHEKLILLAQLKPEKDSDEAVTYSLGKFGQRALDFYSIHVTKESTHPVKPLAQIAGNRYASYPVGKALSDACMGTIASFLSKYQDIIIEHQKVVKGNQKRLESLRELAGKENLEYPSVTLPPQPHTKEGVDAYNEVIARVRMWVNLNLWQKLKLSRDDAKPLLRLKGFPSFPLVERQANEVDWWDMVCNVKKLINEKKEDGKVFWQNLAGYKRQEALRPYLSSEEDRKKGKKFARYQLGDLLLHLEKKHPEDWGKVYDEAWERIDKKVEGLSKHIKLEEERRSEDAQSKAALTDWLRAKASFVIEGLKEADKDEFCRCELKLQKWYGDLRGKPFAIEAENSILDISGFSKQYNCAFIWQKDGVKKLNLYLIINYFKGGKLRFKKIKPEAFEANRFYTVINKKSGEIVPMEVNFNFDDPNLIILPLAFGKRQGREFIWNDLLSLETGSLKLANGRVIEKTLYNRRTRQDEPALFVALTFERREVLDSSNIKPMNLIGVDRGENIPAVIALTDPEGCPLSRFKDSLGNPTHILRIGESYKEKQRTIQAKKEVEQRRAGGYSRKYASKAKNLADDMVRNTARDLLYYAVTQDAMLIFENLSRGFGRQGKRTFMAERQYTRMEDWLTAKLAYEGLPSKTYLSKTLAQYTSKTCSNCGFTITSADYDRVLEKLKKTATGWMTTINGKELKVEGQITYYNRYKRQNVVKDLSVELDRLSEESVNNDISSWTKGRSGEALSLLKKRFSHRPVQEKFVCLNCEFETHADEQAALNIARSWLFLRSQEYKKYQTNKTTGNTDKRAFVETWQSFYRKKLKEVWKPAV

SEQ ID NO: 47633 - protein, 978 aa, synthetic construct
  REGION 1..978: note = engineered CasX variant
QEIKRINKIRRRLVKDSNTKKAGKTGPMKTLLVRVMTPDLRERLENLRKKPENIPQPISNTSRANLNKLLTDYTEMKKAILHVYWEEFQKDPVGLMSRVAQPASKKIDQNKLKPEMDEKGNLTTAGFACSQCGQPLFVYKLEQVSEKGKAYTNYFGRCNVAEHEKLILLAQLKPEKDSDEAVTYSLGKFGQRALDFYSIHVTKESTHPVKPLAQIAGNRYASHPVGKALSDACMGTIASFLSKYQDIIIEHQKVVKGNQKRLESLRELAGKENLEYPSVTLPPQPHTKEGVDAYNEVIARVRMWVNLNLWQKLKLSRDDAKPLLRLKGFPSFPLVERQANEVDWWDMVCNVKKLINEKKEDGKVFWQNLAGYKRQEALRPYLSSEEDRKKGKKFARYQLGDLLLHLEKKHPEDWGKVYDEAWERIDKKVEGLSKHIKLEEERRSEDAQSKAALTDWLRAKASFVIEGLKEADKDEFCRCELKLQKWYGDLRGKPFAIEAENSILDISGFSKQYNCAFIWQKDGVKKLNLYLIINYFKGGKLRFKKIKPEAFEANRFYTVINKKSGEIVPMEVNFNFDDPNLIILPLAFGKRQGREFIWNDLLSLETGSLKLANGRVIEKTLYNRRTRQDEPALFVALTFERREVLDSSNIKPMNLIGVDRGENIPAVIALTDPEGCPLSRFKDSLGNPTHILRIGESYKEKQRTIQAKKEVEQRRAGGYSRKYASKAKNLADDMVRNTARDLLYYAVTQDAMLIFENLSRGFGRQGKRTFMAERQYTRMEDWLTAKLAYEGLPSKTYLSKTLAQYTSKTCSNCGFTITSADYDRVLEKLKKTATGWMTTINGKELKVEGQITYYNRYKRQNVVKDLSVELDRLSEESVNNDISSWTKGRSGEALSLLKKRFSHRPVQEKFVCLNCEFETHADEQAALNIARSWLFLRSQEYKKYQTNKTTGNTDKRAFVETWQSFYRKKLKEVWKPAV

SEQ ID NO: 47634 - protein, 978 aa, synthetic construct
  REGION 1..978: note = engineered CasX variant
QEIKRINKIRRRLVKDSNTKKAGKTGPMKTLLVRVMTPDLRERLENLRKKPENIPQPISNTSRANLNKLLTDYTEMKKAILHVYWEEFQKDPVGLMSRVAQPASKKIDQNKLKPEMDEKGNLTTAGFACSQCGQPLFVYKLEQVSEKGKAYTNYFGRCNVAEHEKLILLAQLKPEKDSDEAVTYSLGKFGQRALDFYSIHVTKESTHPVKPLAQIAGNRYASSPVGKALSDACMGTIASFLSKYQDIIIEHQKVVKGNQKRLESLRELAGKENLEYPSVTLPPQPHTKEGVDAYNEVIARVRMWVNLNLWQKLKLSRDDAKPLLRLKGFPSFPLVERQANEVDWWDMVCNVKKLINEKKEDGKVFWQNLAGYKRQEALRPYLSSEEDRKKGKKFARYQLGDLLLHLEKKHPEDWGKVYDEAWERIDKKVEGLSKHIKLEEERRSEDAQSKAALTDWLRAKASFVIEGLKEADKDEFCRCELKLQKWYGDLRGKPFAIEAENSILDISGFSKQYNCAFIWQKDGVKKLNLYLIINYFKGGKLRFKKIKPEAFEANRFYTVINKKSGEIVPMEVNFNFDDPNLIILPLAFGKRQGREFIWNDLLSLETGSLKLANGRVIEKTLYNRRTRQDEPALFVALTFERREVLDSSNIKPMNLIGVDRGENIPAVIALTDPEGCPLSRFKDSLGNPTHILRIGESYKEKQRTIQAKKEVEQRRAGGYSRKYASKAKNLADDMVRNTARDLLYYAVTQDAMLIFENLSRGFGRQGKRTFMAERQYTRMEDWLTAKLAYEGLPSKTYLSKTLAQYTSKTCSNCGFTITSADYDRVLEKLKKTATGWMTTINGKELKVEGQITYYNRYKRQNVVKDLSVELDRLSEESVNNDISSWTKGRSGEALSLLKKRFSHRPVQEKFVCLNCEFETHADEQAALNIARSWLFLRSQEYKKYQTNKTTGNTDKRAFVETWQSFYRKKLKEVWKPAV

SEQ ID NO: 47635 - protein, 978 aa, synthetic construct
  REGION 1..978: note = engineered CasX variant
QEIKRINKIRRRLVKDSNTKKAGKTGPMKTLLVRVMTPDLRERLENLRKKPENIPQPISNTSRANLNKLLTDYTEMKKAILHVYWEEFQKDPVGLMSRVAQPASKKIDQNKLKPEMDEKGNLTTAGFACSQCGQPLFVYKLEQVSEKGKAYTNYFGRCNVAEHEKLILLAQLKPEKDSDEAVTYSLGKFGQRALDFYSIHVTKESTHPVKPLAQIAGNRYASTPVGKALSDACMGTIASFLSKYQDIIIEHQKVVKGNQKRLESLRELAGKENLEYPSVTLPPQPHTKEGVDAYNEVIARVRMWVNLNLWQKLKLSRDDAKPLLRLKGFPSFPLVERQANEVDWWDMVCNVKKLINEKKEDGKVFWQNLAGYKRQEALRPYLSSEEDRKKGKKFARYQLGDLLLHLEKKHPEDWGKVYDEAWERIDKKVEGLSKHIKLEEERRSEDAQSKAALTDWLRAKASFVIEGLKEADKDEFCRCELKLQKWYGDLRGKPFAIEAENSILDISGFSKQYNCAFIWQKDGVKKLNLYLIINYFKGGKLRFKKIKPEAFEANRFYTVINKKSGEIVPMEVNFNFDDPNLIILPLAFGKRQGREFIWNDLLSLETGSLKLANGRVIEKTLYNRRTRQDEPALFVALTFERREVLDSSNIKPMNLIGVDRGENIPAVIALTDPEGCPLSRFKDSLGNPTHILRIGESYKEKQRTIQAKKEVEQRRAGGYSRKYASKAKNLADDMVRNTARDLLYYAVTQDAMLIFENLSRGFGRQGKRTFMAERQYTRMEDWLTAKLAYEGLPSKTYLSKTLAQYTSKTCSNCGFTITSADYDRVLEKLKKTATGWMTTINGKELKVEGQITYYNRYKRQNVVKDLSVELDRLSEESVNNDISSWTKGRSGEALSLLKKRFSHRPVQEKFVCLNCEFETHADEQAALNIARSWLFLRSQEYKKYQTNKTTGNTDKRAFVETWQSFYRKKLKEVWKPAV

SEQ ID NO: 47636 - protein, 978 aa, synthetic construct
  REGION 1..978: note = engineered CasX variant
QEIKRINKIRRRLVKDSNTKKAGKTGPMKTLLVRVMTPDLRERLENLRKKPENIPQPISNTSRANLNKLLTDYTEMKKAILHVYWEEFQKDPVGLMSRVAQPASKKIDQNKLKPEMDEKGNLTTAGFACSQCGQPLFVYKLEQVSEKGKAYTNYFGRCNVAEHEKLILLAQLKPEKDSDEAVTYSLGKFGQRALDFYSIHVTKESTHPVKPLAQIAGNRYASAPVGKALSDACMGTIASFLSKYQDIIIEHQKVVKGNQKRLESLRELAGKENLEYPSVTLPPQPHTKEGVDAYNEVIARVRMWVNLNLWQKLKLSRDDAKPLLRLKGFPSFPLVERQANEVDWWDMVCNVKKLINEKKEDGKVFWQNLAGYKRQEALRPYLSSEEDRKKGKKFARYQLGDLLLHLEKKHPEDWGKVYDEAWERIDKKVEGLSKHIKLEEERRSEDAQSKAALTDWLRAKASFVIEGLKEADKDEFCRCELKLQKWYGDLRGKPFAIEAENSILDISGFSKQYNCAFIWQKDGVKKLNLYLIINYFKGGKLRFKKIKPEAFEANRFYTVINKKSGEIVPMEVNFNFDDPNLIILPLAFGKRQGREFIWNDLLSLETGSLKLANGRVIEKTLYNRRTRQDEPALFVALTFERREVLDSSNIKPMNLIGVDRGENIPAVIALTDPEGCPLSRFKDSLGNPTHILRIGESYKEKQRTIQAKKEVEQRRAGGYSRKYASKAKNLADDMVRNTARDLLYYAVTQDAMLIFENLSRGFGRQGKRTFMAERQYTRMEDWLTAKLAYEGLPSKTYLSKTLAQYTSKTCSNCGFTITSADYDRVLEKLKKTATGWMTTINGKELKVEGQITYYNRYKRQNVVKDLSVELDRLSEESVNNDISSWTKGRSGEALSLLKKRFSHRPVQEKFVCLNCEFETHADEQAALNIARSWLFLRSQEYKKYQTNKTTGNTDKRAFVETWQSFYRKKLKEVWKPAV

SEQ ID NO: 47637 - protein, 978 aa, synthetic construct
  REGION 1..978: note = engineered CasX variant
QEIKRINKIRRRLVKDSNTKKAGKTGPMKTLLVRVMTPDLRERLENLRKKPENIPQPISNTSRANLNKLLTDYTEMKKAILHVYWEEFQKDPVGLMSRVAQPASKKIDQNKLKPEMDEKGNLTTAGFACSQCGQPLFVYKLEQVSEKGKAYTNYFGRCNVAEHEKLILLAQLKPEKDSDEAVTYSLGKFGQRALDFYSIHVTKESTHPVKPLAQIAGNRYASVPVGKALSDACMGTIASFLSKYQDIIIEHQKVVKGNQKRLESLRELAGKENLEYPSVTLPPQPHTKEGVDAYNEVIARVRMWVNLNLWQKLKLSRDDAKPLLRLKGFPSFPLVERQANEVDWWDMVCNVKKLINEKKEDGKVFWQNLAGYKRQEALRPYLSSEEDRKKGKKFARYQLGDLLLHLEKKHPEDWGKVYDEAWERIDKKVEGLSKHIKLEEERRSEDAQSKAALTDWLRAKASFVIEGLKEADKDEFCRCELKLQKWYGDLRGKPFAIEAENSILDISGFSKQYNCAFIWQKDGVKKLNLYLIINYFKGGKLRFKKIKPEAFEANRFYTVINKKSGEIVPMEVNFNFDDPNLIILPLAFGKRQGREFIWNDLLSLETGSLKLANGRVIEKTLYNRRTRQDEPALFVALTFERREVLDSSNIKPMNLIGVDRGENIPAVIALTDPEGCPLSRFKDSLGNPTHILRIGESYKEKQRTIQAKKEVEQRRAGGYSRKYASKAKNLADDMVRNTARDLLYYAVTQDAMLIFENLSRGFGRQGKRTFMAERQYTRMEDWLTAKLAYEGLPSKTYLSKTLAQYTSKTCSNCGFTITSADYDRVLEKLKKTATGWMTTINGKELKVEGQITYYNRYKRQNVVKDLSVELDRLSEESVNNDISSWTKGRSGEALSLLKKRFSHRPVQEKFVCLNCEFETHADEQAALNIARSWLFLRSQEYKKYQTNKTTGNTDKRAFVETWQSFYRKKLKEVWKPAV

SEQ ID NO: 47638 - protein, 978 aa, synthetic construct
  REGION 1..978: note = engineered CasX variant
QEIKRINKIRRRLVKDSNTKKAGKTGPMKTLLVRVMTPDLRERLENLRKKPENIPQPISNTSRANLNKLLTDYTEMKKAILHVYWEEFQKDPVGLMSRVAQPASKKIDQNKLKPEMDEKGNLTTAGFACSQCGQPLFVYKLEQVSEKGKAYTNYFGRCNVAEHEKLIKLAQLKPEKDSDEAVTYSLGKFGQRALDFYSIHVTKESTHPVKPLAQIAGNRYASGPVGKALSDACMGTIASFLSKYQDIIIEHQKVVKGNQKRLESLRELAGKENLEYPSVTLPPQPHTKEGVDAYNEVIARVRMWVNLNLWQKLKLSRDDAKPLLRLKGFPSFPLVERQANEVDWWDMVCNVKKLINEKKEDGKVFWQNLAGYKRQEALRPYLSSEEDRKKGKKFARYQLGDLLLHLEKKHPEDWGKVYDEAWERIDKKVEGLSKHIKLEEERRSEDAQSKAALTDWLRAKASFVIEGLKEADKDEFCRCELKLQKWYGDLRGKPFAIEAENSILDISGFSKQYNCAFIWQKDGVKKLNLYLIINYFKGGKLRFKKIKPEAFEANRFYTVINKKSGEIVPMEVNFNFDDPNLIILPLAFGKRQGREFIWNDLLSLETGSLKLANGRVIEKTLYNRRTRQDEPALFVALTFERREVLDSSNIKPMNLIGVDRGENIPAVIALTDPEGCPLSRFKDSLGNPTHILRIGESYKEKQRTIQAKKEVEQRRAGGYSRKYASKAKNLADDMVRNTARDLLYYAVTQDAMLIFENLSRGFGRQGKRTFMAERQYTRMEDWLTAKLAYEGLPSKTYLSKTLAQYTSKTCSNCGFTITSADYDRVLEKLKKTATGWMTTINGKELKVEGQITYYNRYKRQNVVKDLSVELDRLSEESVNNDISSWTKGRSGEALSLLKKRFSHRPVQEKFVCLNCEFETHADEQAALNIARSWLFLRSQEYKKYQTNKTTGNTDKRAFVETWQSFYRKKLKEVWKPAV

SEQ ID NO: 47639 - protein, 977 aa, synthetic construct
  REGION 1..977: note = engineered CasX variant
QEIKRINKIRRRLVKDSNTKKAGKTGPMKTLLVRVMTPDLRERLENLRKKPENIPQPISNTSRANLNKLLTDYTEMKKAILHVYWEEFQKDPVGLMSRVAQPASKKIDQNKLKPEMDEKGNLTTAGFACSQCGQPLFVYKLEQVSEKGKAYTNYFGRCNVAEHEKLILLAQLKPEKDSDEAVTYSLGKFGQRALDFYSIHVTKESTHPVKPLAQIAGNRYASPVGKALSDACMGTIASFLSKYQDIIIEHQKVVKGNQKRLESLRELAGKENLEYPSVTLPPQPHTKEGVDAYNEVIARVRMWVNLNLWQKLKLSRDDAKPLLRLKGFPSFPLVERQANEVDWWDMVCNVKKLINEKKEDGKVFWQNLAGYKRQEALRPYLSSEEDRKKGKKFARYQLGDLLLHLEKKHPEDWGKVYDEAWERIDKKVEGLSKHIKLEEERRSEDAQSKAALTDWLRAKASFVIEGLKEADKDEFCRCELKLQKWYGDLRGKPFAIEAENSILDISGFSKQYNCAFIWQKDGVKKLNLYLIINYFKGGKLRFKKIKPEAFEANRFYTVINKKSGEIVPMEVNFNFDDPNLIILPLAFGKRQGREFIWNDLLSLETGSLKLANGRVIEKTLYNRRTRQDEPALFVALTFERREVLDSSNIKPMNLIGVDRGENIPAVIALTDPEGCPLSRFKDSLGNPTHILRIGESYKEKQRTIQAKKEVEQRRAGGYSRKYASKAKNLADDMVRNTARDLLYYAVTQDAMLIFENLSRGFGRQGKRTFMAERQYTRMEDWLTAKLAYEGLPSKTYLSKTLAQYTSKTCSNCGFTITSADYDRVLEKLKKTATGWMTTINGKELKVEGQITYYNRYKRQNVVKDLSVELDRLSEESVNNDISSWTKGRSGEALSLLKKRFSHRPVQEKFVCLNCEFETHADEQAALNIARSWLFLRSQEYKKYQTNKTTGNTDKRAFVETWQSFYRKKLKEVWKPAV

SEQ ID NO: 47640 - protein, 979 aa, synthetic construct
  REGION 1..979: note = engineered CasX variant
QEIKRINKIRRRLVKDSNTKKAGKTGPMKTLLVRVMTPDLRERLENLRKKPENIPQPISNTSRANLNKLLTDYTEMKKAILHVYWEEFQKDPVGLMSRVAQPASKKIDQNKLKPEMDEKGNLTTAGFACSQCGQPLFVYKLEQVSEKGKAYTNYFGRCNVAEHEKLILLAQLKPEKDSDEAVTYSLGKFGQRALDFYSIHVTKESTHPVKPLAQIAGNRYASYPVGKALSDACMGTIASFLSKYQDIIIEHQKVVKGNQKRLESLRELAGKENLEYPSVTLPPQPHTKEGVDAYNEVIARVRMWVNLNLWQKLKLSRDDAKPLLRLKGFPSFPLVERQANEVDWWDMVCNVKKLINEKKEDGKVFWQNLAGYKRQEALRPYLSSEEDRKKGKKFARYQLGDLLLHLEKKHGERDWGKVYDEAWERIDKKVEGLSKHIKLEEERRSEDAQSKAALTDWLRAKASFVIEGLKEADKDEFCRCELKLQKWYGDLRGKPFAIEAENSILDISGFSKQYNCAFIWQKDGVKKLNLYLIINYFKGGKLRFKKIKPEAFEANRFYTVINKKSGEIVPMEVNFNFDDPNLIILPLAFGKRQGREFIWNDLLSLETGSLKLANGRVIEKTLYNRRTRQDEPALFVALTFERREVLDSSNIKPMNLIGVDRGENIPAVIALTDPEGCPLSRFKDSLGNPTHILRIGESYKEKQRTIQAKKEVEQRRAGGYSRKYASKAKNLADDMVRNTARDLLYYAVTQDAMLIFENLSRGFGRQGKRTFMAERQYTRMEDWLTAKLAYEGLPSKTYLSKTLAQYTSKTCSNCGFTITSADYDRVLEKLKKTATGWMTTINGKELKVEGQITYYNRYKRQNVVKDLSVELDRLSEESVNNDISSWTKGRSGEALSLLKKRFSHRPVQEKFVCLNCEFETHADEQAALNIARSWLFLRSQEYKKYQTNKTTGNTDKRAFVETWQSFYRKKLKEVWKPAV

SEQ ID NO: 47641 - protein, 979 aa, synthetic construct
  REGION 1..979: note = engineered CasX variant
QEIKRINKIRRRLVKDSNTKKAGKTGPMKTLLVRVMTPDLRERLENLRKKPENIPQPISNTSRANLNKLLTDYTEMKKAILHVYWEEFQKDPVGLMSRVAQPASKKIDQNKLKPEMDEKGNLTTAGFACSQCGQPLFVYKLEQVSEKGKAYTNYFGRCNVAEHEKLILLAQLKPEKDSDEAVTYSLGKFGQRALDFYSIHVTKESTHPVKPLAQIAGNRYASHPVGKALSDACMGTIASFLSKYQDIIIEHQKVVKGNQKRLESLRELAGKENLEYPSVTLPPQPHTKEGVDAYNEVIARVRMWVNLNLWQKLKLSRDDAKPLLRLKGFPSFPLVERQANEVDWWDMVCNVKKLINEKKEDGKVFWQNLAGYKRQEALRPYLSSEEDRKKGKKFARYQLGDLLLHLEKKHGERDWGKVYDEAWERIDKKVEGLSKHIKLEEERRSEDAQSKAALTDWLRAKASFVIEGLKEADKDEFCRCELKLQKWYGDLRGKPFAIEAENSILDISGFSKQYNCAFIWQKDGVKKLNLYLIINYFKGGKLRFKKIKPEAFEANRFYTVINKKSGEIVPMEVNFNFDDPNLIILPLAFGKRQGREFIWNDLLSLETGSLKLANGRVIEKTLYNRRTRQDEPALFVALTFERREVLDSSNIKPMNLIGVDRGENIPAVIALTDPEGCPLSRFKDSLGNPTHILRIGESYKEKQRTIQAKKEVEQRRAGGYSRKYASKAKNLADDMVRNTARDLLYYAVTQDAMLIFENLSRGFGRQGKRTFMAERQYTRMEDWLTAKLAYEGLPSKTYLSKTLAQYTSKTCSNCGFTITSADYDRVLEKLKKTATGWMTTINGKELKVEGQITYYNRYKRQNVVKDLSVELDRLSEESVNNDISSWTKGRSGEALSLLKKRFSHRPVQEKFVCLNCEFETHADEQAALNIARSWLFLRSQEYKKYQTNKTTGNTDKRAFVETWQSFYRKKLKEVWKPAV

SEQ ID NO: 47642 - protein, 979 aa, synthetic construct
  REGION 1..979: note = engineered CasX variant
QEIKRINKIRRRLVKDSNTKKAGKTGPMKTLLVRVMTPDLRERLENLRKKPENIPQPISNTSRANLNKLLTDYTEMKKAILHVYWEEFQKDPVGLMSRVAQPASKKIDQNKLKPEMDEKGNLTTAGFACSQCGQPLFVYKLEQVSEKGKAYTNYFGRCNVAEHEKLILLAQLKPEKDSDEAVTYSLGKFGQRALDFYSIHVTKESTHPVKPLAQIAGNRYASSPVGKALSDACMGTIASFLSKYQDIIIEHQKVVKGNQKRLESLRELAGKENLEYPSVTLPPQPHTKEGVDAYNEVIARVRMWVNLNLWQKLKLSRDDAKPLLRLKGFPSFPLVERQANEVDWWDMVCNVKKLINEKKEDGKVFWQNLAGYKRQEALRPYLSSEEDRKKGKKFARYQLGDLLLHLEKKHGERDWGKVYDEAWERIDKKVEGLSKHIKLEEERRSEDAQSKAALTDWLRAKASFVIEGLKEADKDEFCRCELKLQKWYGDLRGKPFAIEAENSILDISGFSKQYNCAFIWQKDGVKKLNLYLIINYFKGGKLRFKKIKPEAFEANRFYTVINKKSGEIVPMEVNFNFDDPNLIILPLAFGKRQGREFIWNDLLSLETGSLKLANGRVIEKTLYNRRTRQDEPALFVALTFERREVLDSSNIKPMNLIGVDRGENIPAVIALTDPEGCPLSRFKDSLGNPTHILRIGESYKEKQRTIQAKKEVEQRRAGGYSRKYASKAKNLADDMVRNTARDLLYYAVTQDAMLIFENLSRGFGRQGKRTFMAERQYTRMEDWLTAKLAYEGLPSKTYLSKTLAQYTSKTCSNCGFTITSADYDRVLEKLKKTATGWMTTINGKELKVEGQITYYNRYKRQNVVKDLSVELDRLSEESVNNDISSWTKGRSGEALSLLKKRFSHRPVQEKFVCLNCEFETHADEQAALNIARSWLFLRSQEYKKYQTNKTTGNTDKRAFVETWQSFYRKKLKEVWKPAV

SEQ ID NO: 47643 - protein, 979 aa, synthetic construct
  REGION 1..979: note = engineered CasX variant
QEIKRINKIRRRLVKDSNTKKAGKTGPMKTLLVRVMTPDLRERLENLRKKPENIPQPISNTSRANLNKLLTDYTEMKKAILHVYWEEFQKDPVGLMSRVAQPASKKIDQNKLKPEMDEKGNLTTAGFACSQCGQPLFVYKLEQVSEKGKAYTNYFGRCNVAEHEKLILLAQLKPEKDSDEAVTYSLGKFGQRALDFYSIHVTKESTHPVKPLAQIAGNRYASTPVGKALSDACMGTIASFLSKYQDIIIEHQKVVKGNQKRLESLRELAGKENLEYPSVTLPPQPHTKEGVDAYNEVIARVRMWVNLNLWQKLKLSRDDAKPLLRLKGFPSFPLVERQANEVDWWDMVCNVKKLINEKKEDGKVFWQNLAGYKRQEALRPYLSSEEDRKKGKKFARYQLGDLLLHLEKKHGERDWGKVYDEAWERIDKKVEGLSKHIKLEEERRSEDAQSKAALTDWLRAKASFVIEGLKEADKDEFCRCELKLQKWYGDLRGKPFAIEAENSILDISGFSKQYNCAFIWQKDGVKKLNLYLIINYFKGGKLRFKKIKPEAFEANRFYTVINKKSGEIVPMEVNFNFDDPNLIILPLAFGKRQGREFIWNDLLSLETGSLKLANGRVIEKTLYNRRTRQDEPALFVALTFERREVLDSSNIKPMNLIGVDRGENIPAVIALTDPEGCPLSRFKDSLGNPTHILRIGESYKEKQRTIQAKKEVEQRRAGGYSRKYASKAKNLADDMVRNTARDLLYYAVTQDAMLIFENLSRGFGRQGKRTFMAERQYTRMEDWLTAKLAYEGLPSKTYLSKTLAQYTSKTCSNCGFTITSADYDRVLEKLKKTATGWMTTINGKELKVEGQITYYNRYKRQNVVKDLSVELDRLSEESVNNDISSWTKGRSGEALSLLKKRFSHRPVQEKFVCLNCEFETHADEQAALNIARSWLFLRSQEYKKYQTNKTTGNTDKRAFVETWQSFYRKKLKEVWKPAV

SEQ ID NO: 47644 - protein, 979 aa, synthetic construct
  REGION 1..979: note = engineered CasX variant
QEIKRINKIRRRLVKDSNTKKAGKTGPMKTLLVRVMTPDLRERLENLRKKPENIPQPISNTSRANLNKLLTDYTEMKKAILHVYWEEFQKDPVGLMSRVAQPASKKIDQNKLKPEMDEKGNLTTAGFACSQCGQPLFVYKLEQVSEKGKAYTNYFGRCNVAEHEKLILLAQLKPEKDSDEAVTYSLGKFGQRALDFYSIHVTKESTHPVKPLAQIAGNRYASAPVGKALSDACMGTIASFLSKYQDIIIEHQKVVKGNQKRLESLRELAGKENLEYPSVTLPPQPHTKEGVDAYNEVIARVRMWVNLNLWQKLKLSRDDAKPLLRLKGFPSFPLVERQANEVDWWDMVCNVKKLINEKKEDGKVFWQNLAGYKRQEALRPYLSSEEDRKKGKKFARYQLGDLLLHLEKKHGERDWGKVYDEAWERIDKKVEGLSKHIKLEEERRSEDAQSKAALTDWLRAKASFVIEGLKEADKDEFCRCELKLQKWYGDLRGKPFAIEAENSILDISGFSKQYNCAFIWQKDGVKKLNLYLIINYFKGGKLRFKKIKPEAFEANRFYTVINKKSGEIVPMEVNFNFDDPNLIILPLAFGKRQGREFIWNDLLSLETGSLKLANGRVIEKTLYNRRTRQDEPALFVALTFERREVLDSSNIKPMNLIGVDRGENIPAVIALTDPEGCPLSRFKDSLGNPTHILRIGESYKEKQRTIQAKKEVEQRRAGGYSRKYASKAKNLADDMVRNTARDLLYYAVTQDAMLIFENLSRGFGRQGKRTFMAERQYTRMEDWLTAKLAYEGLPSKTYLSKTLAQYTSKTCSNCGFTITSADYDRVLEKLKKTATGWMTTINGKELKVEGQITYYNRYKRQNVVKDLSVELDRLSEESVNNDISSWTKGRSGEALSLLKKRFSHRPVQEKFVCLNCEFETHADEQAALNIARSWLFLRSQEYKKYQTNKTTGNTDKRAFVETWQSFYRKKLKEVWKPAV

SEQ ID NO: 47645 - protein, 979 aa, synthetic construct
  REGION 1..979: note = engineered CasX variant
QEIKRINKIRRRLVKDSNTKKAGKTGPMKTLLVRVMTPDLRERLENLRKKPENIPQPISNTSRANLNKLLTDYTEMKKAILHVYWEEFQKDPVGLMSRVAQPASKKIDQNKLKPEMDEKGNLTTAGFACSQCGQPLFVYKLEQVSEKGKAYTNYFGRCNVAEHEKLILLAQLKPEKDSDEAVTYSLGKFGQRALDFYSIHVTKESTHPVKPLAQIAGNRYASVPVGKALSDACMGTIASFLSKYQDIIIEHQKVVKGNQKRLESLRELAGKENLEYPSVTLPPQPHTKEGVDAYNEVIARVRMWVNLNLWQKLKLSRDDAKPLLRLKGFPSFPLVERQANEVDWWDMVCNVKKLINEKKEDGKVFWQNLAGYKRQEALRPYLSSEEDRKKGKKFARYQLGDLLLHLEKKHGERDWGKVYDEAWERIDKKVEGLSKHIKLEEERRSEDAQSKAALTDWLRAKASFVIEGLKEADKDEFCRCELKLQKWYGDLRGKPFAIEAENSILDISGFSKQYNCAFIWQKDGVKKLNLYLIINYFKGGKLRFKKIKPEAFEANRFYTVINKKSGEIVPMEVNFNFDDPNLIILPLAFGKRQGREFIWNDLLSLETGSLKLANGRVIEKTLYNRRTRQDEPALFVALTFERREVLDSSNIKPMNLIGVDRGENIPAVIALTDPEGCPLSRFKDSLGNPTHILRIGESYKEKQRTIQAKKEVEQRRAGGYSRKYASKAKNLADDMVRNTARDLLYYAVTQDAMLIFENLSRGFGRQGKRTFMAERQYTRMEDWLTAKLAYEGLPSKTYLSKTLAQYTSKTCSNCGFTITSADYDRVLEKLKKTATGWMTTINGKELKVEGQITYYNRYKRQNVVKDLSVELDRLSEESVNNDISSWTKGRSGEALSLLKKRFSHRPVQEKFVCLNCEFETHADEQAALNIARSWLFLRSQEYKKYQTNKTTGNTDKRAFVETWQSFYRKKLKEVWKPAV

SEQ ID NO: 47646 - protein, 979 aa, synthetic construct
  REGION 1..979: note = engineered CasX variant
QEIKRINKIRRRLVKDSNTKKAGKTGPMKTLLVRVMTPDLRERLENLRKKPENIPQPISNTSRANLNKLLTDYTEMKKAILHVYWEEFQKDPVGLMSRVAQPASKKIDQNKLKPEMDEKGNLTTAGFACSQCGQPLFVYKLEQVSEKGKAYTNYFGRCNVAEHEKLIKLAQLKPEKDSDEAVTYSLGKFGQRALDFYSIHVTKESTHPVKPLAQIAGNRYASGPVGKALSDACMGTIASFLSKYQDIIIEHQKVVKGNQKRLESLRELAGKENLEYPSVTLPPQPHTKEGVDAYNEVIARVRMWVNLNLWQKLKLSRDDAKPLLRLKGFPSFPLVERQANEVDWWDMVCNVKKLINEKKEDGKVFWQNLAGYKRQEALRPYLSSEEDRKKGKKFARYQLGDLLLHLEKKHGERDWGKVYDEAWERIDKKVEGLSKHIKLEEERRSEDAQSKAALTDWLRAKASFVIEGLKEADKDEFCRCELKLQKWYGDLRGKPFAIEAENSILDISGFSKQYNCAFIWQKDGVKKLNLYLIINYFKGGKLRFKKIKPEAFEANRFYTVINKKSGEIVPMEVNFNFDDPNLIILPLAFGKRQGREFIWNDLLSLETGSLKLANGRVIEKTLYNRRTRQDEPALFVALTFERREVLDSSNIKPMNLIGVDRGENIPAVIALTDPEGCPLSRFKDSLGNPTHILRIGESYKEKQRTIQAKKEVEQRRAGGYSRKYASKAKNLADDMVRNTARDLLYYAVTQDAMLIFENLSRGFGRQGKRTFMAERQYTRMEDWLTAKLAYEGLPSKTYLSKTLAQYTSKTCSNCGFTITSADYDRVLEKLKKTATGWMTTINGKELKVEGQITYYNRYKRQNVVKDLSVELDRLSEESVNNDISSWTKGRSGEALSLLKKRFSHRPVQEKFVCLNCEFETHADEQAALNIARSWLFLRSQEYKKYQTNKTTGNTDKRAFVETWQSFYRKKLKEVWKPAV

SEQ ID NO: 47647 - protein, 978 aa, synthetic construct
  REGION 1..978: note = engineered CasX variant
QEIKRINKIRRRLVKDSNTKKAGKTGPMKTLLVRVMTPDLRERLENLRKKPENIPQPISNTSRANLNKLLTDYTEMKKAILHVYWEEFQKDPVGLMSRVAQPASKKIDQNKLKPEMDEKGNLTTAGFACSQCGQPLFVYKLEQVSEKGKAYTNYFGRCNVAEHEKLILLAQLKPEKDSDEAVTYSLGKFGQRALDFYSIHVTKESTHPVKPLAQIAGNRYASPVGKALSDACMGTIASFLSKYQDIIIEHQKVVKGNQKRLESLRELAGKENLEYPSVTLPPQPHTKEGVDAYNEVIARVRMWVNLNLWQKLKLSRDDAKPLLRLKGFPSFPLVERQANEVDWWDMVCNVKKLINEKKEDGKVFWQNLAGYKRQEALRPYLSSEEDRKKGKKFARYQLGDLLLHLEKKHGERDWGKVYDEAWERIDKKVEGLSKHIKLEEERRSEDAQSKAALTDWLRAKASFVIEGLKEADKDEFCRCELKLQKWYGDLRGKPFAIEAENSILDISGFSKQYNCAFIWQKDGVKKLNLYLIINYFKGGKLRFKKIKPEAFEANRFYTVINKKSGEIVPMEVNFNFDDPNLIILPLAFGKRQGREFIWNDLLSLETGSLKLANGRVIEKTLYNRRTRQDEPALFVALTFERREVLDSSNIKPMNLIGVDRGENIPAVIALTDPEGCPLSRFKDSLGNPTHILRIGESYKEKQRTIQAKKEVEQRRAGGYSRKYASKAKNLADDMVRNTARDLLYYAVTQDAMLIFENLSRGFGRQGKRTFMAERQYTRMEDWLTAKLAYEGLPSKTYLSKTLAQYTSKTCSNCGFTITSADYDRVLEKLKKTATGWMTTINGKELKVEGQITYYNRYKRQNVVKDLSVELDRLSEESVNNDISSWTKGRSGEALSLLKKRFSHRPVQEKFVCLNCEFETHADEQAALNIARSWLFLRSQEYKKYQTNKTTGNTDKRAFVETWQSFYRKKLKEVWKPAV

SEQ ID NO: 47648 - protein, 979 aa, synthetic construct
  REGION 1..979: note = engineered CasX variant
QEIKRINKIRRRLVKDSNTKKAGKTGPMKTLLVRVMTPDLRERLENLRKKPENIPQPISNTSRANLNKLLTDYTEMKKAILHVYWEEFQKDPVGLMSRVAQPASKKIDQNKLKPEMDEKGNLTTAGFACSQCGQPLFVYKLEQVSEKGKAYTNYFGRCNVAEHEKLILLAQLKPEKDSDEAVTYSLGKFGQRALDFYSIHVTKESTHPVKPLAQIAGNRYASYPVGKALSDACMGTIASFLSKYQDIIIEHQKVVKGNQKRLESLRELAGKENLEYPSVTLPPQPHTKEGVDAYNEVIARVRMWVNLNLWQKLKLSRDDAKPLLRLKGFPSFPLVERQANEVDWWDMVCNVKKLINEKKEDGKVFWQNLAGYKRQEALRPYLSSEEDRKKGKKFARYQLGDLLLHLEKKHGEYDWGKVYDEAWERIDKKVEGLSKHIKLEEERRSEDAQSKAALTDWLRAKASFVIEGLKEADKDEFCRCELKLQKWYGDLRGKPFAIEAENSILDISGFSKQYNCAFIWQKDGVKKLNLYLIINYFKGGKLRFKKIKPEAFEANRFYTVINKKSGEIVPMEVNFNFDDPNLIILPLAFGKRQGREFIWNDLLSLETGSLKLANGRVIEKTLYNRRTRQDEPALFVALTFERREVLDSSNIKPMNLIGVDRGENIPAVIALTDPEGCPLSRFKDSLGNPTHILRIGESYKEKQRTIQAKKEVEQRRAGGYSRKYASKAKNLADDMVRNTARDLLYYAVTQDAMLIFENLSRGFGRQGKRTFMAERQYTRMEDWLTAKLAYEGLPSKTYLSKTLAQYTSKTCSNCGFTITSADYDRVLEKLKKTATGWMTTINGKELKVEGQITYYNRYKRQNVVKDLSVELDRLSEESVNNDISSWTKGRSGEALSLLKKRFSHRPVQEKFVCLNCEFETHADEQAALNIARSWLFLRSQEYKKYQTNKTTGNTDKRAFVETWQSFYRKKLKEVWKPAV

SEQ ID NO: 47649 - protein, 979 aa, synthetic construct
  REGION 1..979: note = engineered CasX variant
QEIKRINKIRRRLVKDSNTKKAGKTGPMKTLLVRVMTPDLRERLENLRKKPENIPQPISNTSRANLNKLLTDYTEMKKAILHVYWEEFQKDPVGLMSRVAQPASKKIDQNKLKPEMDEKGNLTTAGFACSQCGQPLFVYKLEQVSEKGKAYTNYFGRCNVAEHEKLILLAQLKPEKDSDEAVTYSLGKFGQRALDFYSIHVTKESTHPVKPLAQIAGNRYASHPVGKALSDACMGTIASFLSKYQDIIIEHQKVVKGNQKRLESLRELAGKENLEYPSVTLPPQPHTKEGVDAYNEVIARVRMWVNLNLWQKLKLSRDDAKPLLRLKGFPSFPLVERQANEVDWWDMVCNVKKLINEKKEDGKVFWQNLAGYKRQEALRPYLSSEEDRKKGKKFARYQLGDLLLHLEKKHGEYDWGKVYDEAWERIDKKVEGLSKHIKLEEERRSEDAQSKAALTDWLRAKASFVIEGLKEADKDEFCRCELKLQKWYGDLRGKPFAIEAENSILDISGFSKQYNCAFIWQKDGVKKLNLYLIINYFKGGKLRFKKIKPEAFEANRFYTVINKKSGEIVPMEVNFNFDDPNLIILPLAFGKRQGREFIWNDLLSLETGSLKLANGRVIEKTLYNRRTRQDEPALFVALTFERREVLDSSNIKPMNLIGVDRGENIPAVIALTDPEGCPLSRFKDSLGNPTHILRIGESYKEKQRTIQAKKEVEQRRAGGYSRKYASKAKNLADDMVRNTARDLLYYAVTQDAMLIFENLSRGFGRQGKRTFMAERQYTRMEDWLTAKLAYEGLPSKTYLSKTLAQYTSKTCSNCGFTITSADYDRVLEKLKKTATGWMTTINGKELKVEGQITYYNRYKRQNVVKDLSVELDRLSEESVNNDISSWTKGRSGEALSLLKKRFSHRPVQEKFVCLNCEFETHADEQAALNIARSWLFLRSQEYKKYQTNKTTGNTDKRAFVETWQSFYRKKLKEVWKPAV

SEQ ID NO: 47650 - protein, 979 aa, synthetic construct
  REGION 1..979: note = engineered CasX variant
QEIKRINKIRRRLVKDSNTKKAGKTGPMKTLLVRVMTPDLRERLENLRKKPENIPQPISNTSRANLNKLLTDYTEMKKAILHVYWEEFQKDPVGLMSRVAQPASKKIDQNKLKPEMDEKGNLTTAGFACSQCGQPLFVYKLEQVSEKGKAYTNYFGRCNVAEHEKLILLAQLKPEKDSDEAVTYSLGKFGQRALDFYSIHVTKESTHPVKPLAQIAGNRYASSPVGKALSDACMGTIASFLSKYQDIIIEHQKVVKGNQKRLESLRELAGKENLEYPSVTLPPQPHTKEGVDAYNEVIARVRMWVNLNLWQKLKLSRDDAKPLLRLKGFPSFPLVERQANEVDWWDMVCNVKKLINEKKEDGKVFWQNLAGYKRQEALRPYLSSEEDRKKGKKFARYQLGDLLLHLEKKHGEYDWGKVYDEAWERIDKKVEGLSKHIKLEEERRSEDAQSKAALTDWLRAKASFVIEGLKEADKDEFCRCELKLQKWYGDLRGKPFAIEAENSILDISGFSKQYNCAFIWQKDGVKKLNLYLIINYFKGGKLRFKKIKPEAFEANRFYTVINKKSGEIVPMEVNFNFDDPNLIILPLAFGKRQGREFIWNDLLSLETGSLKLANGRVIEKTLYNRRTRQDEPALFVALTFERREVLDSSNIKPMNLIGVDRGENIPAVIALTDPEGCPLSRFKDSLGNPTHILRIGESYKEKQRTIQAKKEVEQRRAGGYSRKYASKAKNLADDMVRNTARDLLYYAVTQDAMLIFENLSRGFGRQGKRTFMAERQYTRMEDWLTAKLAYEGLPSKTYLSKTLAQYTSKTCSNCGFTITSADYDRVLEKLKKTATGWMTTINGKELKVEGQITYYNRYKRQNVVKDLSVELDRLSEESVNNDISSWTKGRSGEALSLLKKRFSHRPVQEKFVCLNCEFETHADEQAALNIARSWLFLRSQEYKKYQTNKTTGNTDKRAFVETWQSFYRKKLKEVWKPAV

SEQ ID NO: 47651 - protein, 979 aa, synthetic construct
  REGION 1..979: note = engineered CasX variant
QEIKRINKIRRRLVKDSNTKKAGKTGPMKTLLVRVMTPDLRERLENLRKKPENIPQPISNTSRANLNKLLTDYTEMKKAILHVYWEEFQKDPVGLMSRVAQPASKKIDQNKLKPEMDEKGNLTTAGFACSQCGQPLFVYKLEQVSEKGKAYTNYFGRCNVAEHEKLILLAQLKPEKDSDEAVTYSLGKFGQRALDFYSIHVTKESTHPVKPLAQIAGNRYASTPVGKALSDACMGTIASFLSKYQDIIIEHQKVVKGNQKRLESLRELAGKENLEYPSVTLPPQPHTKEGVDAYNEVIARVRMWVNLNLWQKLKLSRDDAKPLLRLKGFPSFPLVERQANEVDWWDMVCNVKKLINEKKEDGKVFWQNLAGYKRQEALRPYLSSEEDRKKGKKFARYQLGDLLLHLEKKHGEYDWGKVYDEAWERIDKKVEGLSKHIKLEEERRSEDAQSKAALTDWLRAKASFVIEGLKEADKDEFCRCELKLQKWYGDLRGKPFAIEAENSILDISGFSKQYNCAFIWQKDGVKKLNLYLIINYFKGGKLRFKKIKPEAFEANRFYTVINKKSGEIVPMEVNFNFDDPNLIILPLAFGKRQGREFIWNDLLSLETGSLKLANGRVIEKTLYNRRTRQDEPALFVALTFERREVLDSSNIKPMNLIGVDRGENIPAVIALTDPEGCPLSRFKDSLGNPTHILRIGESYKEKQRTIQAKKEVEQRRAGGYSRKYASKAKNLADDMVRNTARDLLYYAVTQDAMLIFENLSRGFGRQGKRTFMAERQYTRMEDWLTAKLAYEGLPSKTYLSKTLAQYTSKTCSNCGFTITSADYDRVLEKLKKTATGWMTTINGKELKVEGQITYYNRYKRQNVVKDLSVELDRLSEESVNNDISSWTKGRSGEALSLLKKRFSHRPVQEKFVCLNCEFETHADEQAALNIARSWLFLRSQEYKKYQTNKTTGNTDKRAFVETWQSFYRKKLKEVWKPAV

SEQ ID NO: 47652 - protein, 979 aa, synthetic construct
  REGION 1..979: note = engineered CasX variant
QEIKRINKIRRRLVKDSNTKKAGKTGPMKTLLVRVMTPDLRERLENLRKKPENIPQPISNTSRANLNKLLTDYTEMKKAILHVYWEEFQKDPVGLMSRVAQPASKKIDQNKLKPEMDEKGNLTTAGFACSQCGQPLFVYKLEQVSEKGKAYTNYFGRCNVAEHEKLILLAQLKPEKDSDEAVTYSLGKFGQRALDFYSIHVTKESTHPVKPLAQIAGNRYASAPVGKALSDACMGTIASFLSKYQDIIIEHQKVVKGNQKRLESLRELAGKENLEYPSVTLPPQPHTKEGVDAYNEVIARVRMWVNLNLWQKLKLSRDDAKPLLRLKGFPSFPLVERQANEVDWWDMVCNVKKLINEKKEDGKVFWQNLAGYKRQEALRPYLSSEEDRKKGKKFARYQLGDLLLHLEKKHGEYDWGKVYDEAWERIDKKVEGLSKHIKLEEERRSEDAQSKAALTDWLRAKASFVIEGLKEADKDEFCRCELKLQKWYGDLRGKPFAIEAENSILDISGFSKQYNCAFIWQKDGVKKLNLYLIINYFKGGKLRFKKIKPEAFEANRFYTVINKKSGEIVPMEVNFNFDDPNLIILPLAFGKRQGREFIWNDLLSLETGSLKLANGRVIEKTLYNRRTRQDEPALFVALTFERREVLDSSNIKPMNLIGVDRGENIPAVIALTDPEGCPLSRFKDSLGNPTHILRIGESYKEKQRTIQAKKEVEQRRAGGYSRKYASKAKNLADDMVRNTARDLLYYAVTQDAMLIFENLSRGFGRQGKRTFMAERQYTRMEDWLTAKLAYEGLPSKTYLSKTLAQYTSKTCSNCGFTITSADYDRVLEKLKKTATGWMTTINGKELKVEGQITYYNRYKRQNVVKDLSVELDRLSEESVNNDISSWTKGRSGEALSLLKKRFSHRPVQEKFVCLNCEFETHADEQAALNIARSWLFLRSQEYKKYQTNKTTGNTDKRAFVETWQSFYRKKLKEVWKPAV

SEQ ID NO: 47653 - protein, 979 aa, synthetic construct
  REGION 1..979: note = engineered CasX variant
QEIKRINKIRRRLVKDSNTKKAGKTGPMKTLLVRVMTPDLRERLENLRKKPENIPQPISNTSRANLNKLLTDYTEMKKAILHVYWEEFQKDPVGLMSRVAQPASKKIDQNKLKPEMDEKGNLTTAGFACSQCGQPLFVYKLEQVSEKGKAYTNYFGRCNVAEHEKLILLAQLKPEKDSDEAVTYSLGKFGQRALDFYSIHVTKESTHPVKPLAQIAGNRYASVPVGKALSDACMGTIASFLSKYQDIIIEHQKVVKGNQKRLESLRELAGKENLEYPSVTLPPQPHTKEGVDAYNEVIARVRMWVNLNLWQKLKLSRDDAKPLLRLKGFPSFPLVERQANEVDWWDMVCNVKKLINEKKEDGKVFWQNLAGYKRQEALRPYLSSEEDRKKGKKFARYQLGDLLLHLEKKHGEYDWGKVYDEAWERIDKKVEGLSKHIKLEEERRSEDAQSKAALTDWLRAKASFVIEGLKEADKDEFCRCELKLQKWYGDLRGKPFAIEAENSILDISGFSKQYNCAFIWQKDGVKKLNLYLIINYFKGGKLRFKKIKPEAFEANRFYTVINKKSGEIVPMEVNFNFDDPNLIILPLAFGKRQGREFIWNDLLSLETGSLKLANGRVIEKTLYNRRTRQDEPALFVALTFERREVLDSSNIKPMNLIGVDRGENIPAVIALTDPEGCPLSRFKDSLGNPTHILRIGESYKEKQRTIQAKKEVEQRRAGGYSRKYASKAKNLADDMVRNTARDLLYYAVTQDAMLIFENLSRGFGRQGKRTFMAERQYTRMEDWLTAKLAYEGLPSKTYLSKTLAQYTSKTCSNCGFTITSADYDRVLEKLKKTATGWMTTINGKELKVEGQITYYNRYKRQNVVKDLSVELDRLSEESVNNDISSWTKGRSGEALSLLKKRFSHRPVQEKFVCLNCEFETHADEQAALNIARSWLFLRSQEYKKYQTNKTTGNTDKRAFVETWQSFYRKKLKEVWKPAV

SEQ ID NO: 47654 - protein, 979 aa, synthetic construct
  REGION 1..979: note = engineered CasX variant
QEIKRINKIRRRLVKDSNTKKAGKTGPMKTLLVRVMTPDLRERLENLRKKPENIPQPISNTSRANLNKLLTDYTEMKKAILHVYWEEFQKDPVGLMSRVAQPASKKIDQNKLKPEMDEKGNLTTAGFACSQCGQPLFVYKLEQVSEKGKAYTNYFGRCNVAEHEKLIKLAQLKPEKDSDEAVTYSLGKFGQRALDFYSIHVTKESTHPVKPLAQIAGNRYASGPVGKALSDACMGTIASFLSKYQDIIIEHQKVVKGNQKRLESLRELAGKENLEYPSVTLPPQPHTKEGVDAYNEVIARVRMWVNLNLWQKLKLSRDDAKPLLRLKGFPSFPLVERQANEVDWWDMVCNVKKLINEKKEDGKVFWQNLAGYKRQEALRPYLSSEEDRKKGKKFARYQLGDLLLHLEKKHGEYDWGKVYDEAWERIDKKVEGLSKHIKLEEERRSEDAQSKAALTDWLRAKASFVIEGLKEADKDEFCRCELKLQKWYGDLRGKPFAIEAENSILDISGFSKQYNCAFIWQKDGVKKLNLYLIINYFKGGKLRFKKIKPEAFEANRFYTVINKKSGEIVPMEVNFNFDDPNLIILPLAFGKRQGREFIWNDLLSLETGSLKLANGRVIEKTLYNRRTRQDEPALFVALTFERREVLDSSNIKPMNLIGVDRGENIPAVIALTDPEGCPLSRFKDSLGNPTHILRIGESYKEKQRTIQAKKEVEQRRAGGYSRKYASKAKNLADDMVRNTARDLLYYAVTQDAMLIFENLSRGFGRQGKRTFMAERQYTRMEDWLTAKLAYEGLPSKTYLSKTLAQYTSKTCSNCGFTITSADYDRVLEKLKKTATGWMTTINGKELKVEGQITYYNRYKRQNVVKDLSVELDRLSEESVNNDISSWTKGRSGEALSLLKKRFSHRPVQEKFVCLNCEFETHADEQAALNIARSWLFLRSQEYKKYQTNKTTGNTDKRAFVETWQSFYRKKLKEVWKPAV

SEQ ID NO: 47655 - protein, 978 aa, synthetic construct
  REGION 1..978: note = engineered CasX variant
QEIKRINKIRRRLVKDSNTKKAGKTGPMKTLLVRVMTPDLRERLENLRKKPENIPQPISNTSRANLNKLLTDYTEMKKAILHVYWEEFQKDPVGLMSRVAQPASKKIDQNKLKPEMDEKGNLTTAGFACSQCGQPLFVYKLEQVSEKGKAYTNYFGRCNVAEHEKLILLAQLKPEKDSDEAVTYSLGKFGQRALDFYSIHVTKESTHPVKPLAQIAGNRYASPVGKALSDACMGTIASFLSKYQDIIIEHQKVVKGNQKRLESLRELAGKENLEYPSVTLPPQPHTKEGVDAYNEVIARVRMWVNLNLWQKLKLSRDDAKPLLRLKGFPSFPLVERQANEVDWWDMVCNVKKLINEKKEDGKVFWQNLAGYKRQEALRPYLSSEEDRKKGKKFARYQLGDLLLHLEKKHGEYDWGKVYDEAWERIDKKVEGLSKHIKLEEERRSEDAQSKAALTDWLRAKASFVIEGLKEADKDEFCRCELKLQKWYGDLRGKPFAIEAENSILDISGFSKQYNCAFIWQKDGVKKLNLYLIINYFKGGKLRFKKIKPEAFEANRFYTVINKKSGEIVPMEVNFNFDDPNLIILPLAFGKRQGREFIWNDLLSLETGSLKLANGRVIEKTLYNRRTRQDEPALFVALTFERREVLDSSNIKPMNLIGVDRGENIPAVIALTDPEGCPLSRFKDSLGNPTHILRIGESYKEKQRTIQAKKEVEQRRAGGYSRKYASKAKNLADDMVRNTARDLLYYAVTQDAMLIFENLSRGFGRQGKRTFMAERQYTRMEDWLTAKLAYEGLPSKTYLSKTLAQYTSKTCSNCGFTITSADYDRVLEKLKKTATGWMTTINGKELKVEGQITYYNRYKRQNVVKDLSVELDRLSEESVNNDISSWTKGRSGEALSLLKKRFSHRPVQEKFVCLNCEFETHADEQAALNIARSWLFLRSQEYKKYQTNKTTGNTDKRAFVETWQSFYRKKLKEVWKPAV

SEQ ID NO: 47656 - protein, 978 aa, synthetic construct
  REGION 1..978: note = engineered CasX variant
QEIKRINKIRRRLVKDSNTKKAGKTGPMKTLLVRVMTPDLRERLENLRKKPENIPQPISNTSRANLNKLLTDYTEMKKAILHVYWEEFQKDPVGLMSRVAQPASKKIDQNKLKPEMDEKGNLTTAGFACSQCGQPLFVYKLEQVSEKGKAYTNYFGRCNVAEHEKLILLAQLKPEKDSDEAVTYSLGKFGQRALDFYSIHVTKESTHPVKPLAQIAGNRYASYPVGKALSDACMGTIASFLSKYQDIIIEHQKVVKGNQKRLESLRELAGKENLEYPSVTLPPQPHTKEGVDAYNEVIARVRMWVNLNLWQKLKLSRDDAKPLLRLKGFPSFPLVERQANEVDWWDMVCNVKKLINEKKEDGKVFWQNLAGYKRQEALRPYLSSEEDRKKGKKFARYQLGDLLLHLEKKHGEDWGDVYDEAWERIDKKVEGLSKHIKLEEERRSEDAQSKAALTDWLRAKASFVIEGLKEADKDEFCRCELKLQKWYGDLRGKPFAIEAENSILDISGFSKQYNCAFIWQKDGVKKLNLYLIINYFKGGKLRFKKIKPEAFEANRFYTVINKKSGEIVPMEVNFNFDDPNLIILPLAFGKRQGREFIWNDLLSLETGSLKLANGRVIEKTLYNRRTRQDEPALFVALTFERREVLDSSNIKPMNLIGVDRGENIPAVIALTDPEGCPLSRFKDSLGNPTHILRIGESYKEKQRTIQAKKEVEQRRAGGYSRKYASKAKNLADDMVRNTARDLLYYAVTQDAMLIFENLSRGFGRQGKRTFMAERQYTRMEDWLTAKLAYEGLPSKTYLSKTLAQYTSKTCSNCGFTITSADYDRVLEKLKKTATGWMTTINGKELKVEGQITYYNRYKRQNVVKDLSVELDRLSEESVNNDISSWTKGRSGEALSLLKKRFSHRPVQEKFVCLNCEFETHADEQAALNIARSWLFLRSQEYKKYQTNKTTGNTDKRAFVETWQSFYRKKLKEVWKPAV

SEQ ID NO: 47657 - protein, 978 aa, synthetic construct
  REGION 1..978: note = engineered CasX variant
QEIKRINKIRRRLVKDSNTKKAGKTGPMKTLLVRVMTPDLRERLENLRKKPENIPQPISNTSRANLNKLLTDYTEMKKAILHVYWEEFQKDPVGLMSRVAQPASKKIDQNKLKPEMDEKGNLTTAGFACSQCGQPLFVYKLEQVSEKGKAYTNYFGRCNVAEHEKLILLAQLKPEKDSDEAVTYSLGKFGQRALDFYSIHVTKESTHPVKPLAQIAGNRYASHPVGKALSDACMGTIASFLSKYQDIIIEHQKVVKGNQKRLESLRELAGKENLEYPSVTLPPQPHTKEGVDAYNEVIARVRMWVNLNLWQKLKLSRDDAKPLLRLKGFPSFPLVERQANEVDWWDMVCNVKKLINEKKEDGKVFWQNLAGYKRQEALRPYLSSEEDRKKGKKFARYQLGDLLLHLEKKHGEDWGDVYDEAWERIDKKVEGLSKHIKLEEERRSEDAQSKAALTDWLRAKASFVIEGLKEADKDEFCRCELKLQKWYGDLRGKPFAIEAENSILDISGFSKQYNCAFIWQKDGVKKLNLYLIINYFKGGKLRFKKIKPEAFEANRFYTVINKKSGEIVPMEVNFNFDDPNLIILPLAFGKRQGREFIWNDLLSLETGSLKLANGRVIEKTLYNRRTRQDEPALFVALTFERREVLDSSNIKPMNLIGVDRGENIPAVIALTDPEGCPLSRFKDSLGNPTHILRIGESYKEKQRTIQAKKEVEQRRAGGYSRKYASKAKNLADDMVRNTARDLLYYAVTQDAMLIFENLSRGFGRQGKRTFMAERQYTRMEDWLTAKLAYEGLPSKTYLSKTLAQYTSKTCSNCGFTITSADYDRVLEKLKKTATGWMTTINGKELKVEGQITYYNRYKRQNVVKDLSVELDRLSEESVNNDISSWTKGRSGEALSLLKKRFSHRPVQEKFVCLNCEFETHADEQAALNIARSWLFLRSQEYKKYQTNKTTGNTDKRAFVETWQSFYRKKLKEVWKPAV

SEQ ID NO: 47658 - protein, 978 aa, synthetic construct
  REGION 1..978: note = engineered CasX variant
QEIKRINKIRRRLVKDSNTKKAGKTGPMKTLLVRVMTPDLRERLENLRKKPENIPQPISNTSRANLNKLLTDYTEMKKAILHVYWEEFQKDPVGLMSRVAQPASKKIDQNKLKPEMDEKGNLTTAGFACSQCGQPLFVYKLEQVSEKGKAYTNYFGRCNVAEHEKLILLAQLKPEKDSDEAVTYSLGKFGQRALDFYSIHVTKESTHPVKPLAQIAGNRYASSPVGKALSDACMGTIASFLSKYQDIIIEHQKVVKGNQKRLESLRELAGKENLEYPSVTLPPQPHTKEGVDAYNEVIARVRMWVNLNLWQKLKLSRDDAKPLLRLKGFPSFPLVERQANEVDWWDMVCNVKKLINEKKEDGKVFWQNLAGYKRQEALRPYLSSEEDRKKGKKFARYQLGDLLLHLEKKHGEDWGDVYDEAWERIDKKVEGLSKHIKLEEERRSEDAQSKAALTDWLRAKASFVIEGLKEADKDEFCRCELKLQKWYGDLRGKPFAIEAENSILDISGFSKQYNCAFIWQKDGVKKLNLYLIINYFKGGKLRFKKIKPEAFEANRFYTVINKKSGEIVPMEVNFNFDDPNLIILPLAFGKRQGREFIWNDLLSLETGSLKLANGRVIEKTLYNRRTRQDEPALFVALTFERREVLDSSNIKPMNLIGVDRGENIPAVIALTDPEGCPLSRFKDSLGNPTHILRIGESYKEKQRTIQAKKEVEQRRAGGYSRKYASKAKNLADDMVRNTARDLLYYAVTQDAMLIFENLSRGFGRQGKRTFMAERQYTRMEDWLTAKLAYEGLPSKTYLSKTLAQYTSKTCSNCGFTITSADYDRVLEKLKKTATGWMTTINGKELKVEGQITYYNRYKRQNVVKDLSVELDRLSEESVNNDISSWTKGRSGEALSLLKKRFSHRPVQEKFVCLNCEFETHADEQAALNIARSWLFLRSQEYKKYQTNKTTGNTDKRAFVETWQSFYRKKLKEVWKPAV

SEQ ID NO: 47659 - protein, 978 aa, synthetic construct
  REGION 1..978: note = engineered CasX variant
QEIKRINKIRRRLVKDSNTKKAGKTGPMKTLLVRVMTPDLRERLENLRKKPENIPQPISNTSRANLNKLLTDYTEMKKAILHVYWEEFQKDPVGLMSRVAQPASKKIDQNKLKPEMDEKGNLTTAGFACSQCGQPLFVYKLEQVSEKGKAYTNYFGRCNVAEHEKLILLAQLKPEKDSDEAVTYSLGKFGQRALDFYSIHVTKESTHPVKPLAQIAGNRYASTPVGKALSDACMGTIASFLSKYQDIIIEHQKVVKGNQKRLESLRELAGKENLEYPSVTLPPQPHTKEGVDAYNEVIARVRMWVNLNLWQKLKLSRDDAKPLLRLKGFPSFPLVERQANEVDWWDMVCNVKKLINEKKEDGKVFWQNLAGYKRQEALRPYLSSEEDRKKGKKFARYQLGDLLLHLEKKHGEDWGDVYDEAWERIDKKVEGLSKHIKLEEERRSEDAQSKAALTDWLRAKASFVIEGLKEADKDEFCRCELKLQKWYGDLRGKPFAIEAENSILDISGFSKQYNCAFIWQKDGVKKLNLYLIINYFKGGKLRFKKIKPEAFEANRFYTVINKKSGEIVPMEVNFNFDDPNLIILPLAFGKRQGREFIWNDLLSLETGSLKLANGRVIEKTLYNRRTRQDEPALFVALTFERREVLDSSNIKPMNLIGVDRGENIPAVIALTDPEGCPLSRFKDSLGNPTHILRIGESYKEKQRTIQAKKEVEQRRAGGYSRKYASKAKNLADDMVRNTARDLLYYAVTQDAMLIFENLSRGFGRQGKRTFMAERQYTRMEDWLTAKLAYEGLPSKTYLSKTLAQYTSKTCSNCGFTITSADYDRVLEKLKKTATGWMTTINGKELKVEGQITYYNRYKRQNVVKDLSVELDRLSEESVNNDISSWTKGRSGEALSLLKKRFSHRPVQEKFVCLNCEFETHADEQAALNIARSWLFLRSQEYKKYQTNKTTGNTDKRAFVETWQSFYRKKLKEVWKPAV

SEQ ID NO: 47660 - protein, 978 aa, synthetic construct
  REGION 1..978: note = engineered CasX variant
QEIKRINKIRRRLVKDSNTKKAGKTGPMKTLLVRVMTPDLRERLENLRKKPENIPQPISNTSRANLNKLLTDYTEMKKAILHVYWEEFQKDPVGLMSRVAQPASKKIDQNKLKPEMDEKGNLTTAGFACSQCGQPLFVYKLEQVSEKGKAYTNYFGRCNVAEHEKLILLAQLKPEKDSDEAVTYSLGKFGQRALDFYSIHVTKESTHPVKPLAQIAGNRYASAPVGKALSDACMGTIASFLSKYQDIIIEHQKVVKGNQKRLESLRELAGKENLEYPSVTLPPQPHTKEGVDAYNEVIARVRMWVNLNLWQKLKLSRDDAKPLLRLKGFPSFPLVERQANEVDWWDMVCNVKKLINEKKEDGKVFWQNLAGYKRQEALRPYLSSEEDRKKGKKFARYQLGDLLLHLEKKHGEDWGDVYDEAWERIDKKVEGLSKHIKLEEERRSEDAQSKAALTDWLRAKASFVIEGLKEADKDEFCRCELKLQKWYGDLRGKPFAIEAENSILDISGFSKQYNCAFIWQKDGVKKLNLYLIINYFKGGKLRFKKIKPEAFEANRFYTVINKKSGEIVPMEVNFNFDDPNLIILPLAFGKRQGREFIWNDLLSLETGSLKLANGRVIEKTLYNRRTRQDEPALFVALTFERREVLDSSNIKPMNLIGVDRGENIPAVIALTDPEGCPLSRFKDSLGNPTHILRIGESYKEKQRTIQAKKEVEQRRAGGYSRKYASKAKNLADDMVRNTARDLLYYAVTQDAMLIFENLSRGFGRQGKRTFMAERQYTRMEDWLTAKLAYEGLPSKTYLSKTLAQYTSKTCSNCGFTITSADYDRVLEKLKKTATGWMTTINGKELKVEGQITYYNRYKRQNVVKDLSVELDRLSEESVNNDISSWTKGRSGEALSLLKKRFSHRPVQEKFVCLNCEFETHADEQAALNIARSWLFLRSQEYKKYQTNKTTGNTDKRAFVETWQSFYRKKLKEVWKPAV

SEQ ID NO: 47661 - protein, 978 aa, synthetic construct
  REGION 1..978: note = engineered CasX variant
QEIKRINKIRRRLVKDSNTKKAGKTGPMKTLLVRVMTPDLRERLENLRKKPENIPQPISNTSRANLNKLLTDYTEMKKAILHVYWEEFQKDPVGLMSRVAQPASKKIDQNKLKPEMDEKGNLTTAGFACSQCGQPLFVYKLEQVSEKGKAYTNYFGRCNVAEHEKLILLAQLKPEKDSDEAVTYSLGKFGQRALDFYSIHVTKESTHPVKPLAQIAGNRYASVPVGKALSDACMGTIASFLSKYQDIIIEHQKVVKGNQKRLESLRELAGKENLEYPSVTLPPQPHTKEGVDAYNEVIARVRMWVNLNLWQKLKLSRDDAKPLLRLKGFPSFPLVERQANEVDWWDMVCNVKKLINEKKEDGKVFWQNLAGYKRQEALRPYLSSEEDRKKGKKFARYQLGDLLLHLEKKHGEDWGDVYDEAWERIDKKVEGLSKHIKLEEERRSEDAQSKAALTDWLRAKASFVIEGLKEADKDEFCRCELKLQKWYGDLRGKPFAIEAENSILDISGFSKQYNCAFIWQKDGVKKLNLYLIINYFKGGKLRFKKIKPEAFEANRFYTVINKKSGEIVPMEVNFNFDDPNLIILPLAFGKRQGREFIWNDLLSLETGSLKLANGRVIEKTLYNRRTRQDEPALFVALTFERREVLDSSNIKPMNLIGVDRGENIPAVIALTDPEGCPLSRFKDSLGNPTHILRIGESYKEKQRTIQAKKEVEQRRAGGYSRKYASKAKNLADDMVRNTARDLLYYAVTQDAMLIFENLSRGFGRQGKRTFMAERQYTRMEDWLTAKLAYEGLPSKTYLSKTLAQYTSKTCSNCGFTITSADYDRVLEKLKKTATGWMTTINGKELKVEGQITYYNRYKRQNVVKDLSVELDRLSEESVNNDISSWTKGRSGEALSLLKKRFSHRPVQEKFVCLNCEFETHADEQAALNIARSWLFLRSQEYKKYQTNKTTGNTDKRAFVETWQSFYRKKLKEVWKPAV

SEQ ID NO: 47662 - protein, 978 aa, synthetic construct
  REGION 1..978: note = engineered CasX variant
QEIKRINKIRRRLVKDSNTKKAGKTGPMKTLLVRVMTPDLRERLENLRKKPENIPQPISNTSRANLNKLLTDYTEMKKAILHVYWEEFQKDPVGLMSRVAQPASKKIDQNKLKPEMDEKGNLTTAGFACSQCGQPLFVYKLEQVSEKGKAYTNYFGRCNVAEHEKLIKLAQLKPEKDSDEAVTYSLGKFGQRALDFYSIHVTKESTHPVKPLAQIAGNRYASGPVGKALSDACMGTIASFLSKYQDIIIEHQKVVKGNQKRLESLRELAGKENLEYPSVTLPPQPHTKEGVDAYNEVIARVRMWVNLNLWQKLKLSRDDAKPLLRLKGFPSFPLVERQANEVDWWDMVCNVKKLINEKKEDGKVFWQNLAGYKRQEALRPYLSSEEDRKKGKKFARYQLGDLLLHLEKKHGEDWGDVYDEAWERIDKKVEGLSKHIKLEEERRSEDAQSKAALTDWLRAKASFVIEGLKEADKDEFCRCELKLQKWYGDLRGKPFAIEAENSILDISGFSKQYNCAFIWQKDGVKKLNLYLIINYFKGGKLRFKKIKPEAFEANRFYTVINKKSGEIVPMEVNFNFDDPNLIILPLAFGKRQGREFIWNDLLSLETGSLKLANGRVIEKTLYNRRTRQDEPALFVALTFERREVLDSSNIKPMNLIGVDRGENIPAVIALTDPEGCPLSRFKDSLGNPTHILRIGESYKEKQRTIQAKKEVEQRRAGGYSRKYASKAKNLADDMVRNTARDLLYYAVTQDAMLIFENLSRGFGRQGKRTFMAERQYTRMEDWLTAKLAYEGLPSKTYLSKTLAQYTSKTCSNCGFTITSADYDRVLEKLKKTATGWMTTINGKELKVEGQITYYNRYKRQNVVKDLSVELDRLSEESVNNDISSWTKGRSGEALSLLKKRFSHRPVQEKFVCLNCEFETHADEQAALNIARSWLFLRSQEYKKYQTNKTTGNTDKRAFVETWQSFYRKKLKEVWKPAV

SEQ ID NO: 47663 - protein, 977 aa, synthetic construct
  REGION 1..977: note = engineered CasX variant
QEIKRINKIRRRLVKDSNTKKAGKTGPMKTLLVRVMTPDLRERLENLRKKPENIPQPISNTSRANLNKLLTDYTEMKKAILHVYWEEFQKDPVGLMSRVAQPASKKIDQNKLKPEMDEKGNLTTAGFACSQCGQPLFVYKLEQVSEKGKAYTNYFGRCNVAEHEKLILLAQLKPEKDSDEAVTYSLGKFGQRALDFYSIHVTKESTHPVKPLAQIAGNRYASPVGKALSDACMGTIASFLSKYQDIIIEHQKVVKGNQKRLESLRELAGKENLEYPSVTLPPQPHTKEGVDAYNEVIARVRMWVNLNLWQKLKLSRDDAKPLLRLKGFPSFPLVERQANEVDWWDMVCNVKKLINEKKEDGKVFWQNLAGYKRQEALRPYLSSEEDRKKGKKFARYQLGDLLLHLEKKHGEDWGDVYDEAWERIDKKVEGLSKHIKLEEERRSEDAQSKAALTDWLRAKASFVIEGLKEADKDEFCRCELKLQKWYGDLRGKPFAIEAENSILDISGFSKQYNCAFIWQKDGVKKLNLYLIINYFKGGKLRFKKIKPEAFEANRFYTVINKKSGEIVPMEVNFNFDDPNLIILPLAFGKRQGREFIWNDLLSLETGSLKLANGRVIEKTLYNRRTRQDEPALFVALTFERREVLDSSNIKPMNLIGVDRGENIPAVIALTDPEGCPLSRFKDSLGNPTHILRIGESYKEKQRTIQAKKEVEQRRAGGYSRKYASKAKNLADDMVRNTARDLLYYAVTQDAMLIFENLSRGFGRQGKRTFMAERQYTRMEDWLTAKLAYEGLPSKTYLSKTLAQYTSKTCSNCGFTITSADYDRVLEKLKKTATGWMTTINGKELKVEGQITYYNRYKRQNVVKDLSVELDRLSEESVNNDISSWTKGRSGEALSLLKKRFSHRPVQEKFVCLNCEFETHADEQAALNIARSWLFLRSQEYKKYQTNKTTGNTDKRAFVETWQSFYRKKLKEVWKPAV

SEQ ID NO: 47664 - protein, 978 aa, synthetic construct
  REGION 1..978: note = engineered CasX variant
QEIKRINKIRRRLVKDSNTKKAGKTGPMKTLLVRVMTPDLRERLENLRKKPENIPQPISNTSRANLNKLLTDYTEMKKAILHVYWEEFQKDPVGLMSRVAQPASKKIDQNKLKPEMDEKGNLTTAGFACSQCGQPLFVYKLEQVSEKGKAYTNYFGRCNVAEHEKLILLAQLKPEKDSDEAVTYSLGKFGQRALDFYSIHVTKESTHPVKPLAQIAGNRYASYPVGKALSDACMGTIASFLSKYQDIIIEHQKVVKGNQKRLESLRELAGKENLEYPSVTLPPQPHTKEGVDAYNEVIARVRMWVNLNLWQKLKLSRDDAKPLLRLKGFPSFPLVERQANEVDWWDMVCNVKKLINEKKEDGKVFWQNLAGYKRQEALRPYLSSEEDRKKGKKFARYQLGDLLLHLEKKHGEDWGKVYGEAWERIDKKVEGLSKHIKLEEERRSEDAQSKAALTDWLRAKASFVIEGLKEADKDEFCRCELKLQKWYGDLRGKPFAIEAENSILDISGFSKQYNCAFIWQKDGVKKLNLYLIINYFKGGKLRFKKIKPEAFEANRFYTVINKKSGEIVPMEVNFNFDDPNLIILPLAFGKRQGREFIWNDLLSLETGSLKLANGRVIEKTLYNRRTRQDEPALFVALTFERREVLDSSNIKPMNLIGVDRGENIPAVIALTDPEGCPLSRFKDSLGNPTHILRIGESYKEKQRTIQAKKEVEQRRAGGYSRKYASKAKNLADDMVRNTARDLLYYAVTQDAMLIFENLSRGFGRQGKRTFMAERQYTRMEDWLTAKLAYEGLPSKTYLSKTLAQYTSKTCSNCGFTITSADYDRVLEKLKKTATGWMTTINGKELKVEGQITYYNRYKRQNVVKDLSVELDRLSEESVNNDISSWTKGRSGEALSLLKKRFSHRPVQEKFVCLNCEFETHADEQAALNIARSWLFLRSQEYKKYQTNKTTGNTDKRAFVETWQSFYRKKLKEVWKPAV

SEQ ID NO: 47665 - protein, 978 aa, synthetic construct
  REGION 1..978: note = engineered CasX variant
QEIKRINKIRRRLVKDSNTKKAGKTGPMKTLLVRVMTPDLRERLENLRKKPENIPQPISNTSRANLNKLLTDYTEMKKAILHVYWEEFQKDPVGLMSRVAQPASKKIDQNKLKPEMDEKGNLTTAGFACSQCGQPLFVYKLEQVSEKGKAYTNYFGRCNVAEHEKLILLAQLKPEKDSDEAVTYSLGKFGQRALDFYSIHVTKESTHPVKPLAQIAGNRYASHPVGKALSDACMGTIASFLSKYQDIIIEHQKVVKGNQKRLESLRELAGKENLEYPSVTLPPQPHTKEGVDAYNEVIARVRMWVNLNLWQKLKLSRDDAKPLLRLKGFPSFPLVERQANEVDWWDMVCNVKKLINEKKEDGKVFWQNLAGYKRQEALRPYLSSEEDRKKGKKFARYQLGDLLLHLEKKHGEDWGKVYGEAWERIDKKVEGLSKHIKLEEERRSEDAQSKAALTDWLRAKASFVIEGLKEADKDEFCRCELKLQKWYGDLRGKPFAIEAENSILDISGFSKQYNCAFIWQKDGVKKLNLYLIINYFKGGKLRFKKIKPEAFEANRFYTVINKKSGEIVPMEVNFNFDDPNLIILPLAFGKRQGREFIWNDLLSLETGSLKLANGRVIEKTLYNRRTRQDEPALFVALTFERREVLDSSNIKPMNLIGVDRGENIPAVIALTDPEGCPLSRFKDSLGNPTHILRIGESYKEKQRTIQAKKEVEQRRAGGYSRKYASKAKNLADDMVRNTARDLLYYAVTQDAMLIFENLSRGFGRQGKRTFMAERQYTRMEDWLTAKLAYEGLPSKTYLSKTLAQYTSKTCSNCGFTITSADYDRVLEKLKKTATGWMTTINGKELKVEGQITYYNRYKRQNVVKDLSVELDRLSEESVNNDISSWTKGRSGEALSLLKKRFSHRPVQEKFVCLNCEFETHADEQAALNIARSWLFLRSQEYKKYQTNKTTGNTDKRAFVETWQSFYRKKLKEVWKPAV

SEQ ID NO: 47666 - protein, 978 aa, synthetic construct
  REGION 1..978: note = engineered CasX variant
QEIKRINKIRRRLVKDSNTKKAGKTGPMKTLLVRVMTPDLRERLENLRKKPENIPQPISNTSRANLNKLLTDYTEMKKAILHVYWEEFQKDPVGLMSRVAQPASKKIDQNKLKPEMDEKGNLTTAGFACSQCGQPLFVYKLEQVSEKGKAYTNYFGRCNVAEHEKLILLAQLKPEKDSDEAVTYSLGKFGQRALDFYSIHVTKESTHPVKPLAQIAGNRYASSPVGKALSDACMGTIASFLSKYQDIIIEHQKVVKGNQKRLESLRELAGKENLEYPSVTLPPQPHTKEGVDAYNEVIARVRMWVNLNLWQKLKLSRDDAKPLLRLKGFPSFPLVERQANEVDWWDMVCNVKKLINEKKEDGKVFWQNLAGYKRQEALRPYLSSEEDRKKGKKFARYQLGDLLLHLEKKHGEDWGKVYGEAWERIDKKVEGLSKHIKLEEERRSEDAQSKAALTDWLRAKASFVIEGLKEADKDEFCRCELKLQKWYGDLRGKPFAIEAENSILDISGFSKQYNCAFIWQKDGVKKLNLYLIINYFKGGKLRFKKIKPEAFEANRFYTVINKKSGEIVPMEVNFNFDDPNLIILPLAFGKRQGREFIWNDLLSLETGSLKLANGRVIEKTLYNRRTRQDEPALFVALTFERREVLDSSNIKPMNLIGVDRGENIPAVIALTDPEGCPLSRFKDSLGNPTHILRIGESYKEKQRTIQAKKEVEQRRAGGYSRKYASKAKNLADDMVRNTARDLLYYAVTQDAMLIFENLSRGFGRQGKRTFMAERQYTRMEDWLTAKLAYEGLPSKTYLSKTLAQYTSKTCSNCGFTITSADYDRVLEKLKKTATGWMTTINGKELKVEGQITYYNRYKRQNVVKDLSVELDRLSEESVNNDISSWTKGRSGEALSLLKKRFSHRPVQEKFVCLNCEFETHADEQAALNIARSWLFLRSQEYKKYQTNKTTGNTDKRAFVETWQSFYRKKLKEVWKPAV

SEQ ID NO: 47667 - protein, 978 aa, synthetic construct
  REGION 1..978: note = engineered CasX variant
QEIKRINKIRRRLVKDSNTKKAGKTGPMKTLLVRVMTPDLRERLENLRKKPENIPQPISNTSRANLNKLLTDYTEMKKAILHVYWEEFQKDPVGLMSRVAQPASKKIDQNKLKPEMDEKGNLTTAGFACSQCGQPLFVYKLEQVSEKGKAYTNYFGRCNVAEHEKLILLAQLKPEKDSDEAVTYSLGKFGQRALDFYSIHVTKESTHPVKPLAQIAGNRYASTPVGKALSDACMGTIASFLSKYQDIIIEHQKVVKGNQKRLESLRELAGKENLEYPSVTLPPQPHTKEGVDAYNEVIARVRMWVNLNLWQKLKLSRDDAKPLLRLKGFPSFPLVERQANEVDWWDMVCNVKKLINEKKEDGKVFWQNLAGYKRQEALRPYLSSEEDRKKGKKFARYQLGDLLLHLEKKHGEDWGKVYGEAWERIDKKVEGLSKHIKLEEERRSEDAQSKAALTDWLRAKASFVIEGLKEADKDEFCRCELKLQKWYGDLRGKPFAIEAENSILDISGFSKQYNCAFIWQKDGVKKLNLYLIINYFKGGKLRFKKIKPEAFEANRFYTVINKKSGEIVPMEVNFNFDDPNLIILPLAFGKRQGREFIWNDLLSLETGSLKLANGRVIEKTLYNRRTRQDEPALFVALTFERREVLDSSNIKPMNLIGVDRGENIPAVIALTDPEGCPLSRFKDSLGNPTHILRIGESYKEKQRTIQAKKEVEQRRAGGYSRKYASKAKNLADDMVRNTARDLLYYAVTQDAMLIFENLSRGFGRQGKRTFMAERQYTRMEDWLTAKLAYEGLPSKTYLSKTLAQYTSKTCSNCGFTITSADYDRVLEKLKKTATGWMTTINGKELKVEGQITYYNRYKRQNVVKDLSVELDRLSEESVNNDISSWTKGRSGEALSLLKKRFSHRPVQEKFVCLNCEFETHADEQAALNIARSWLFLRSQEYKKYQTNKTTGNTDKRAFVETWQSFYRKKLKEVWKPAV

SEQ ID NO: 47668 - protein, 978 aa, synthetic construct
  REGION 1..978: note = engineered CasX variant
QEIKRINKIRRRLVKDSNTKKAGKTGPMKTLLVRVMTPDLRERLENLRKKPENIPQPISNTSRANLNKLLTDYTEMKKAILHVYWEEFQKDPVGLMSRVAQPASKKIDQNKLKPEMDEKGNLTTAGFACSQCGQPLFVYKLEQVSEKGKAYTNYFGRCNVAEHEKLILLAQLKPEKDSDEAVTYSLGKFGQRALDFYSIHVTKESTHPVKPLAQIAGNRYASAPVGKALSDACMGTIASFLSKYQDIIIEHQKVVKGNQKRLESLRELAGKENLEYPSVTLPPQPHTKEGVDAYNEVIARVRMWVNLNLWQKLKLSRDDAKPLLRLKGFPSFPLVERQANEVDWWDMVCNVKKLINEKKEDGKVFWQNLAGYKRQEALRPYLSSEEDRKKGKKFARYQLGDLLLHLEKKHGEDWGKVYGEAWERIDKKVEGLSKHIKLEEERRSEDAQSKAALTDWLRAKASFVIEGLKEADKDEFCRCELKLQKWYGDLRGKPFAIEAENSILDISGFSKQYNCAFIWQKDGVKKLNLYLIINYFKGGKLRFKKIKPEAFEANRFYTVINKKSGEIVPMEVNFNFDDPNLIILPLAFGKRQGREFIWNDLLSLETGSLKLANGRVIEKTLYNRRTRQDEPALFVALTFERREVLDSSNIKPMNLIGVDRGENIPAVIALTDPEGCPLSRFKDSLGNPTHILRIGESYKEKQRTIQAKKEVEQRRAGGYSRKYASKAKNLADDMVRNTARDLLYYAVTQDAMLIFENLSRGFGRQGKRTFMAERQYTRMEDWLTAKLAYEGLPSKTYLSKTLAQYTSKTCSNCGFTITSADYDRVLEKLKKTATGWMTTINGKELKVEGQITYYNRYKRQNVVKDLSVELDRLSEESVNNDISSWTKGRSGEALSLLKKRFSHRPVQEKFVCLNCEFETHADEQAALNIARSWLFLRSQEYKKYQTNKTTGNTDKRAFVETWQSFYRKKLKEVWKPAV

SEQ ID NO: 47669 - protein, 978 aa, synthetic construct
  REGION 1..978: note = engineered CasX variant
QEIKRINKIRRRLVKDSNTKKAGKTGPMKTLLVRVMTPDLRERLENLRKKPENIPQPISNTSRANLNKLLTDYTEMKKAILHVYWEEFQKDPVGLMSRVAQPASKKIDQNKLKPEMDEKGNLTTAGFACSQCGQPLFVYKLEQVSEKGKAYTNYFGRCNVAEHEKLILLAQLKPEKDSDEAVTYSLGKFGQRALDFYSIHVTKESTHPVKPLAQIAGNRYASVPVGKALSDACMGTIASFLSKYQDIIIEHQKVVKGNQKRLESLRELAGKENLEYPSVTLPPQPHTKEGVDAYNEVIARVRMWVNLNLWQKLKLSRDDAKPLLRLKGFPSFPLVERQANEVDWWDMVCNVKKLINEKKEDGKVFWQNLAGYKRQEALRPYLSSEEDRKKGKKFARYQLGDLLLHLEKKHGEDWGKVYGEAWERIDKKVEGLSKHIKLEEERRSEDAQSKAALTDWLRAKASFVIEGLKEADKDEFCRCELKLQKWYGDLRGKPFAIEAENSILDISGFSKQYNCAFIWQKDGVKKLNLYLIINYFKGGKLRFKKIKPEAFEANRFYTVINKKSGEIVPMEVNFNFDDPNLIILPLAFGKRQGREFIWNDLLSLETGSLKLANGRVIEKTLYNRRTRQDEPALFVALTFERREVLDSSNIKPMNLIGVDRGENIPAVIALTDPEGCPLSRFKDSLGNPTHILRIGESYKEKQRTIQAKKEVEQRRAGGYSRKYASKAKNLADDMVRNTARDLLYYAVTQDAMLIFENLSRGFGRQGKRTFMAERQYTRMEDWLTAKLAYEGLPSKTYLSKTLAQYTSKTCSNCGFTITSADYDRVLEKLKKTATGWMTTINGKELKVEGQITYYNRYKRQNVVKDLSVELDRLSEESVNNDISSWTKGRSGEALSLLKKRFSHRPVQEKFVCLNCEFETHADEQAALNIARSWLFLRSQEYKKYQTNKTTGNTDKRAFVETWQSFYRKKLKEVWKPAV

SEQ ID NO: 47670 - protein, 978 aa, synthetic construct
  REGION 1..978: note = engineered CasX variant
QEIKRINKIRRRLVKDSNTKKAGKTGPMKTLLVRVMTPDLRERLENLRKKPENIPQPISNTSRANLNKLLTDYTEMKKAILHVYWEEFQKDPVGLMSRVAQPASKKIDQNKLKPEMDEKGNLTTAGFACSQCGQPLFVYKLEQVSEKGKAYTNYFGRCNVAEHEKLIKLAQLKPEKDSDEAVTYSLGKFGQRALDFYSIHVTKESTHPVKPLAQIAGNRYASGPVGKALSDACMGTIASFLSKYQDIIIEHQKVVKGNQKRLESLRELAGKENLEYPSVTLPPQPHTKEGVDAYNEVIARVRMWVNLNLWQKLKLSRDDAKPLLRLKGFPSFPLVERQANEVDWWDMVCNVKKLINEKKEDGKVFWQNLAGYKRQEALRPYLSSEEDRKKGKKFARYQLGDLLLHLEKKHGEDWGKVYGEAWERIDKKVEGLSKHIKLEEERRSEDAQSKAALTDWLRAKASFVIEGLKEADKDEFCRCELKLQKWYGDLRGKPFAIEAENSILDISGFSKQYNCAFIWQKDGVKKLNLYLIINYFKGGKLRFKKIKPEAFEANRFYTVINKKSGEIVPMEVNFNFDDPNLIILPLAFGKRQGREFIWNDLLSLETGSLKLANGRVIEKTLYNRRTRQDEPALFVALTFERREVLDSSNIKPMNLIGVDRGENIPAVIALTDPEGCPLSRFKDSLGNPTHILRIGESYKEKQRTIQAKKEVEQRRAGGYSRKYASKAKNLADDMVRNTARDLLYYAVTQDAMLIFENLSRGFGRQGKRTFMAERQYTRMEDWLTAKLAYEGLPSKTYLSKTLAQYTSKTCSNCGFTITSADYDRVLEKLKKTATGWMTTINGKELKVEGQITYYNRYKRQNVVKDLSVELDRLSEESVNNDISSWTKGRSGEALSLLKKRFSHRPVQEKFVCLNCEFETHADEQAALNIARSWLFLRSQEYKKYQTNKTTGNTDKRAFVETWQSFYRKKLKEVWKPAV

SEQ ID NO: 47671 - protein, 977 aa, synthetic construct
  REGION 1..977: note = engineered CasX variant
QEIKRINKIRRRLVKDSNTKKAGKTGPMKTLLVRVMTPDLRERLENLRKKPENIPQPISNTSRANLNKLLTDYTEMKKAILHVYWEEFQKDPVGLMSRVAQPASKKIDQNKLKPEMDEKGNLTTAGFACSQCGQPLFVYKLEQVSEKGKAYTNYFGRCNVAEHEKLILLAQLKPEKDSDEAVTYSLGKFGQRALDFYSIHVTKESTHPVKPLAQIAGNRYASPVGKALSDACMGTIASFLSKYQDIIIEHQKVVKGNQKRLESLRELAGKENLEYPSVTLPPQPHTKEGVDAYNEVIARVRMWVNLNLWQKLKLSRDDAKPLLRLKGFPSFPLVERQANEVDWWDMVCNVKKLINEKKEDGKVFWQNLAGYKRQEALRPYLSSEEDRKKGKKFARYQLGDLLLHLEKKHGEDWGKVYGEAWERIDKKVEGLSKHIKLEEERRSEDAQSKAALTDWLRAKASFVIEGLKEADKDEFCRCELKLQKWYGDLRGKPFAIEAENSILDISGFSKQYNCAFIWQKDGVKKLNLYLIINYFKGGKLRFKKIKPEAFEANRFYTVINKKSGEIVPMEVNFNFDDPNLIILPLAFGKRQGREFIWNDLLSLETGSLKLANGRVIEKTLYNRRTRQDEPALFVALTFERREVLDSSNIKPMNLIGVDRGENIPAVIALTDPEGCPLSRFKDSLGNPTHILRIGESYKEKQRTIQAKKEVEQRRAGGYSRKYASKAKNLADDMVRNTARDLLYYAVTQDAMLIFENLSRGFGRQGKRTFMAERQYTRMEDWLTAKLAYEGLPSKTYLSKTLAQYTSKTCSNCGFTITSADYDRVLEKLKKTATGWMTTINGKELKVEGQITYYNRYKRQNVVKDLSVELDRLSEESVNNDISSWTKGRSGEALSLLKKRFSHRPVQEKFVCLNCEFETHADEQAALNIARSWLFLRSQEYKKYQTNKTTGNTDKRAFVETWQSFYRKKLKEVWKPAV

SEQ ID NO: 47672 - protein, 978 aa, synthetic construct
  REGION 1..978: note = engineered CasX variant
QEIKRINKIRRRLVKDSNTKKAGKTGPMKTLLVRVMTPDLRERLENLRKKPENIPQPISNTSRANLNKLLTDYTEMKKAILHVYWEEFQKDPVGLMSRVAQPASKKIDQNKLKPEMDEKGNLTTAGFACSQCGQPLFVYKLEQVSEKGKAYTNYFGRCNVAEHEKLILLAQLKPEKDSDEAVTYSLGKFGQRALDFYSIHVTKESTHPVKPLAQIAGNRYASYPVGKALSDACMGTIASFLSKYQDIIIEHQKVVKGNQKRLESLRELAGKENLEYPSVTLPPQPHTKEGVDAYNEVIARVRMWVNLNLWQKLKLSRDDAKPLLRLKGFPSFPLVERQANEVDWWDMVCNVKKLINEKKEDGKVFWQNLAGYKRQEALRPYLSSEEDRKKGKKFARYQLGDLLLHLEKKHGEDWGKVYDEAWERIDKKVEGLSKHIKLEEERRSEDAQSKAALTDWLRAKASFVIEGKKEADKDEFCRCELKLQKWYGDLRGKPFAIEAENSILDISGFSKQYNCAFIWQKDGVKKLNLYLIINYFKGGKLRFKKIKPEAFEANRFYTVINKKSGEIVPMEVNFNFDDPNLIILPLAFGKRQGREFIWNDLLSLETGSLKLANGRVIEKTLYNRRTRQDEPALFVALTFERREVLDSSNIKPMNLIGVDRGENIPAVIALTDPEGCPLSRFKDSLGNPTHILRIGESYKEKQRTIQAKKEVEQRRAGGYSRKYASKAKNLADDMVRNTARDLLYYAVTQDAMLIFENLSRGFGRQGKRTFMAERQYTRMEDWLTAKLAYEGLPSKTYLSKTLAQYTSKTCSNCGFTITSADYDRVLEKLKKTATGWMTTINGKELKVEGQITYYNRYKRQNVVKDLSVELDRLSEESVNNDISSWTKGRSGEALSLLKKRFSHRPVQEKFVCLNCEFETHADEQAALNIARSWLFLRSQEYKKYQTNKTTGNTDKRAFVETWQSFYRKKLKEVWKPAV

SEQ ID NO: 47673 - protein, 978 aa, synthetic construct
  REGION 1..978: note = engineered CasX variant
QEIKRINKIRRRLVKDSNTKKAGKTGPMKTLLVRVMTPDLRERLENLRKKPENIPQPISNTSRANLNKLLTDYTEMKKAILHVYWEEFQKDPVGLMSRVAQPASKKIDQNKLKPEMDEKGNLTTAGFACSQCGQPLFVYKLEQVSEKGKAYTNYFGRCNVAEHEKLILLAQLKPEKDSDEAVTYSLGKFGQRALDFYSIHVTKESTHPVKPLAQIAGNRYASHPVGKALSDACMGTIASFLSKYQDIIIEHQKVVKGNQKRLESLRELAGKENLEYPSVTLPPQPHTKEGVDAYNEVIARVRMWVNLNLWQKLKLSRDDAKPLLRLKGFPSFPLVERQANEVDWWDMVCNVKKLINEKKEDGKVFWQNLAGYKRQEALRPYLSSEEDRKKGKKFARYQLGDLLLHLEKKHGEDWGKVYDEAWERIDKKVEGLSKHIKLEEERRSEDAQSKAALTDWLRAKASFVIEGKKEADKDEFCRCELKLQKWYGDLRGKPFAIEAENSILDISGFSKQYNCAFIWQKDGVKKLNLYLIINYFKGGKLRFKKIKPEAFEANRFYTVINKKSGEIVPMEVNFNFDDPNLIILPLAFGKRQGREFIWNDLLSLETGSLKLANGRVIEKTLYNRRTRQDEPALFVALTFERREVLDSSNIKPMNLIGVDRGENIPAVIALTDPEGCPLSRFKDSLGNPTHILRIGESYKEKQRTIQAKKEVEQRRAGGYSRKYASKAKNLADDMVRNTARDLLYYAVTQDAMLIFENLSRGFGRQGKRTFMAERQYTRMEDWLTAKLAYEGLPSKTYLSKTLAQYTSKTCSNCGFTITSADYDRVLEKLKKTATGWMTTINGKELKVEGQITYYNRYKRQNVVKDLSVELDRLSEESVNNDISSWTKGRSGEALSLLKKRFSHRPVQEKFVCLNCEFETHADEQAALNIARSWLFLRSQEYKKYQTNKTTGNTDKRAFVETWQSFYRKKLKEVWKPAV

SEQ ID NO: 47674 - protein, 978 aa, synthetic construct
  REGION 1..978: note = engineered CasX variant
QEIKRINKIRRRLVKDSNTKKAGKTGPMKTLLVRVMTPDLRERLENLRKKPENIPQPISNTSRANLNKLLTDYTEMKKAILHVYWEEFQKDPVGLMSRVAQPASKKIDQNKLKPEMDEKGNLTTAGFACSQCGQPLFVYKLEQVSEKGKAYTNYFGRCNVAEHEKLILLAQLKPEKDSDEAVTYSLGKFGQRALDFYSIHVTKESTHPVKPLAQIAGNRYASSPVGKALSDACMGTIASFLSKYQDIIIEHQKVVKGNQKRLESLRELAGKENLEYPSVTLPPQPHTKEGVDAYNEVIARVRMWVNLNLWQKLKLSRDDAKPLLRLKGFPSFPLVERQANEVDWWDMVCNVKKLINEKKEDGKVFWQNLAGYKRQEALRPYLSSEEDRKKGKKFARYQLGDLLLHLEKKHGEDWGKVYDEAWERIDKKVEGLSKHIKLEEERRSEDAQSKAALTDWLRAKASFVIEGKKEADKDEFCRCELKLQKWYGDLRGKPFAIEAENSILDISGFSKQYNCAFIWQKDGVKKLNLYLIINYFKGGKLRFKKIKPEAFEANRFYTVINKKSGEIVPMEVNFNFDDPNLIILPLAFGKRQGREFIWNDLLSLETGSLKLANGRVIEKTLYNRRTRQDEPALFVALTFERREVLDSSNIKPMNLIGVDRGENIPAVIALTDPEGCPLSRFKDSLGNPTHILRIGESYKEKQRTIQAKKEVEQRRAGGYSRKYASKAKNLADDMVRNTARDLLYYAVTQDAMLIFENLSRGFGRQGKRTFMAERQYTRMEDWLTAKLAYEGLPSKTYLSKTLAQYTSKTCSNCGFTITSADYDRVLEKLKKTATGWMTTINGKELKVEGQITYYNRYKRQNVVKDLSVELDRLSEESVNNDISSWTKGRSGEALSLLKKRFSHRPVQEKFVCLNCEFETHADEQAALNIARSWLFLRSQEYKKYQTNKTTGNTDKRAFVETWQSFYRKKLKEVWKPAV

SEQ ID NO: 47675 - protein, 978 aa, synthetic construct
  REGION 1..978: note = engineered CasX variant
QEIKRINKIRRRLVKDSNTKKAGKTGPMKTLLVRVMTPDLRERLENLRKKPENIPQPISNTSRANLNKLLTDYTEMKKAILHVYWEEFQKDPVGLMSRVAQPASKKIDQNKLKPEMDEKGNLTTAGFACSQCGQPLFVYKLEQVSEKGKAYTNYFGRCNVAEHEKLILLAQLKPEKDSDEAVTYSLGKFGQRALDFYSIHVTKESTHPVKPLAQIAGNRYASTPVGKALSDACMGTIASFLSKYQDIIIEHQKVVKGNQKRLESLRELAGKENLEYPSVTLPPQPHTKEGVDAYNEVIARVRMWVNLNLWQKLKLSRDDAKPLLRLKGFPSFPLVERQANEVDWWDMVCNVKKLINEKKEDGKVFWQNLAGYKRQEALRPYLSSEEDRKKGKKFARYQLGDLLLHLEKKHGEDWGKVYDEAWERIDKKVEGLSKHIKLEEERRSEDAQSKAALTDWLRAKASFVIEGKKEADKDEFCRCELKLQKWYGDLRGKPFAIEAENSILDISGFSKQYNCAFIWQKDGVKKLNLYLIINYFKGGKLRFKKIKPEAFEANRFYTVINKKSGEIVPMEVNFNFDDPNLIILPLAFGKRQGREFIWNDLLSLETGSLKLANGRVIEKTLYNRRTRQDEPALFVALTFERREVLDSSNIKPMNLIGVDRGENIPAVIALTDPEGCPLSRFKDSLGNPTHILRIGESYKEKQRTIQAKKEVEQRRAGGYSRKYASKAKNLADDMVRNTARDLLYYAVTQDAMLIFENLSRGFGRQGKRTFMAERQYTRMEDWLTAKLAYEGLPSKTYLSKTLAQYTSKTCSNCGFTITSADYDRVLEKLKKTATGWMTTINGKELKVEGQITYYNRYKRQNVVKDLSVELDRLSEESVNNDISSWTKGRSGEALSLLKKRFSHRPVQEKFVCLNCEFETHADEQAALNIARSWLFLRSQEYKKYQTNKTTGNTDKRAFVETWQSFYRKKLKEVWKPAV

SEQ ID NO: 47676 - protein, 978 aa, synthetic construct
  REGION 1..978: note = engineered CasX variant
QEIKRINKIRRRLVKDSNTKKAGKTGPMKTLLVRVMTPDLRERLENLRKKPENIPQPISNTSRANLNKLLTDYTEMKKAILHVYWEEFQKDPVGLMSRVAQPASKKIDQNKLKPEMDEKGNLTTAGFACSQCGQPLFVYKLEQVSEKGKAYTNYFGRCNVAEHEKLILLAQLKPEKDSDEAVTYSLGKFGQRALDFYSIHVTKESTHPVKPLAQIAGNRYASAPVGKALSDACMGTIASFLSKYQDIIIEHQKVVKGNQKRLESLRELAGKENLEYPSVTLPPQPHTKEGVDAYNEVIARVRMWVNLNLWQKLKLSRDDAKPLLRLKGFPSFPLVERQANEVDWWDMVCNVKKLINEKKEDGKVFWQNLAGYKRQEALRPYLSSEEDRKKGKKFARYQLGDLLLHLEKKHGEDWGKVYDEAWERIDKKVEGLSKHIKLEEERRSEDAQSKAALTDWLRAKASFVIEGKKEADKDEFCRCELKLQKWYGDLRGKPFAIEAENSILDISGFSKQYNCAFIWQKDGVKKLNLYLIINYFKGGKLRFKKIKPEAFEANRFYTVINKKSGEIVPMEVNFNFDDPNLIILPLAFGKRQGREFIWNDLLSLETGSLKLANGRVIEKTLYNRRTRQDEPALFVALTFERREVLDSSNIKPMNLIGVDRGENIPAVIALTDPEGCPLSRFKDSLGNPTHILRIGESYKEKQRTIQAKKEVEQRRAGGYSRKYASKAKNLADDMVRNTARDLLYYAVTQDAMLIFENLSRGFGRQGKRTFMAERQYTRMEDWLTAKLAYEGLPSKTYLSKTLAQYTSKTCSNCGFTITSADYDRVLEKLKKTATGWMTTINGKELKVEGQITYYNRYKRQNVVKDLSVELDRLSEESVNNDISSWTKGRSGEALSLLKKRFSHRPVQEKFVCLNCEFETHADEQAALNIARSWLFLRSQEYKKYQTNKTTGNTDKRAFVETWQSFYRKKLKEVWKPAV

SEQ ID NO: 47677 - protein, 978 aa, synthetic construct
  REGION 1..978: note = engineered CasX variant
QEIKRINKIRRRLVKDSNTKKAGKTGPMKTLLVRVMTPDLRERLENLRKKPENIPQPISNTSRANLNKLLTDYTEMKKAILHVYWEEFQKDPVGLMSRVAQPASKKIDQNKLKPEMDEKGNLTTAGFACSQCGQPLFVYKLEQVSEKGKAYTNYFGRCNVAEHEKLILLAQLKPEKDSDEAVTYSLGKFGQRALDFYSIHVTKESTHPVKPLAQIAGNRYASVPVGKALSDACMGTIASFLSKYQDIIIEHQKVVKGNQKRLESLRELAGKENLEYPSVTLPPQPHTKEGVDAYNEVIARVRMWVNLNLWQKLKLSRDDAKPLLRLKGFPSFPLVERQANEVDWWDMVCNVKKLINEKKEDGKVFWQNLAGYKRQEALRPYLSSEEDRKKGKKFARYQLGDLLLHLEKKHGEDWGKVYDEAWERIDKKVEGLSKHIKLEEERRSEDAQSKAALTDWLRAKASFVIEGKKEADKDEFCRCELKLQKWYGDLRGKPFAIEAENSILDISGFSKQYNCAFIWQKDGVKKLNLYLIINYFKGGKLRFKKIKPEAFEANRFYTVINKKSGEIVPMEVNFNFDDPNLIILPLAFGKRQGREFIWNDLLSLETGSLKLANGRVIEKTLYNRRTRQDEPALFVALTFERREVLDSSNIKPMNLIGVDRGENIPAVIALTDPEGCPLSRFKDSLGNPTHILRIGESYKEKQRTIQAKKEVEQRRAGGYSRKYASKAKNLADDMVRNTARDLLYYAVTQDAMLIFENLSRGFGRQGKRTFMAERQYTRMEDWLTAKLAYEGLPSKTYLSKTLAQYTSKTCSNCGFTITSADYDRVLEKLKKTATGWMTTINGKELKVEGQITYYNRYKRQNVVKDLSVELDRLSEESVNNDISSWTKGRSGEALSLLKKRFSHRPVQEKFVCLNCEFETHADEQAALNIARSWLFLRSQEYKKYQTNKTTGNTDKRAFVETWQSFYRKKLKEVWKPAV

SEQ ID NO: 47678 - protein, 978 aa, synthetic construct
  REGION 1..978: note = engineered CasX variant
QEIKRINKIRRRLVKDSNTKKAGKTGPMKTLLVRVMTPDLRERLENLRKKPENIPQPISNTSRANLNKLLTDYTEMKKAILHVYWEEFQKDPVGLMSRVAQPASKKIDQNKLKPEMDEKGNLTTAGFACSQCGQPLFVYKLEQVSEKGKAYTNYFGRCNVAEHEKLIKLAQLKPEKDSDEAVTYSLGKFGQRALDFYSIHVTKESTHPVKPLAQIAGNRYASGPVGKALSDACMGTIASFLSKYQDIIIEHQKVVKGNQKRLESLRELAGKENLEYPSVTLPPQPHTKEGVDAYNEVIARVRMWVNLNLWQKLKLSRDDAKPLLRLKGFPSFPLVERQANEVDWWDMVCNVKKLINEKKEDGKVFWQNLAGYKRQEALRPYLSSEEDRKKGKKFARYQLGDLLLHLEKKHGEDWGKVYDEAWERIDKKVEGLSKHIKLEEERRSEDAQSKAALTDWLRAKASFVIEGKKEADKDEFCRCELKLQKWYGDLRGKPFAIEAENSILDISGFSKQYNCAFIWQKDGVKKLNLYLIINYFKGGKLRFKKIKPEAFEANRFYTVINKKSGEIVPMEVNFNFDDPNLIILPLAFGKRQGREFIWNDLLSLETGSLKLANGRVIEKTLYNRRTRQDEPALFVALTFERREVLDSSNIKPMNLIGVDRGENIPAVIALTDPEGCPLSRFKDSLGNPTHILRIGESYKEKQRTIQAKKEVEQRRAGGYSRKYASKAKNLADDMVRNTARDLLYYAVTQDAMLIFENLSRGFGRQGKRTFMAERQYTRMEDWLTAKLAYEGLPSKTYLSKTLAQYTSKTCSNCGFTITSADYDRVLEKLKKTATGWMTTINGKELKVEGQITYYNRYKRQNVVKDLSVELDRLSEESVNNDISSWTKGRSGEALSLLKKRFSHRPVQEKFVCLNCEFETHADEQAALNIARSWLFLRSQEYKKYQTNKTTGNTDKRAFVETWQSFYRKKLKEVWKPAV

SEQ ID NO: 47679 - protein, 977 aa, synthetic construct
  REGION 1..977: note = engineered CasX variant
QEIKRINKIRRRLVKDSNTKKAGKTGPMKTLLVRVMTPDLRERLENLRKKPENIPQPISNTSRANLNKLLTDYTEMKKAILHVYWEEFQKDPVGLMSRVAQPASKKIDQNKLKPEMDEKGNLTTAGFACSQCGQPLFVYKLEQVSEKGKAYTNYFGRCNVAEHEKLILLAQLKPEKDSDEAVTYSLGKFGQRALDFYSIHVTKESTHPVKPLAQIAGNRYASPVGKALSDACMGTIASFLSKYQDIIIEHQKVVKGNQKRLESLRELAGKENLEYPSVTLPPQPHTKEGVDAYNEVIARVRMWVNLNLWQKLKLSRDDAKPLLRLKGFPSFPLVERQANEVDWWDMVCNVKKLINEKKEDGKVFWQNLAGYKRQEALRPYLSSEEDRKKGKKFARYQLGDLLLHLEKKHGEDWGKVYDEAWERIDKKVEGLSKHIKLEEERRSEDAQSKAALTDWLRAKASFVIEGKKEADKDEFCRCELKLQKWYGDLRGKPFAIEAENSILDISGFSKQYNCAFIWQKDGVKKLNLYLIINYFKGGKLRFKKIKPEAFEANRFYTVINKKSGEIVPMEVNFNFDDPNLIILPLAFGKRQGREFIWNDLLSLETGSLKLANGRVIEKTLYNRRTRQDEPALFVALTFERREVLDSSNIKPMNLIGVDRGENIPAVIALTDPEGCPLSRFKDSLGNPTHILRIGESYKEKQRTIQAKKEVEQRRAGGYSRKYASKAKNLADDMVRNTARDLLYYAVTQDAMLIFENLSRGFGRQGKRTFMAERQYTRMEDWLTAKLAYEGLPSKTYLSKTLAQYTSKTCSNCGFTITSADYDRVLEKLKKTATGWMTTINGKELKVEGQITYYNRYKRQNVVKDLSVELDRLSEESVNNDISSWTKGRSGEALSLLKKRFSHRPVQEKFVCLNCEFETHADEQAALNIARSWLFLRSQEYKKYQTNKTTGNTDKRAFVETWQSFYRKKLKEVWKPAV

SEQ ID NO: 47680 - protein, 978 aa, synthetic construct
  REGION 1..978: note = engineered CasX variant
QEIKRINKIRRRLVKDSNTKKAGKTGPMKTLLVRVMTPDLRERLENLRKKPENIPQPISNTSRANLNKLLTDYTEMKKAILHVYWEEFQKDPVGLMSRVAQPASKKIDQNKLKPEMDEKGNLTTAGFACSQCGQPLFVYKLEQVSEKGKAYTNYFGRCNVAEHEKLILLAQLKPEKDSDEAVTYSLGKFGQRALDFYSIHVTKESTHPVKPLAQIAGNRYASYPVGKALSDACMGTIASFLSKYQDIIIEHQKVVKGNQKRLESLRELAGKENLEYPSVTLPPQPHTKEGVDAYNEVIARVRMWVNLNLWQKLKLSRDDAKPLLRLKGFPSFPLVERQANEVDWWDMVCNVKKLINEKKEDGKVFWQNLAGYKRQEALRPYLSSEEDRKKGKKFARYQLGDLLLHLEKKHGEDWGKVYDEAWERIDKKVEGLSKHIKLEEERRSEDAQSKAALTDWLRAKASFVIEGSKEADKDEFCRCELKLQKWYGDLRGKPFAIEAENSILDISGFSKQYNCAFIWQKDGVKKLNLYLIINYFKGGKLRFKKIKPEAFEANRFYTVINKKSGEIVPMEVNFNFDDPNLIILPLAFGKRQGREFIWNDLLSLETGSLKLANGRVIEKTLYNRRTRQDEPALFVALTFERREVLDSSNIKPMNLIGVDRGENIPAVIALTDPEGCPLSRFKDSLGNPTHILRIGESYKEKQRTIQAKKEVEQRRAGGYSRKYASKAKNLADDMVRNTARDLLYYAVTQDAMLIFENLSRGFGRQGKRTFMAERQYTRMEDWLTAKLAYEGLPSKTYLSKTLAQYTSKTCSNCGFTITSADYDRVLEKLKKTATGWMTTINGKELKVEGQITYYNRYKRQNVVKDLSVELDRLSEESVNNDISSWTKGRSGEALSLLKKRFSHRPVQEKFVCLNCEFETHADEQAALNIARSWLFLRSQEYKKYQTNKTTGNTDKRAFVETWQSFYRKKLKEVWKPAV

SEQ ID NO: 47681 - protein, 978 aa, synthetic construct
  REGION 1..978: note = engineered CasX variant
QEIKRINKIRRRLVKDSNTKKAGKTGPMKTLLVRVMTPDLRERLENLRKKPENIPQPISNTSRANLNKLLTDYTEMKKAILHVYWEEFQKDPVGLMSRVAQPASKKIDQNKLKPEMDEKGNLTTAGFACSQCGQPLFVYKLEQVSEKGKAYTNYFGRCNVAEHEKLILLAQLKPEKDSDEAVTYSLGKFGQRALDFYSIHVTKESTHPVKPLAQIAGNRYASHPVGKALSDACMGTIASFLSKYQDIIIEHQKVVKGNQKRLESLRELAGKENLEYPSVTLPPQPHTKEGVDAYNEVIARVRMWVNLNLWQKLKLSRDDAKPLLRLKGFPSFPLVERQANEVDWWDMVCNVKKLINEKKEDGKVFWQNLAGYKRQEALRPYLSSEEDRKKGKKFARYQLGDLLLHLEKKHGEDWGKVYDEAWERIDKKVEGLSKHIKLEEERRSEDAQSKAALTDWLRAKASFVIEGSKEADKDEFCRCELKLQKWYGDLRGKPFAIEAENSILDISGFSKQYNCAFIWQKDGVKKLNLYLIINYFKGGKLRFKKIKPEAFEANRFYTVINKKSGEIVPMEVNFNFDDPNLIILPLAFGKRQGREFIWNDLLSLETGSLKLANGRVIEKTLYNRRTRQDEPALFVALTFERREVLDSSNIKPMNLIGVDRGENIPAVIALTDPEGCPLSRFKDSLGNPTHILRIGESYKEKQRTIQAKKEVEQRRAGGYSRKYASKAKNLADDMVRNTARDLLYYAVTQDAMLIFENLSRGFGRQGKRTFMAERQYTRMEDWLTAKLAYEGLPSKTYLSKTLAQYTSKTCSNCGFTITSADYDRVLEKLKKTATGWMTTINGKELKVEGQITYYNRYKRQNVVKDLSVELDRLSEESVNNDISSWTKGRSGEALSLLKKRFSHRPVQEKFVCLNCEFETHADEQAALNIARSWLFLRSQEYKKYQTNKTTGNTDKRAFVETWQSFYRKKLKEVWKPAV

SEQ ID NO: 47682 - protein, 978 aa, synthetic construct
  REGION 1..978: note = engineered CasX variant
QEIKRINKIRRRLVKDSNTKKAGKTGPMKTLLVRVMTPDLRERLENLRKKPENIPQPISNTSRANLNKLLTDYTEMKKAILHVYWEEFQKDPVGLMSRVAQPASKKIDQNKLKPEMDEKGNLTTAGFACSQCGQPLFVYKLEQVSEKGKAYTNYFGRCNVAEHEKLILLAQLKPEKDSDEAVTYSLGKFGQRALDFYSIHVTKESTHPVKPLAQIAGNRYASSPVGKALSDACMGTIASFLSKYQDIIIEHQKVVKGNQKRLESLRELAGKENLEYPSVTLPPQPHTKEGVDAYNEVIARVRMWVNLNLWQKLKLSRDDAKPLLRLKGFPSFPLVERQANEVDWWDMVCNVKKLINEKKEDGKVFWQNLAGYKRQEALRPYLSSEEDRKKGKKFARYQLGDLLLHLEKKHGEDWGKVYDEAWERIDKKVEGLSKHIKLEEERRSEDAQSKAALTDWLRAKASFVIEGSKEADKDEFCRCELKLQKWYGDLRGKPFAIEAENSILDISGFSKQYNCAFIWQKDGVKKLNLYLIINYFKGGKLRFKKIKPEAFEANRFYTVINKKSGEIVPMEVNFNFDDPNLIILPLAFGKRQGREFIWNDLLSLETGSLKLANGRVIEKTLYNRRTRQDEPALFVALTFERREVLDSSNIKPMNLIGVDRGENIPAVIALTDPEGCPLSRFKDSLGNPTHILRIGESYKEKQRTIQAKKEVEQRRAGGYSRKYASKAKNLADDMVRNTARDLLYYAVTQDAMLIFENLSRGFGRQGKRTFMAERQYTRMEDWLTAKLAYEGLPSKTYLSKTLAQYTSKTCSNCGFTITSADYDRVLEKLKKTATGWMTTINGKELKVEGQITYYNRYKRQNVVKDLSVELDRLSEESVNNDISSWTKGRSGEALSLLKKRFSHRPVQEKFVCLNCEFETHADEQAALNIARSWLFLRSQEYKKYQTNKTTGNTDKRAFVETWQSFYRKKLKEVWKPAV

SEQ ID NO: 47683 - protein, 978 aa, synthetic construct
  REGION 1..978: note = engineered CasX variant
QEIKRINKIRRRLVKDSNTKKAGKTGPMKTLLVRVMTPDLRERLENLRKKPENIPQPISNTSRANLNKLLTDYTEMKKAILHVYWEEFQKDPVGLMSRVAQPASKKIDQNKLKPEMDEKGNLTTAGFACSQCGQPLFVYKLEQVSEKGKAYTNYFGRCNVAEHEKLILLAQLKPEKDSDEAVTYSLGKFGQRALDFYSIHVTKESTHPVKPLAQIAGNRYASTPVGKALSDACMGTIASFLSKYQDIIIEHQKVVKGNQKRLESLRELAGKENLEYPSVTLPPQPHTKEGVDAYNEVIARVRMWVNLNLWQKLKLSRDDAKPLLRLKGFPSFPLVERQANEVDWWDMVCNVKKLINEKKEDGKVFWQNLAGYKRQEALRPYLSSEEDRKKGKKFARYQLGDLLLHLEKKHGEDWGKVYDEAWERIDKKVEGLSKHIKLEEERRSEDAQSKAALTDWLRAKASFVIEGSKEADKDEFCRCELKLQKWYGDLRGKPFAIEAENSILDISGFSKQYNCAFIWQKDGVKKLNLYLIINYFKGGKLRFKKIKPEAFEANRFYTVINKKSGEIVPMEVNFNFDDPNLIILPLAFGKRQGREFIWNDLLSLETGSLKLANGRVIEKTLYNRRTRQDEPALFVALTFERREVLDSSNIKPMNLIGVDRGENIPAVIALTDPEGCPLSRFKDSLGNPTHILRIGESYKEKQRTIQAKKEVEQRRAGGYSRKYASKAKNLADDMVRNTARDLLYYAVTQDAMLIFENLSRGFGRQGKRTFMAERQYTRMEDWLTAKLAYEGLPSKTYLSKTLAQYTSKTCSNCGFTITSADYDRVLEKLKKTATGWMTTINGKELKVEGQITYYNRYKRQNVVKDLSVELDRLSEESVNNDISSWTKGRSGEALSLLKKRFSHRPVQEKFVCLNCEFETHADEQAALNIARSWLFLRSQEYKKYQTNKTTGNTDKRAFVETWQSFYRKKLKEVWKPAV

SEQ ID NO: 47684 - protein, 978 aa, synthetic construct
  REGION 1..978: note = engineered CasX variant
QEIKRINKIRRRLVKDSNTKKAGKTGPMKTLLVRVMTPDLRERLENLRKKPENIPQPISNTSRANLNKLLTDYTEMKKAILHVYWEEFQKDPVGLMSRVAQPASKKIDQNKLKPEMDEKGNLTTAGFACSQCGQPLFVYKLEQVSEKGKAYTNYFGRCNVAEHEKLILLAQLKPEKDSDEAVTYSLGKFGQRALDFYSIHVTKESTHPVKPLAQIAGNRYASAPVGKALSDACMGTIASFLSKYQDIIIEHQKVVKGNQKRLESLRELAGKENLEYPSVTLPPQPHTKEGVDAYNEVIARVRMWVNLNLWQKLKLSRDDAKPLLRLKGFPSFPLVERQANEVDWWDMVCNVKKLINEKKEDGKVFWQNLAGYKRQEALRPYLSSEEDRKKGKKFARYQLGDLLLHLEKKHGEDWGKVYDEAWERIDKKVEGLSKHIKLEEERRSEDAQSKAALTDWLRAKASFVIEGSKEADKDEFCRCELKLQKWYGDLRGKPFAIEAENSILDISGFSKQYNCAFIWQKDGVKKLNLYLIINYFKGGKLRFKKIKPEAFEANRFYTVINKKSGEIVPMEVNFNFDDPNLIILPLAFGKRQGREFIWNDLLSLETGSLKLANGRVIEKTLYNRRTRQDEPALFVALTFERREVLDSSNIKPMNLIGVDRGENIPAVIALTDPEGCPLSRFKDSLGNPTHILRIGESYKEKQRTIQAKKEVEQRRAGGYSRKYASKAKNLADDMVRNTARDLLYYAVTQDAMLIFENLSRGFGRQGKRTFMAERQYTRMEDWLTAKLAYEGLPSKTYLSKTLAQYTSKTCSNCGFTITSADYDRVLEKLKKTATGWMTTINGKELKVEGQITYYNRYKRQNVVKDLSVELDRLSEESVNNDISSWTKGRSGEALSLLKKRFSHRPVQEKFVCLNCEFETHADEQAALNIARSWLFLRSQEYKKYQTNKTTGNTDKRAFVETWQSFYRKKLKEVWKPAV

SEQ ID NO: 47685 - protein, 978 aa, synthetic construct
  REGION 1..978: note = engineered CasX variant
QEIKRINKIRRRLVKDSNTKKAGKTGPMKTLLVRVMTPDLRERLENLRKKPENIPQPISNTSRANLNKLLTDYTEMKKAILHVYWEEFQKDPVGLMSRVAQPASKKIDQNKLKPEMDEKGNLTTAGFACSQCGQPLFVYKLEQVSEKGKAYTNYFGRCNVAEHEKLILLAQLKPEKDSDEAVTYSLGKFGQRALDFYSIHVTKESTHPVKPLAQIAGNRYASVPVGKALSDACMGTIASFLSKYQDIIIEHQKVVKGNQKRLESLRELAGKENLEYPSVTLPPQPHTKEGVDAYNEVIARVRMWVNLNLWQKLKLSRDDAKPLLRLKGFPSFPLVERQANEVDWWDMVCNVKKLINEKKEDGKVFWQNLAGYKRQEALRPYLSSEEDRKKGKKFARYQLGDLLLHLEKKHGEDWGKVYDEAWERIDKKVEGLSKHIKLEEERRSEDAQSKAALTDWLRAKASFVIEGSKEADKDEFCRCELKLQKWYGDLRGKPFAIEAENSILDISGFSKQYNCAFIWQKDGVKKLNLYLIINYFKGGKLRFKKIKPEAFEANRFYTVINKKSGEIVPMEVNFNFDDPNLIILPLAFGKRQGREFIWNDLLSLETGSLKLANGRVIEKTLYNRRTRQDEPALFVALTFERREVLDSSNIKPMNLIGVDRGENIPAVIALTDPEGCPLSRFKDSLGNPTHILRIGESYKEKQRTIQAKKEVEQRRAGGYSRKYASKAKNLADDMVRNTARDLLYYAVTQDAMLIFENLSRGFGRQGKRTFMAERQYTRMEDWLTAKLAYEGLPSKTYLSKTLAQYTSKTCSNCGFTITSADYDRVLEKLKKTATGWMTTINGKELKVEGQITYYNRYKRQNVVKDLSVELDRLSEESVNNDISSWTKGRSGEALSLLKKRFSHRPVQEKFVCLNCEFETHADEQAALNIARSWLFLRSQEYKKYQTNKTTGNTDKRAFVETWQSFYRKKLKEVWKPAV

SEQ ID NO: 47686 - protein, 978 aa, synthetic construct
  REGION 1..978: note = engineered CasX variant
QEIKRINKIRRRLVKDSNTKKAGKTGPMKTLLVRVMTPDLRERLENLRKKPENIPQPISNTSRANLNKLLTDYTEMKKAILHVYWEEFQKDPVGLMSRVAQPASKKIDQNKLKPEMDEKGNLTTAGFACSQCGQPLFVYKLEQVSEKGKAYTNYFGRCNVAEHEKLIKLAQLKPEKDSDEAVTYSLGKFGQRALDFYSIHVTKESTHPVKPLAQIAGNRYASGPVGKALSDACMGTIASFLSKYQDIIIEHQKVVKGNQKRLESLRELAGKENLEYPSVTLPPQPHTKEGVDAYNEVIARVRMWVNLNLWQKLKLSRDDAKPLLRLKGFPSFPLVERQANEVDWWDMVCNVKKLINEKKEDGKVFWQNLAGYKRQEALRPYLSSEEDRKKGKKFARYQLGDLLLHLEKKHGEDWGKVYDEAWERIDKKVEGLSKHIKLEEERRSEDAQSKAALTDWLRAKASFVIEGSKEADKDEFCRCELKLQKWYGDLRGKPFAIEAENSILDISGFSKQYNCAFIWQKDGVKKLNLYLIINYFKGGKLRFKKIKPEAFEANRFYTVINKKSGEIVPMEVNFNFDDPNLIILPLAFGKRQGREFIWNDLLSLETGSLKLANGRVIEKTLYNRRTRQDEPALFVALTFERREVLDSSNIKPMNLIGVDRGENIPAVIALTDPEGCPLSRFKDSLGNPTHILRIGESYKEKQRTIQAKKEVEQRRAGGYSRKYASKAKNLADDMVRNTARDLLYYAVTQDAMLIFENLSRGFGRQGKRTFMAERQYTRMEDWLTAKLAYEGLPSKTYLSKTLAQYTSKTCSNCGFTITSADYDRVLEKLKKTATGWMTTINGKELKVEGQITYYNRYKRQNVVKDLSVELDRLSEESVNNDISSWTKGRSGEALSLLKKRFSHRPVQEKFVCLNCEFETHADEQAALNIARSWLFLRSQEYKKYQTNKTTGNTDKRAFVETWQSFYRKKLKEVWKPAV

SEQ ID NO: 47687 - protein, 977 aa, synthetic construct
  REGION 1..977: note = engineered CasX variant
QEIKRINKIRRRLVKDSNTKKAGKTGPMKTLLVRVMTPDLRERLENLRKKPENIPQPISNTSRANLNKLLTDYTEMKKAILHVYWEEFQKDPVGLMSRVAQPASKKIDQNKLKPEMDEKGNLTTAGFACSQCGQPLFVYKLEQVSEKGKAYTNYFGRCNVAEHEKLILLAQLKPEKDSDEAVTYSLGKFGQRALDFYSIHVTKESTHPVKPLAQIAGNRYASPVGKALSDACMGTIASFLSKYQDIIIEHQKVVKGNQKRLESLRELAGKENLEYPSVTLPPQPHTKEGVDAYNEVIARVRMWVNLNLWQKLKLSRDDAKPLLRLKGFPSFPLVERQANEVDWWDMVCNVKKLINEKKEDGKVFWQNLAGYKRQEALRPYLSSEEDRKKGKKFARYQLGDLLLHLEKKHGEDWGKVYDEAWERIDKKVEGLSKHIKLEEERRSEDAQSKAALTDWLRAKASFVIEGSKEADKDEFCRCELKLQKWYGDLRGKPFAIEAENSILDISGFSKQYNCAFIWQKDGVKKLNLYLIINYFKGGKLRFKKIKPEAFEANRFYTVINKKSGEIVPMEVNFNFDDPNLIILPLAFGKRQGREFIWNDLLSLETGSLKLANGRVIEKTLYNRRTRQDEPALFVALTFERREVLDSSNIKPMNLIGVDRGENIPAVIALTDPEGCPLSRFKDSLGNPTHILRIGESYKEKQRTIQAKKEVEQRRAGGYSRKYASKAKNLADDMVRNTARDLLYYAVTQDAMLIFENLSRGFGRQGKRTFMAERQYTRMEDWLTAKLAYEGLPSKTYLSKTLAQYTSKTCSNCGFTITSADYDRVLEKLKKTATGWMTTINGKELKVEGQITYYNRYKRQNVVKDLSVELDRLSEESVNNDISSWTKGRSGEALSLLKKRFSHRPVQEKFVCLNCEFETHADEQAALNIARSWLFLRSQEYKKYQTNKTTGNTDKRAFVETWQSFYRKKLKEVWKPAV

SEQ ID NO: 47688 - protein, 979 aa, synthetic construct
  REGION 1..979: note = engineered CasX variant
QEIKRINKIRRRLVKDSNTKKAGKTGPMKTLLVRVMTPDLRERLENLRKKPENIPQPISNTSRANLNKLLTDYTEMKKAILHVYWEEFQKDPVGLMSRVAQPASKKIDQNKLKPEMDEKGNLTTAGFACSQCGQPLFVYKLEQVSEKGKAYTNYFGRCNVAEHEKLILLAQLKPEKDSDEAVTYSLGKFGQRALDFYSIHVTKESTHPVKPLAQIAGNRYASYPVGKALSDACMGTIASFLSKYQDIIIEHQKVVKGNQKRLESLRELAGKENLEYPSVTLPPQPHTKEGVDAYNEVIARVRMWVNLNLWQKLKLSRDDAKPLLRLKGFPSFPLVERQANEVDWWDMVCNVKKLINEKKEDGKVFWQNLAGYKRQEALRPYLSSEEDRKKGKKFARYQLGDLLLHLEKKHGEDWGKVYDEAWERIDKKVEGLSKHIKLEEERRSEDAQSKAALTDWLRAKASFVIEGLKEADDKDEFCRCELKLQKWYGDLRGKPFAIEAENSILDISGFSKQYNCAFIWQKDGVKKLNLYLIINYFKGGKLRFKKIKPEAFEANRFYTVINKKSGEIVPMEVNFNFDDPNLIILPLAFGKRQGREFIWNDLLSLETGSLKLANGRVIEKTLYNRRTRQDEPALFVALTFERREVLDSSNIKPMNLIGVDRGENIPAVIALTDPEGCPLSRFKDSLGNPTHILRIGESYKEKQRTIQAKKEVEQRRAGGYSRKYASKAKNLADDMVRNTARDLLYYAVTQDAMLIFENLSRGFGRQGKRTFMAERQYTRMEDWLTAKLAYEGLPSKTYLSKTLAQYTSKTCSNCGFTITSADYDRVLEKLKKTATGWMTTINGKELKVEGQITYYNRYKRQNVVKDLSVELDRLSEESVNNDISSWTKGRSGEALSLLKKRFSHRPVQEKFVCLNCEFETHADEQAALNIARSWLFLRSQEYKKYQTNKTTGNTDKRAFVETWQSFYRKKLKEVWKPAV

SEQ ID NO: 47689 - protein, 979 aa, synthetic construct
  REGION 1..979: note = engineered CasX variant
QEIKRINKIRRRLVKDSNTKKAGKTGPMKTLLVRVMTPDLRERLENLRKKPENIPQPISNTSRANLNKLLTDYTEMKKAILHVYWEEFQKDPVGLMSRVAQPASKKIDQNKLKPEMDEKGNLTTAGFACSQCGQPLFVYKLEQVSEKGKAYTNYFGRCNVAEHEKLILLAQLKPEKDSDEAVTYSLGKFGQRALDFYSIHVTKESTHPVKPLAQIAGNRYASHPVGKALSDACMGTIASFLSKYQDIIIEHQKVVKGNQKRLESLRELAGKENLEYPSVTLPPQPHTKEGVDAYNEVIARVRMWVNLNLWQKLKLSRDDAKPLLRLKGFPSFPLVERQANEVDWWDMVCNVKKLINEKKEDGKVFWQNLAGYKRQEALRPYLSSEEDRKKGKKFARYQLGDLLLHLEKKHGEDWGKVYDEAWERIDKKVEGLSKHIKLEEERRSEDAQSKAALTDWLRAKASFVIEGLKEADDKDEFCRCELKLQKWYGDLRGKPFAIEAENSILDISGFSKQYNCAFIWQKDGVKKLNLYLIINYFKGGKLRFKKIKPEAFEANRFYTVINKKSGEIVPMEVNFNFDDPNLIILPLAFGKRQGREFIWNDLLSLETGSLKLANGRVIEKTLYNRRTRQDEPALFVALTFERREVLDSSNIKPMNLIGVDRGENIPAVIALTDPEGCPLSRFKDSLGNPTHILRIGESYKEKQRTIQAKKEVEQRRAGGYSRKYASKAKNLADDMVRNTARDLLYYAVTQDAMLIFENLSRGFGRQGKRTFMAERQYTRMEDWLTAKLAYEGLPSKTYLSKTLAQYTSKTCSNCGFTITSADYDRVLEKLKKTATGWMTTINGKELKVEGQITYYNRYKRQNVVKDLSVELDRLSEESVNNDISSWTKGRSGEALSLLKKRFSHRPVQEKFVCLNCEFETHADEQAALNIARSWLFLRSQEYKKYQTNKTTGNTDKRAFVETWQSFYRKKLKEVWKPAV

SEQ ID NO: 47690 - protein, 979 aa, synthetic construct
  REGION 1..979: note = engineered CasX variant
QEIKRINKIRRRLVKDSNTKKAGKTGPMKTLLVRVMTPDLRERLENLRKKPENIPQPISNTSRANLNKLLTDYTEMKKAILHVYWEEFQKDPVGLMSRVAQPASKKIDQNKLKPEMDEKGNLTTAGFACSQCGQPLFVYKLEQVSEKGKAYTNYFGRCNVAEHEKLILLAQLKPEKDSDEAVTYSLGKFGQRALDFYSIHVTKESTHPVKPLAQIAGNRYASSPVGKALSDACMGTIASFLSKYQDIIIEHQKVVKGNQKRLESLRELAGKENLEYPSVTLPPQPHTKEGVDAYNEVIARVRMWVNLNLWQKLKLSRDDAKPLLRLKGFPSFPLVERQANEVDWWDMVCNVKKLINEKKEDGKVFWQNLAGYKRQEALRPYLSSEEDRKKGKKFARYQLGDLLLHLEKKHGEDWGKVYDEAWERIDKKVEGLSKHIKLEEERRSEDAQSKAALTDWLRAKASFVIEGLKEADDKDEFCRCELKLQKWYGDLRGKPFAIEAENSILDISGFSKQYNCAFIWQKDGVKKLNLYLIINYFKGGKLRFKKIKPEAFEANRFYTVINKKSGEIVPMEVNFNFDDPNLIILPLAFGKRQGREFIWNDLLSLETGSLKLANGRVIEKTLYNRRTRQDEPALFVALTFERREVLDSSNIKPMNLIGVDRGENIPAVIALTDPEGCPLSRFKDSLGNPTHILRIGESYKEKQRTIQAKKEVEQRRAGGYSRKYASKAKNLADDMVRNTARDLLYYAVTQDAMLIFENLSRGFGRQGKRTFMAERQYTRMEDWLTAKLAYEGLPSKTYLSKTLAQYTSKTCSNCGFTITSADYDRVLEKLKKTATGWMTTINGKELKVEGQITYYNRYKRQNVVKDLSVELDRLSEESVNNDISSWTKGRSGEALSLLKKRFSHRPVQEKFVCLNCEFETHADEQAALNIARSWLFLRSQEYKKYQTNKTTGNTDKRAFVETWQSFYRKKLKEVWKPAV

SEQ ID NO: 47691 - protein, 979 aa, synthetic construct
  REGION 1..979: note = engineered CasX variant
QEIKRINKIRRRLVKDSNTKKAGKTGPMKTLLVRVMTPDLRERLENLRKKPENIPQPISNTSRANLNKLLTDYTEMKKAILHVYWEEFQKDPVGLMSRVAQPASKKIDQNKLKPEMDEKGNLTTAGFACSQCGQPLFVYKLEQVSEKGKAYTNYFGRCNVAEHEKLILLAQLKPEKDSDEAVTYSLGKFGQRALDFYSIHVTKESTHPVKPLAQIAGNRYASTPVGKALSDACMGTIASFLSKYQDIIIEHQKVVKGNQKRLESLRELAGKENLEYPSVTLPPQPHTKEGVDAYNEVIARVRMWVNLNLWQKLKLSRDDAKPLLRLKGFPSFPLVERQANEVDWWDMVCNVKKLINEKKEDGKVFWQNLAGYKRQEALRPYLSSEEDRKKGKKFARYQLGDLLLHLEKKHGEDWGKVYDEAWERIDKKVEGLSKHIKLEEERRSEDAQSKAALTDWLRAKASFVIEGLKEADDKDEFCRCELKLQKWYGDLRGKPFAIEAENSILDISGFSKQYNCAFIWQKDGVKKLNLYLIINYFKGGKLRFKKIKPEAFEANRFYTVINKKSGEIVPMEVNFNFDDPNLIILPLAFGKRQGREFIWNDLLSLETGSLKLANGRVIEKTLYNRRTRQDEPALFVALTFERREVLDSSNIKPMNLIGVDRGENIPAVIALTDPEGCPLSRFKDSLGNPTHILRIGESYKEKQRTIQAKKEVEQRRAGGYSRKYASKAKNLADDMVRNTARDLLYYAVTQDAMLIFENLSRGFGRQGKRTFMAERQYTRMEDWLTAKLAYEGLPSKTYLSKTLAQYTSKTCSNCGFTITSADYDRVLEKLKKTATGWMTTINGKELKVEGQITYYNRYKRQNVVKDLSVELDRLSEESVNNDISSWTKGRSGEALSLLKKRFSHRPVQEKFVCLNCEFETHADEQAALNIARSWLFLRSQEYKKYQTNKTTGNTDKRAFVETWQSFYRKKLKEVWKPAV

SEQ ID NO: 47692 - protein, 979 aa, synthetic construct
  REGION 1..979: note = engineered CasX variant
QEIKRINKIRRRLVKDSNTKKAGKTGPMKTLLVRVMTPDLRERLENLRKKPENIPQPISNTSRANLNKLLTDYTEMKKAILHVYWEEFQKDPVGLMSRVAQPASKKIDQNKLKPEMDEKGNLTTAGFACSQCGQPLFVYKLEQVSEKGKAYTNYFGRCNVAEHEKLILLAQLKPEKDSDEAVTYSLGKFGQRALDFYSIHVTKESTHPVKPLAQIAGNRYASAPVGKALSDACMGTIASFLSKYQDIIIEHQKVVKGNQKRLESLRELAGKENLEYPSVTLPPQPHTKEGVDAYNEVIARVRMWVNLNLWQKLKLSRDDAKPLLRLKGFPSFPLVERQANEVDWWDMVCNVKKLINEKKEDGKVFWQNLAGYKRQEALRPYLSSEEDRKKGKKFARYQLGDLLLHLEKKHGEDWGKVYDEAWERIDKKVEGLSKHIKLEEERRSEDAQSKAALTDWLRAKASFVIEGLKEADDKDEFCRCELKLQKWYGDLRGKPFAIEAENSILDISGFSKQYNCAFIWQKDGVKKLNLYLIINYFKGGKLRFKKIKPEAFEANRFYTVINKKSGEIVPMEVNFNFDDPNLIILPLAFGKRQGREFIWNDLLSLETGSLKLANGRVIEKTLYNRRTRQDEPALFVALTFERREVLDSSNIKPMNLIGVDRGENIPAVIALTDPEGCPLSRFKDSLGNPTHILRIGESYKEKQRTIQAKKEVEQRRAGGYSRKYASKAKNLADDMVRNTARDLLYYAVTQDAMLIFENLSRGFGRQGKRTFMAERQYTRMEDWLTAKLAYEGLPSKTYLSKTLAQYTSKTCSNCGFTITSADYDRVLEKLKKTATGWMTTINGKELKVEGQITYYNRYKRQNVVKDLSVELDRLSEESVNNDISSWTKGRSGEALSLLKKRFSHRPVQEKFVCLNCEFETHADEQAALNIARSWLFLRSQEYKKYQTNKTTGNTDKRAFVETWQSFYRKKLKEVWKPAV

SEQ ID NO: 47693 - protein, 979 aa, synthetic construct
  REGION 1..979: note = engineered CasX variant
QEIKRINKIRRRLVKDSNTKKAGKTGPMKTLLVRVMTPDLRERLENLRKKPENIPQPISNTSRANLNKLLTDYTEMKKAILHVYWEEFQKDPVGLMSRVAQPASKKIDQNKLKPEMDEKGNLTTAGFACSQCGQPLFVYKLEQVSEKGKAYTNYFGRCNVAEHEKLILLAQLKPEKDSDEAVTYSLGKFGQRALDFYSIHVTKESTHPVKPLAQIAGNRYASVPVGKALSDACMGTIASFLSKYQDIIIEHQKVVKGNQKRLESLRELAGKENLEYPSVTLPPQPHTKEGVDAYNEVIARVRMWVNLNLWQKLKLSRDDAKPLLRLKGFPSFPLVERQANEVDWWDMVCNVKKLINEKKEDGKVFWQNLAGYKRQEALRPYLSSEEDRKKGKKFARYQLGDLLLHLEKKHGEDWGKVYDEAWERIDKKVEGLSKHIKLEEERRSEDAQSKAALTDWLRAKASFVIEGLKEADDKDEFCRCELKLQKWYGDLRGKPFAIEAENSILDISGFSKQYNCAFIWQKDGVKKLNLYLIINYFKGGKLRFKKIKPEAFEANRFYTVINKKSGEIVPMEVNFNFDDPNLIILPLAFGKRQGREFIWNDLLSLETGSLKLANGRVIEKTLYNRRTRQDEPALFVALTFERREVLDSSNIKPMNLIGVDRGENIPAVIALTDPEGCPLSRFKDSLGNPTHILRIGESYKEKQRTIQAKKEVEQRRAGGYSRKYASKAKNLADDMVRNTARDLLYYAVTQDAMLIFENLSRGFGRQGKRTFMAERQYTRMEDWLTAKLAYEGLPSKTYLSKTLAQYTSKTCSNCGFTITSADYDRVLEKLKKTATGWMTTINGKELKVEGQITYYNRYKRQNVVKDLSVELDRLSEESVNNDISSWTKGRSGEALSLLKKRFSHRPVQEKFVCLNCEFETHADEQAALNIARSWLFLRSQEYKKYQTNKTTGNTDKRAFVETWQSFYRKKLKEVWKPAV

SEQ ID NO: 47694 - protein, 979 aa, synthetic construct
  REGION 1..979: note = engineered CasX variant
QEIKRINKIRRRLVKDSNTKKAGKTGPMKTLLVRVMTPDLRERLENLRKKPENIPQPISNTSRANLNKLLTDYTEMKKAILHVYWEEFQKDPVGLMSRVAQPASKKIDQNKLKPEMDEKGNLTTAGFACSQCGQPLFVYKLEQVSEKGKAYTNYFGRCNVAEHEKLIKLAQLKPEKDSDEAVTYSLGKFGQRALDFYSIHVTKESTHPVKPLAQIAGNRYASGPVGKALSDACMGTIASFLSKYQDIIIEHQKVVKGNQKRLESLRELAGKENLEYPSVTLPPQPHTKEGVDAYNEVIARVRMWVNLNLWQKLKLSRDDAKPLLRLKGFPSFPLVERQANEVDWWDMVCNVKKLINEKKEDGKVFWQNLAGYKRQEALRPYLSSEEDRKKGKKFARYQLGDLLLHLEKKHGEDWGKVYDEAWERIDKKVEGLSKHIKLEEERRSEDAQSKAALTDWLRAKASFVIEGLKEADDKDEFCRCELKLQKWYGDLRGKPFAIEAENSILDISGFSKQYNCAFIWQKDGVKKLNLYLIINYFKGGKLRFKKIKPEAFEANRFYTVINKKSGEIVPMEVNFNFDDPNLIILPLAFGKRQGREFIWNDLLSLETGSLKLANGRVIEKTLYNRRTRQDEPALFVALTFERREVLDSSNIKPMNLIGVDRGENIPAVIALTDPEGCPLSRFKDSLGNPTHILRIGESYKEKQRTIQAKKEVEQRRAGGYSRKYASKAKNLADDMVRNTARDLLYYAVTQDAMLIFENLSRGFGRQGKRTFMAERQYTRMEDWLTAKLAYEGLPSKTYLSKTLAQYTSKTCSNCGFTITSADYDRVLEKLKKTATGWMTTINGKELKVEGQITYYNRYKRQNVVKDLSVELDRLSEESVNNDISSWTKGRSGEALSLLKKRFSHRPVQEKFVCLNCEFETHADEQAALNIARSWLFLRSQEYKKYQTNKTTGNTDKRAFVETWQSFYRKKLKEVWKPAV

SEQ ID NO: 47695 - protein, 978 aa, synthetic construct
  REGION 1..978: note = engineered CasX variant
QEIKRINKIRRRLVKDSNTKKAGKTGPMKTLLVRVMTPDLRERLENLRKKPENIPQPISNTSRANLNKLLTDYTEMKKAILHVYWEEFQKDPVGLMSRVAQPASKKIDQNKLKPEMDEKGNLTTAGFACSQCGQPLFVYKLEQVSEKGKAYTNYFGRCNVAEHEKLILLAQLKPEKDSDEAVTYSLGKFGQRALDFYSIHVTKESTHPVKPLAQIAGNRYASPVGKALSDACMGTIASFLSKYQDIIIEHQKVVKGNQKRLESLRELAGKENLEYPSVTLPPQPHTKEGVDAYNEVIARVRMWVNLNLWQKLKLSRDDAKPLLRLKGFPSFPLVERQANEVDWWDMVCNVKKLINEKKEDGKVFWQNLAGYKRQEALRPYLSSEEDRKKGKKFARYQLGDLLLHLEKKHGEDWGKVYDEAWERIDKKVEGLSKHIKLEEERRSEDAQSKAALTDWLRAKASFVIEGLKEADDKDEFCRCELKLQKWYGDLRGKPFAIEAENSILDISGFSKQYNCAFIWQKDGVKKLNLYLIINYFKGGKLRFKKIKPEAFEANRFYTVINKKSGEIVPMEVNFNFDDPNLIILPLAFGKRQGREFIWNDLLSLETGSLKLANGRVIEKTLYNRRTRQDEPALFVALTFERREVLDSSNIKPMNLIGVDRGENIPAVIALTDPEGCPLSRFKDSLGNPTHILRIGESYKEKQRTIQAKKEVEQRRAGGYSRKYASKAKNLADDMVRNTARDLLYYAVTQDAMLIFENLSRGFGRQGKRTFMAERQYTRMEDWLTAKLAYEGLPSKTYLSKTLAQYTSKTCSNCGFTITSADYDRVLEKLKKTATGWMTTINGKELKVEGQITYYNRYKRQNVVKDLSVELDRLSEESVNNDISSWTKGRSGEALSLLKKRFSHRPVQEKFVCLNCEFETHADEQAALNIARSWLFLRSQEYKKYQTNKTTGNTDKRAFVETWQSFYRKKLKEVWKPAV

SEQ ID NO: 47696 - protein, 979 aa, synthetic construct
  REGION 1..979: note = engineered CasX variant
QEIKRINKIRRRLVKDSNTKKAGKTGPMKTLLVRVMTPDLRERLENLRKKPENIPQPISNTSRANLNKLLTDYTEMKKAILHVYWEEFQKDPVGLMSRVAQPASKKIDQNKLKPEMDEKGNLTTAGFACSQCGQPLFVYKLEQVSEKGKAYTNYFGRCNVAEHEKLILLAQLKPEKDSDEAVTYSLGKFGQRALDFYSIHVTKESTHPVKPLAQIAGNRYASYPVGKALSDACMGTIASFLSKYQDIIIEHQKVVKGNQKRLESLRELAGKENLEYPSVTLPPQPHTKEGVDAYNEVIARVRMWVNLNLWQKLKLSRDDAKPLLRLKGFPSFPLVERQANEVDWWDMVCNVKKLINEKKEDGKVFWQNLAGYKRQEALRPYLSSEEDRKKGKKFARYQLGDLLLHLEKKHGEDWGKVYDEAWERIDKKVEGLSKHIKLEEERRSEDAQSKAALTDWLRAKASFVIEGLKEADKDEFCRCELKLQKWYGDLRGKPFAIEAENSILDISGFSKQYNCAFIWQKDGVKKLNLYLIINYFKGGKLRFKKIKPEAFEANRFYTVINKKSGEIVPMEVNFNFDDPNLIILPLAFGKRQGREFIWNDLLSLETGSLKLANGRVIEKTLYNRRTRQDEPALFVALTFERREVLDSSNIKPMNLIGVDRGENIPAVIALTDPEGCPLSRFKDSLGNPTHILRIGESYKEKQRTIQAKKEVEQRRAGGYSRKYASKAKNLADDMVRNTARDLLYYAVTQDAMLIFENLSRGFGRQGKRTFMAERQYTRMEDWLTAKLAYEGLPSKTYLSKTLAQYTSKTCSNCGFTITSADYDRVLEKLKKTATGWMTTINGKELKVEGQITYYNRYKRQNVVKDLSVELDRLSEESVNNDISSWTKGRSGNEALSLLKKRFSHRPVQEKFVCLNCEFETHADEQAALNIARSWLFLRSQEYKKYQTNKTTGNTDKRAFVETWQSFYRKKLKEVWKPAV

SEQ ID NO: 47697 - protein, 979 aa, synthetic construct
  REGION 1..979: note = engineered CasX variant
QEIKRINKIRRRLVKDSNTKKAGKTGPMKTLLVRVMTPDLRERLENLRKKPENIPQPISNTSRANLNKLLTDYTEMKKAILHVYWEEFQKDPVGLMSRVAQPASKKIDQNKLKPEMDEKGNLTTAGFACSQCGQPLFVYKLEQVSEKGKAYTNYFGRCNVAEHEKLILLAQLKPEKDSDEAVTYSLGKFGQRALDFYSIHVTKESTHPVKPLAQIAGNRYASHPVGKALSDACMGTIASFLSKYQDIIIEHQKVVKGNQKRLESLRELAGKENLEYPSVTLPPQPHTKEGVDAYNEVIARVRMWVNLNLWQKLKLSRDDAKPLLRLKGFPSFPLVERQANEVDWWDMVCNVKKLINEKKEDGKVFWQNLAGYKRQEALRPYLSSEEDRKKGKKFARYQLGDLLLHLEKKHGEDWGKVYDEAWERIDKKVEGLSKHIKLEEERRSEDAQSKAALTDWLRAKASFVIEGLKEADKDEFCRCELKLQKWYGDLRGKPFAIEAENSILDISGFSKQYNCAFIWQKDGVKKLNLYLIINYFKGGKLRFKKIKPEAFEANRFYTVINKKSGEIVPMEVNFNFDDPNLIILPLAFGKRQGREFIWNDLLSLETGSLKLANGRVIEKTLYNRRTRQDEPALFVALTFERREVLDSSNIKPMNLIGVDRGENIPAVIALTDPEGCPLSRFKDSLGNPTHILRIGESYKEKQRTIQAKKEVEQRRAGGYSRKYASKAKNLADDMVRNTARDLLYYAVTQDAMLIFENLSRGFGRQGKRTFMAERQYTRMEDWLTAKLAYEGLPSKTYLSKTLAQYTSKTCSNCGFTITSADYDRVLEKLKKTATGWMTTINGKELKVEGQITYYNRYKRQNVVKDLSVELDRLSEESVNNDISSWTKGRSGNEALSLLKKRFSHRPVQEKFVCLNCEFETHADEQAALNIARSWLFLRSQEYKKYQTNKTTGNTDKRAFVETWQSFYRKKLKEVWKPAV

SEQ ID NO: 47698 - protein, 979 aa, synthetic construct
  REGION 1..979: note = engineered CasX variant
QEIKRINKIRRRLVKDSNTKKAGKTGPMKTLLVRVMTPDLRERLENLRKKPENIPQPISNTSRANLNKLLTDYTEMKKAILHVYWEEFQKDPVGLMSRVAQPASKKIDQNKLKPEMDEKGNLTTAGFACSQCGQPLFVYKLEQVSEKGKAYTNYFGRCNVAEHEKLILLAQLKPEKDSDEAVTYSLGKFGQRALDFYSIHVTKESTHPVKPLAQIAGNRYASSPVGKALSDACMGTIASFLSKYQDIIIEHQKVVKGNQKRLESLRELAGKENLEYPSVTLPPQPHTKEGVDAYNEVIARVRMWVNLNLWQKLKLSRDDAKPLLRLKGFPSFPLVERQANEVDWWDMVCNVKKLINEKKEDGKVFWQNLAGYKRQEALRPYLSSEEDRKKGKKFARYQLGDLLLHLEKKHGEDWGKVYDEAWERIDKKVEGLSKHIKLEEERRSEDAQSKAALTDWLRAKASFVIEGLKEADKDEFCRCELKLQKWYGDLRGKPFAIEAENSILDISGFSKQYNCAFIWQKDGVKKLNLYLIINYFKGGKLRFKKIKPEAFEANRFYTVINKKSGEIVPMEVNFNFDDPNLIILPLAFGKRQGREFIWNDLLSLETGSLKLANGRVIEKTLYNRRTRQDEPALFVALTFERREVLDSSNIKPMNLIGVDRGENIPAVIALTDPEGCPLSRFKDSLGNPTHILRIGESYKEKQRTIQAKKEVEQRRAGGYSRKYASKAKNLADDMVRNTARDLLYYAVTQDAMLIFENLSRGFGRQGKRTFMAERQYTRMEDWLTAKLAYEGLPSKTYLSKTLAQYTSKTCSNCGFTITSADYDRVLEKLKKTATGWMTTINGKELKVEGQITYYNRYKRQNVVKDLSVELDRLSEESVNNDISSWTKGRSGNEALSLLKKRFSHRPVQEKFVCLNCEFETHADEQAALNIARSWLFLRSQEYKKYQTNKTTGNTDKRAFVETWQSFYRKKLKEVWKPAV

SEQ ID NO: 47699 - protein, 979 aa, synthetic construct
  REGION 1..979: note = engineered CasX variant
QEIKRINKIRRRLVKDSNTKKAGKTGPMKTLLVRVMTPDLRERLENLRKKPENIPQPISNTSRANLNKLLTDYTEMKKAILHVYWEEFQKDPVGLMSRVAQPASKKIDQNKLKPEMDEKGNLTTAGFACSQCGQPLFVYKLEQVSEKGKAYTNYFGRCNVAEHEKLILLAQLKPEKDSDEAVTYSLGKFGQRALDFYSIHVTKESTHPVKPLAQIAGNRYASTPVGKALSDACMGTIASFLSKYQDIIIEHQKVVKGNQKRLESLRELAGKENLEYPSVTLPPQPHTKEGVDAYNEVIARVRMWVNLNLWQKLKLSRDDAKPLLRLKGFPSFPLVERQANEVDWWDMVCNVKKLINEKKEDGKVFWQNLAGYKRQEALRPYLSSEEDRKKGKKFARYQLGDLLLHLEKKHGEDWGKVYDEAWERIDKKVEGLSKHIKLEEERRSEDAQSKAALTDWLRAKASFVIEGLKEADKDEFCRCELKLQKWYGDLRGKPFAIEAENSILDISGFSKQYNCAFIWQKDGVKKLNLYLIINYFKGGKLRFKKIKPEAFEANRFYTVINKKSGEIVPMEVNFNFDDPNLIILPLAFGKRQGREFIWNDLLSLETGSLKLANGRVIEKTLYNRRTRQDEPALFVALTFERREVLDSSNIKPMNLIGVDRGENIPAVIALTDPEGCPLSRFKDSLGNPTHILRIGESYKEKQRTIQAKKEVEQRRAGGYSRKYASKAKNLADDMVRNTARDLLYYAVTQDAMLIFENLSRGFGRQGKRTFMAERQYTRMEDWLTAKLAYEGLPSKTYLSKTLAQYTSKTCSNCGFTITSADYDRVLEKLKKTATGWMTTINGKELKVEGQITYYNRYKRQNVVKDLSVELDRLSEESVNNDISSWTKGRSGNEALSLLKKRFSHRPVQEKFVCLNCEFETHADEQAALNIARSWLFLRSQEYKKYQTNKTTGNTDKRAFVETWQSFYRKKLKEVWKPAV

SEQ ID NO: 47700 - protein, 979 aa, synthetic construct
  REGION 1..979: note = engineered CasX variant
QEIKRINKIRRRLVKDSNTKKAGKTGPMKTLLVRVMTPDLRERLENLRKKPENIPQPISNTSRANLNKLLTDYTEMKKAILHVYWEEFQKDPVGLMSRVAQPASKKIDQNKLKPEMDEKGNLTTAGFACSQCGQPLFVYKLEQVSEKGKAYTNYFGRCNVAEHEKLILLAQLKPEKDSDEAVTYSLGKFGQRALDFYSIHVTKESTHPVKPLAQIAGNRYASAPVGKALSDACMGTIASFLSKYQDIIIEHQKVVKGNQKRLESLRELAGKENLEYPSVTLPPQPHTKEGVDAYNEVIARVRMWVNLNLWQKLKLSRDDAKPLLRLKGFPSFPLVERQANEVDWWDMVCNVKKLINEKKEDGKVFWQNLAGYKRQEALRPYLSSEEDRKKGKKFARYQLGDLLLHLEKKHGEDWGKVYDEAWERIDKKVEGLSKHIKLEEERRSEDAQSKAALTDWLRAKASFVIEGLKEADKDEFCRCELKLQKWYGDLRGKPFAIEAENSILDISGFSKQYNCAFIWQKDGVKKLNLYLIINYFKGGKLRFKKIKPEAFEANRFYTVINKKSGEIVPMEVNFNFDDPNLIILPLAFGKRQGREFIWNDLLSLETGSLKLANGRVIEKTLYNRRTRQDEPALFVALTFERREVLDSSNIKPMNLIGVDRGENIPAVIALTDPEGCPLSRFKDSLGNPTHILRIGESYKEKQRTIQAKKEVEQRRAGGYSRKYASKAKNLADDMVRNTARDLLYYAVTQDAMLIFENLSRGFGRQGKRTFMAERQYTRMEDWLTAKLAYEGLPSKTYLSKTLAQYTSKTCSNCGFTITSADYDRVLEKLKKTATGWMTTINGKELKVEGQITYYNRYKRQNVVKDLSVELDRLSEESVNNDISSWTKGRSGNEALSLLKKRFSHRPVQEKFVCLNCEFETHADEQAALNIARSWLFLRSQEYKKYQTNKTTGNTDKRAFVETWQSFYRKKLKEVWKPAV

SEQ ID NO: 47701 - protein, 979 aa, synthetic construct
  REGION 1..979: note = engineered CasX variant
QEIKRINKIRRRLVKDSNTKKAGKTGPMKTLLVRVMTPDLRERLENLRKKPENIPQPISNTSRANLNKLLTDYTEMKKAILHVYWEEFQKDPVGLMSRVAQPASKKIDQNKLKPEMDEKGNLTTAGFACSQCGQPLFVYKLEQVSEKGKAYTNYFGRCNVAEHEKLILLAQLKPEKDSDEAVTYSLGKFGQRALDFYSIHVTKESTHPVKPLAQIAGNRYASVPVGKALSDACMGTIASFLSKYQDIIIEHQKVVKGNQKRLESLRELAGKENLEYPSVTLPPQPHTKEGVDAYNEVIARVRMWVNLNLWQKLKLSRDDAKPLLRLKGFPSFPLVERQANEVDWWDMVCNVKKLINEKKEDGKVFWQNLAGYKRQEALRPYLSSEEDRKKGKKFARYQLGDLLLHLEKKHGEDWGKVYDEAWERIDKKVEGLSKHIKLEEERRSEDAQSKAALTDWLRAKASFVIEGLKEADKDEFCRCELKLQKWYGDLRGKPFAIEAENSILDISGFSKQYNCAFIWQKDGVKKLNLYLIINYFKGGKLRFKKIKPEAFEANRFYTVINKKSGEIVPMEVNFNFDDPNLIILPLAFGKRQGREFIWNDLLSLETGSLKLANGRVIEKTLYNRRTRQDEPALFVALTFERREVLDSSNIKPMNLIGVDRGENIPAVIALTDPEGCPLSRFKDSLGNPTHILRIGESYKEKQRTIQAKKEVEQRRAGGYSRKYASKAKNLADDMVRNTARDLLYYAVTQDAMLIFENLSRGFGRQGKRTFMAERQYTRMEDWLTAKLAYEGLPSKTYLSKTLAQYTSKTCSNCGFTITSADYDRVLEKLKKTATGWMTTINGKELKVEGQITYYNRYKRQNVVKDLSVELDRLSEESVNNDISSWTKGRSGNEALSLLKKRFSHRPVQEKFVCLNCEFETHADEQAALNIARSWLFLRSQEYKKYQTNKTTGNTDKRAFVETWQSFYRKKLKEVWKPAV

SEQ ID NO: 47702 - protein, 979 aa, synthetic construct
  REGION 1..979: note = engineered CasX variant
QEIKRINKIRRRLVKDSNTKKAGKTGPMKTLLVRVMTPDLRERLENLRKKPENIPQPISNTSRANLNKLLTDYTEMKKAILHVYWEEFQKDPVGLMSRVAQPASKKIDQNKLKPEMDEKGNLTTAGFACSQCGQPLFVYKLEQVSEKGKAYTNYFGRCNVAEHEKLIKLAQLKPEKDSDEAVTYSLGKFGQRALDFYSIHVTKESTHPVKPLAQIAGNRYASGPVGKALSDACMGTIASFLSKYQDIIIEHQKVVKGNQKRLESLRELAGKENLEYPSVTLPPQPHTKEGVDAYNEVIARVRMWVNLNLWQKLKLSRDDAKPLLRLKGFPSFPLVERQANEVDWWDMVCNVKKLINEKKEDGKVFWQNLAGYKRQEALRPYLSSEEDRKKGKKFARYQLGDLLLHLEKKHGEDWGKVYDEAWERIDKKVEGLSKHIKLEEERRSEDAQSKAALTDWLRAKASFVIEGLKEADKDEFCRCELKLQKWYGDLRGKPFAIEAENSILDISGFSKQYNCAFIWQKDGVKKLNLYLIINYFKGGKLRFKKIKPEAFEANRFYTVINKKSGEIVPMEVNFNFDDPNLIILPLAFGKRQGREFIWNDLLSLETGSLKLANGRVIEKTLYNRRTRQDEPALFVALTFERREVLDSSNIKPMNLIGVDRGENIPAVIALTDPEGCPLSRFKDSLGNPTHILRIGESYKEKQRTIQAKKEVEQRRAGGYSRKYASKAKNLADDMVRNTARDLLYYAVTQDAMLIFENLSRGFGRQGKRTFMAERQYTRMEDWLTAKLAYEGLPSKTYLSKTLAQYTSKTCSNCGFTITSADYDRVLEKLKKTATGWMTTINGKELKVEGQITYYNRYKRQNVVKDLSVELDRLSEESVNNDISSWTKGRSGNEALSLLKKRFSHRPVQEKFVCLNCEFETHADEQAALNIARSWLFLRSQEYKKYQTNKTTGNTDKRAFVETWQSFYRKKLKEVWKPAV

SEQ ID NO: 47703 - protein, 978 aa, synthetic construct
  REGION 1..978: note = engineered CasX variant
QEIKRINKIRRRLVKDSNTKKAGKTGPMKTLLVRVMTPDLRERLENLRKKPENIPQPISNTSRANLNKLLTDYTEMKKAILHVYWEEFQKDPVGLMSRVAQPASKKIDQNKLKPEMDEKGNLTTAGFACSQCGQPLFVYKLEQVSEKGKAYTNYFGRCNVAEHEKLILLAQLKPEKDSDEAVTYSLGKFGQRALDFYSIHVTKESTHPVKPLAQIAGNRYASPVGKALSDACMGTIASFLSKYQDIIIEHQKVVKGNQKRLESLRELAGKENLEYPSVTLPPQPHTKEGVDAYNEVIARVRMWVNLNLWQKLKLSRDDAKPLLRLKGFPSFPLVERQANEVDWWDMVCNVKKLINEKKEDGKVFWQNLAGYKRQEALRPYLSSEEDRKKGKKFARYQLGDLLLHLEKKHGEDWGKVYDEAWERIDKKVEGLSKHIKLEEERRSEDAQSKAALTDWLRAKASFVIEGLKEADKDEFCRCELKLQKWYGDLRGKPFAIEAENSILDISGFSKQYNCAFIWQKDGVKKLNLYLIINYFKGGKLRFKKIKPEAFEANRFYTVINKKSGEIVPMEVNFNFDDPNLIILPLAFGKRQGREFIWNDLLSLETGSLKLANGRVIEKTLYNRRTRQDEPALFVALTFERREVLDSSNIKPMNLIGVDRGENIPAVIALTDPEGCPLSRFKDSLGNPTHILRIGESYKEKQRTIQAKKEVEQRRAGGYSRKYASKAKNLADDMVRNTARDLLYYAVTQDAMLIFENLSRGFGRQGKRTFMAERQYTRMEDWLTAKLAYEGLPSKTYLSKTLAQYTSKTCSNCGFTITSADYDRVLEKLKKTATGWMTTINGKELKVEGQITYYNRYKRQNVVKDLSVELDRLSEESVNNDISSWTKGRSGNEALSLLKKRFSHRPVQEKFVCLNCEFETHADEQAALNIARSWLFLRSQEYKKYQTNKTTGNTDKRAFVETWQSFYRKKLKEVWKPAV

SEQ ID NO: 47704 - protein, 978 aa, synthetic construct
  REGION 1..978: note = engineered CasX variant
QEIKRINKIRRRLVKDSNTKKAGKTGPMKTLLVRVMTPDLRERLENLRKKPENIPQPISNTSRANLNKLLTDYTEMKKAILHVYWEEFQKDPVGLMSRVAQPASKKIDQNKLKPEMDEKGNLTTAGFACSQCGQPLFVYKLEQVSEKGKAYTNYFGRCNVAEHEKLILLAQLKPEKDSDEAVTYSLGKFGQRALDFYSIHVTKESTHPVKPLAQIAGNRYASYPVGKALSDACMGTIASFLSKYQDIIIEHQKVVKGNQKRLESLRELAGKENLEYPSVTLPPQPHTKEGVDAYNEVIARVRMWVNLNLWQKLKLSRDDAKPLLRLKGFPSFPLVERQANEVDWWDMVCNVKKLINEKKEDGKVFWQNLAGYKRQEALRPYLSSEEDRQKGKKFARYQLGDLLLHLEKKHGEDWGKVYDEAWERIDKKVEGLSKHIKLEEERRSEDAQSKAALTDWLRAKASFVIEGLKEADKDEFCRCELKLQKWYGDLRGKPFAIEAENSILDISGFSKQYNCAFIWQKDGVKKLNLYLIINYFKGGKLRFKKIKPEAFEANRFYTVINKKSGEIVPMEVNFNFDDPNLIILPLAFGKRQGREFIWNDLLSLETGSLKLANGRVIEKTLYNRRTRQDEPALFVALTFERREVLDSSNIKPMNLIGVDRGENIPAVIALTDPEGCPLSRFKDSLGNPTHILRIGESYKEKQRTIQAKKEVEQRRAGGYSRKYASKAKNLADDMVRNTARDLLYYAVTQDAMLIFENLSRGFGRQGKRTFMAERQYTRMEDWLTAKLAYEGLPSKTYLSKTLAQYTSKTCSNCGFTITSADYDRVLEKLKKTATGWMTTINGKELKVEGQITYYNRYKRQNVVKDLSVELDRLSEESVNNDISSWTKGRSGEALSLLKKRFSHRPVQEKFVCLNCEFETHADEQAALNIARSWLFLRSQEYKKYQTNKTTGNTDKRAFVETWQSFYRKKLKEVWKPAV

SEQ ID NO: 47705 - protein, 978 aa, synthetic construct
  REGION 1..978: note = engineered CasX variant
QEIKRINKIRRRLVKDSNTKKAGKTGPMKTLLVRVMTPDLRERLENLRKKPENIPQPISNTSRANLNKLLTDYTEMKKAILHVYWEEFQKDPVGLMSRVAQPASKKIDQNKLKPEMDEKGNLTTAGFACSQCGQPLFVYKLEQVSEKGKAYTNYFGRCNVAEHEKLILLAQLKPEKDSDEAVTYSLGKFGQRALDFYSIHVTKESTHPVKPLAQIAGNRYASHPVGKALSDACMGTIASFLSKYQDIIIEHQKVVKGNQKRLESLRELAGKENLEYPSVTLPPQPHTKEGVDAYNEVIARVRMWVNLNLWQKLKLSRDDAKPLLRLKGFPSFPLVERQANEVDWWDMVCNVKKLINEKKEDGKVFWQNLAGYKRQEALRPYLSSEEDRQKGKKFARYQLGDLLLHLEKKHGEDWGKVYDEAWERIDKKVEGLSKHIKLEEERRSEDAQSKAALTDWLRAKASFVIEGLKEADKDEFCRCELKLQKWYGDLRGKPFAIEAENSILDISGFSKQYNCAFIWQKDGVKKLNLYLIINYFKGGKLRFKKIKPEAFEANRFYTVINKKSGEIVPMEVNFNFDDPNLIILPLAFGKRQGREFIWNDLLSLETGSLKLANGRVIEKTLYNRRTRQDEPALFVALTFERREVLDSSNIKPMNLIGVDRGENIPAVIALTDPEGCPLSRFKDSLGNPTHILRIGESYKEKQRTIQAKKEVEQRRAGGYSRKYASKAKNLADDMVRNTARDLLYYAVTQDAMLIFENLSRGFGRQGKRTFMAERQYTRMEDWLTAKLAYEGLPSKTYLSKTLAQYTSKTCSNCGFTITSADYDRVLEKLKKTATGWMTTINGKELKVEGQITYYNRYKRQNVVKDLSVELDRLSEESVNNDISSWTKGRSGEALSLLKKRFSHRPVQEKFVCLNCEFETHADEQAALNIARSWLFLRSQEYKKYQTNKTTGNTDKRAFVETWQSFYRKKLKEVWKPAV

SEQ ID NO: 47706 - protein, 978 aa, synthetic construct
  REGION 1..978: note = engineered CasX variant
QEIKRINKIRRRLVKDSNTKKAGKTGPMKTLLVRVMTPDLRERLENLRKKPENIPQPISNTSRANLNKLLTDYTEMKKAILHVYWEEFQKDPVGLMSRVAQPASKKIDQNKLKPEMDEKGNLTTAGFACSQCGQPLFVYKLEQVSEKGKAYTNYFGRCNVAEHEKLILLAQLKPEKDSDEAVTYSLGKFGQRALDFYSIHVTKESTHPVKPLAQIAGNRYASSPVGKALSDACMGTIASFLSKYQDIIIEHQKVVKGNQKRLESLRELAGKENLEYPSVTLPPQPHTKEGVDAYNEVIARVRMWVNLNLWQKLKLSRDDAKPLLRLKGFPSFPLVERQANEVDWWDMVCNVKKLINEKKEDGKVFWQNLAGYKRQEALRPYLSSEEDRQKGKKFARYQLGDLLLHLEKKHGEDWGKVYDEAWERIDKKVEGLSKHIKLEEERRSEDAQSKAALTDWLRAKASFVIEGLKEADKDEFCRCELKLQKWYGDLRGKPFAIEAENSILDISGFSKQYNCAFIWQKDGVKKLNLYLIINYFKGGKLRFKKIKPEAFEANRFYTVINKKSGEIVPMEVNFNFDDPNLIILPLAFGKRQGREFIWNDLLSLETGSLKLANGRVIEKTLYNRRTRQDEPALFVALTFERREVLDSSNIKPMNLIGVDRGENIPAVIALTDPEGCPLSRFKDSLGNPTHILRIGESYKEKQRTIQAKKEVEQRRAGGYSRKYASKAKNLADDMVRNTARDLLYYAVTQDAMLIFENLSRGFGRQGKRTFMAERQYTRMEDWLTAKLAYEGLPSKTYLSKTLAQYTSKTCSNCGFTITSADYDRVLEKLKKTATGWMTTINGKELKVEGQITYYNRYKRQNVVKDLSVELDRLSEESVNNDISSWTKGRSGEALSLLKKRFSHRPVQEKFVCLNCEFETHADEQAALNIARSWLFLRSQEYKKYQTNKTTGNTDKRAFVETWQSFYRKKLKEVWKPAV

SEQ ID NO: 47707 - protein, 978 aa, synthetic construct
  REGION 1..978: note = engineered CasX variant
QEIKRINKIRRRLVKDSNTKKAGKTGPMKTLLVRVMTPDLRERLENLRKKPENIPQPISNTSRANLNKLLTDYTEMKKAILHVYWEEFQKDPVGLMSRVAQPASKKIDQNKLKPEMDEKGNLTTAGFACSQCGQPLFVYKLEQVSEKGKAYTNYFGRCNVAEHEKLILLAQLKPEKDSDEAVTYSLGKFGQRALDFYSIHVTKESTHPVKPLAQIAGNRYASTPVGKALSDACMGTIASFLSKYQDIIIEHQKVVKGNQKRLESLRELAGKENLEYPSVTLPPQPHTKEGVDAYNEVIARVRMWVNLNLWQKLKLSRDDAKPLLRLKGFPSFPLVERQANEVDWWDMVCNVKKLINEKKEDGKVFWQNLAGYKRQEALRPYLSSEEDRQKGKKFARYQLGDLLLHLEKKHGEDWGKVYDEAWERIDKKVEGLSKHIKLEEERRSEDAQSKAALTDWLRAKASFVIEGLKEADKDEFCRCELKLQKWYGDLRGKPFAIEAENSILDISGFSKQYNCAFIWQKDGVKKLNLYLIINYFKGGKLRFKKIKPEAFEANRFYTVINKKSGEIVPMEVNFNFDDPNLIILPLAFGKRQGREFIWNDLLSLETGSLKLANGRVIEKTLYNRRTRQDEPALFVALTFERREVLDSSNIKPMNLIGVDRGENIPAVIALTDPEGCPLSRFKDSLGNPTHILRIGESYKEKQRTIQAKKEVEQRRAGGYSRKYASKAKNLADDMVRNTARDLLYYAVTQDAMLIFENLSRGFGRQGKRTFMAERQYTRMEDWLTAKLAYEGLPSKTYLSKTLAQYTSKTCSNCGFTITSADYDRVLEKLKKTATGWMTTINGKELKVEGQITYYNRYKRQNVVKDLSVELDRLSEESVNNDISSWTKGRSGEALSLLKKRFSHRPVQEKFVCLNCEFETHADEQAALNIARSWLFLRSQEYKKYQTNKTTGNTDKRAFVETWQSFYRKKLKEVWKPAV

SEQ ID NO: 47708 - protein, 978 aa, synthetic construct
  REGION 1..978: note = engineered CasX variant
QEIKRINKIRRRLVKDSNTKKAGKTGPMKTLLVRVMTPDLRERLENLRKKPENIPQPISNTSRANLNKLLTDYTEMKKAILHVYWEEFQKDPVGLMSRVAQPASKKIDQNKLKPEMDEKGNLTTAGFACSQCGQPLFVYKLEQVSEKGKAYTNYFGRCNVAEHEKLILLAQLKPEKDSDEAVTYSLGKFGQRALDFYSIHVTKESTHPVKPLAQIAGNRYASAPVGKALSDACMGTIASFLSKYQDIIIEHQKVVKGNQKRLESLRELAGKENLEYPSVTLPPQPHTKEGVDAYNEVIARVRMWVNLNLWQKLKLSRDDAKPLLRLKGFPSFPLVERQANEVDWWDMVCNVKKLINEKKEDGKVFWQNLAGYKRQEALRPYLSSEEDRQKGKKFARYQLGDLLLHLEKKHGEDWGKVYDEAWERIDKKVEGLSKHIKLEEERRSEDAQSKAALTDWLRAKASFVIEGLKEADKDEFCRCELKLQKWYGDLRGKPFAIEAENSILDISGFSKQYNCAFIWQKDGVKKLNLYLIINYFKGGKLRFKKIKPEAFEANRFYTVINKKSGEIVPMEVNFNFDDPNLIILPLAFGKRQGREFIWNDLLSLETGSLKLANGRVIEKTLYNRRTRQDEPALFVALTFERREVLDSSNIKPMNLIGVDRGENIPAVIALTDPEGCPLSRFKDSLGNPTHILRIGESYKEKQRTIQAKKEVEQRRAGGYSRKYASKAKNLADDMVRNTARDLLYYAVTQDAMLIFENLSRGFGRQGKRTFMAERQYTRMEDWLTAKLAYEGLPSKTYLSKTLAQYTSKTCSNCGFTITSADYDRVLEKLKKTATGWMTTINGKELKVEGQITYYNRYKRQNVVKDLSVELDRLSEESVNNDISSWTKGRSGEALSLLKKRFSHRPVQEKFVCLNCEFETHADEQAALNIARSWLFLRSQEYKKYQTNKTTGNTDKRAFVETWQSFYRKKLKEVWKPAV

SEQ ID NO: 47709 - protein, 978 aa, synthetic construct
  REGION 1..978: note = engineered CasX variant
QEIKRINKIRRRLVKDSNTKKAGKTGPMKTLLVRVMTPDLRERLENLRKKPENIPQPISNTSRANLNKLLTDYTEMKKAILHVYWEEFQKDPVGLMSRVAQPASKKIDQNKLKPEMDEKGNLTTAGFACSQCGQPLFVYKLEQVSEKGKAYTNYFGRCNVAEHEKLILLAQLKPEKDSDEAVTYSLGKFGQRALDFYSIHVTKESTHPVKPLAQIAGNRYASVPVGKALSDACMGTIASFLSKYQDIIIEHQKVVKGNQKRLESLRELAGKENLEYPSVTLPPQPHTKEGVDAYNEVIARVRMWVNLNLWQKLKLSRDDAKPLLRLKGFPSFPLVERQANEVDWWDMVCNVKKLINEKKEDGKVFWQNLAGYKRQEALRPYLSSEEDRQKGKKFARYQLGDLLLHLEKKHGEDWGKVYDEAWERIDKKVEGLSKHIKLEEERRSEDAQSKAALTDWLRAKASFVIEGLKEADKDEFCRCELKLQKWYGDLRGKPFAIEAENSILDISGFSKQYNCAFIWQKDGVKKLNLYLIINYFKGGKLRFKKIKPEAFEANRFYTVINKKSGEIVPMEVNFNFDDPNLIILPLAFGKRQGREFIWNDLLSLETGSLKLANGRVIEKTLYNRRTRQDEPALFVALTFERREVLDSSNIKPMNLIGVDRGENIPAVIALTDPEGCPLSRFKDSLGNPTHILRIGESYKEKQRTIQAKKEVEQRRAGGYSRKYASKAKNLADDMVRNTARDLLYYAVTQDAMLIFENLSRGFGRQGKRTFMAERQYTRMEDWLTAKLAYEGLPSKTYLSKTLAQYTSKTCSNCGFTITSADYDRVLEKLKKTATGWMTTINGKELKVEGQITYYNRYKRQNVVKDLSVELDRLSEESVNNDISSWTKGRSGEALSLLKKRFSHRPVQEKFVCLNCEFETHADEQAALNIARSWLFLRSQEYKKYQTNKTTGNTDKRAFVETWQSFYRKKLKEVWKPAV

SEQ ID NO: 47710 - protein, 978 aa, synthetic construct
  REGION 1..978: note = engineered CasX variant
QEIKRINKIRRRLVKDSNTKKAGKTGPMKTLLVRVMTPDLRERLENLRKKPENIPQPISNTSRANLNKLLTDYTEMKKAILHVYWEEFQKDPVGLMSRVAQPASKKIDQNKLKPEMDEKGNLTTAGFACSQCGQPLFVYKLEQVSEKGKAYTNYFGRCNVAEHEKLIKLAQLKPEKDSDEAVTYSLGKFGQRALDFYSIHVTKESTHPVKPLAQIAGNRYASGPVGKALSDACMGTIASFLSKYQDIIIEHQKVVKGNQKRLESLRELAGKENLEYPSVTLPPQPHTKEGVDAYNEVIARVRMWVNLNLWQKLKLSRDDAKPLLRLKGFPSFPLVERQANEVDWWDMVCNVKKLINEKKEDGKVFWQNLAGYKRQEALRPYLSSEEDRQKGKKFARYQLGDLLLHLEKKHGEDWGKVYDEAWERIDKKVEGLSKHIKLEEERRSEDAQSKAALTDWLRAKASFVIEGLKEADKDEFCRCELKLQKWYGDLRGKPFAIEAENSILDISGFSKQYNCAFIWQKDGVKKLNLYLIINYFKGGKLRFKKIKPEAFEANRFYTVINKKSGEIVPMEVNFNFDDPNLIILPLAFGKRQGREFIWNDLLSLETGSLKLANGRVIEKTLYNRRTRQDEPALFVALTFERREVLDSSNIKPMNLIGVDRGENIPAVIALTDPEGCPLSRFKDSLGNPTHILRIGESYKEKQRTIQAKKEVEQRRAGGYSRKYASKAKNLADDMVRNTARDLLYYAVTQDAMLIFENLSRGFGRQGKRTFMAERQYTRMEDWLTAKLAYEGLPSKTYLSKTLAQYTSKTCSNCGFTITSADYDRVLEKLKKTATGWMTTINGKELKVEGQITYYNRYKRQNVVKDLSVELDRLSEESVNNDISSWTKGRSGEALSLLKKRFSHRPVQEKFVCLNCEFETHADEQAALNIARSWLFLRSQEYKKYQTNKTTGNTDKRAFVETWQSFYRKKLKEVWKPAV

SEQ ID NO: 47711 - protein, 977 aa, synthetic construct
  REGION 1..977: note = engineered CasX variant
QEIKRINKIRRRLVKDSNTKKAGKTGPMKTLLVRVMTPDLRERLENLRKKPENIPQPISNTSRANLNKLLTDYTEMKKAILHVYWEEFQKDPVGLMSRVAQPASKKIDQNKLKPEMDEKGNLTTAGFACSQCGQPLFVYKLEQVSEKGKAYTNYFGRCNVAEHEKLILLAQLKPEKDSDEAVTYSLGKFGQRALDFYSIHVTKESTHPVKPLAQIAGNRYASPVGKALSDACMGTIASFLSKYQDIIIEHQKVVKGNQKRLESLRELAGKENLEYPSVTLPPQPHTKEGVDAYNEVIARVRMWVNLNLWQKLKLSRDDAKPLLRLKGFPSFPLVERQANEVDWWDMVCNVKKLINEKKEDGKVFWQNLAGYKRQEALRPYLSSEEDRQKGKKFARYQLGDLLLHLEKKHGEDWGKVYDEAWERIDKKVEGLSKHIKLEEERRSEDAQSKAALTDWLRAKASFVIEGLKEADKDEFCRCELKLQKWYGDLRGKPFAIEAENSILDISGFSKQYNCAFIWQKDGVKKLNLYLIINYFKGGKLRFKKIKPEAFEANRFYTVINKKSGEIVPMEVNFNFDDPNLIILPLAFGKRQGREFIWNDLLSLETGSLKLANGRVIEKTLYNRRTRQDEPALFVALTFERREVLDSSNIKPMNLIGVDRGENIPAVIALTDPEGCPLSRFKDSLGNPTHILRIGESYKEKQRTIQAKKEVEQRRAGGYSRKYASKAKNLADDMVRNTARDLLYYAVTQDAMLIFENLSRGFGRQGKRTFMAERQYTRMEDWLTAKLAYEGLPSKTYLSKTLAQYTSKTCSNCGFTITSADYDRVLEKLKKTATGWMTTINGKELKVEGQITYYNRYKRQNVVKDLSVELDRLSEESVNNDISSWTKGRSGEALSLLKKRFSHRPVQEKFVCLNCEFETHADEQAALNIARSWLFLRSQEYKKYQTNKTTGNTDKRAFVETWQSFYRKKLKEVWKPAV

SEQ ID NO: 47712 - protein, 978 aa, synthetic construct
  REGION 1..978: note = engineered CasX variant
QEIKRINKIRRRLVKDSNTKKAGKTGPMKTLLVRVMTPDLRERLENLRKKPENIPQPISNTSRANLNKLLTDYTEMKKAILHVYWEEFQKDPVGLMSRVAQPASKKIDQNKLKPEMDEKGNLTTAGFACSQCGQPLFVYKLEQVSEKGKAYTNYFGRCNVAEHEKLILLAQLKPEKDSDEAVTYSLGKFGQRALDFYSIHVTKESTHPVKPLAQIAGNRYASYPVGKALSDACMGTIASFLSKYQDIIIEHQKVVKGNQKRLESLRELAGKENLEYPSVTLPPQPHTKEGVDAYNEVIARVRMWVNLNLWQKLKLSRDDAKPLLRLKGFPSFPLVERQANEVDWWDMVCNVKKLINEKKEDGKVFWQNLAGYKRQEALRPYLSSEEDRKKGKKFARYQLGDLLLHLEKKHGEDWGKVYDEAWERIDKKVEGLSKHIKLEEERRSEDAQSKAALTDWLRAKASFVIEGLKEADKDEFCRCELKLQKWYGDLRGKPFAIEAENSILDISGFSKQYNCAFIWQKDGVKKLNLYLIINYFKGGKLRFKKIKPEAFEANRFYTVINKKSGEIVPMEVNFNFDDPNLIILPLAFGKRQGREFIWNDLLSLETGSLKLANGRVIEKTLYNRRTRQDEPALFVALTFERREVLDSSNIKPMNLIGVDRGENIPAVIALTDPEGCPLSRFKDSLGNPTHILRIGESYKEKQRTIQAKKEVEQRRAGGYSRKYASKAKNLADDMVRNTARDLLYYAVTQDAMLIFENLSRGFGRQGKRTFMAERQYTRMEDWLTAKLAYEGLPSQTYLSKTLAQYTSKTCSNCGFTITSADYDRVLEKLKKTATGWMTTINGKELKVEGQITYYNRYKRQNVVKDLSVELDRLSEESVNNDISSWTKGRSGEALSLLKKRFSHRPVQEKFVCLNCEFETHADEQAALNIARSWLFLRSQEYKKYQTNKTTGNTDKRAFVETWQSFYRKKLKEVWKPAV

SEQ ID NO: 47713 - protein, 978 aa, synthetic construct
  REGION 1..978: note = engineered CasX variant
QEIKRINKIRRRLVKDSNTKKAGKTGPMKTLLVRVMTPDLRERLENLRKKPENIPQPISNTSRANLNKLLTDYTEMKKAILHVYWEEFQKDPVGLMSRVAQPASKKIDQNKLKPEMDEKGNLTTAGFACSQCGQPLFVYKLEQVSEKGKAYTNYFGRCNVAEHEKLILLAQLKPEKDSDEAVTYSLGKFGQRALDFYSIHVTKESTHPVKPLAQIAGNRYASHPVGKALSDACMGTIASFLSKYQDIIIEHQKVVKGNQKRLESLRELAGKENLEYPSVTLPPQPHTKEGVDAYNEVIARVRMWVNLNLWQKLKLSRDDAKPLLRLKGFPSFPLVERQANEVDWWDMVCNVKKLINEKKEDGKVFWQNLAGYKRQEALRPYLSSEEDRKKGKKFARYQLGDLLLHLEKKHGEDWGKVYDEAWERIDKKVEGLSKHIKLEEERRSEDAQSKAALTDWLRAKASFVIEGLKEADKDEFCRCELKLQKWYGDLRGKPFAIEAENSILDISGFSKQYNCAFIWQKDGVKKLNLYLIINYFKGGKLRFKKIKPEAFEANRFYTVINKKSGEIVPMEVNFNFDDPNLIILPLAFGKRQGREFIWNDLLSLETGSLKLANGRVIEKTLYNRRTRQDEPALFVALTFERREVLDSSNIKPMNLIGVDRGENIPAVIALTDPEGCPLSRFKDSLGNPTHILRIGESYKEKQRTIQAKKEVEQRRAGGYSRKYASKAKNLADDMVRNTARDLLYYAVTQDAMLIFENLSRGFGRQGKRTFMAERQYTRMEDWLTAKLAYEGLPSQTYLSKTLAQYTSKTCSNCGFTITSADYDRVLEKLKKTATGWMTTINGKELKVEGQITYYNRYKRQNVVKDLSVELDRLSEESVNNDISSWTKGRSGEALSLLKKRFSHRPVQEKFVCLNCEFETHADEQAALNIARSWLFLRSQEYKKYQTNKTTGNTDKRAFVETWQSFYRKKLKEVWKPAV

SEQ ID NO: 47714 - protein, 978 aa, synthetic construct
  REGION 1..978: note = engineered CasX variant
QEIKRINKIRRRLVKDSNTKKAGKTGPMKTLLVRVMTPDLRERLENLRKKPENIPQPISNTSRANLNKLLTDYTEMKKAILHVYWEEFQKDPVGLMSRVAQPASKKIDQNKLKPEMDEKGNLTTAGFACSQCGQPLFVYKLEQVSEKGKAYTNYFGRCNVAEHEKLILLAQLKPEKDSDEAVTYSLGKFGQRALDFYSIHVTKESTHPVKPLAQIAGNRYASSPVGKALSDACMGTIASFLSKYQDIIIEHQKVVKGNQKRLESLRELAGKENLEYPSVTLPPQPHTKEGVDAYNEVIARVRMWVNLNLWQKLKLSRDDAKPLLRLKGFPSFPLVERQANEVDWWDMVCNVKKLINEKKEDGKVFWQNLAGYKRQEALRPYLSSEEDRKKGKKFARYQLGDLLLHLEKKHGEDWGKVYDEAWERIDKKVEGLSKHIKLEEERRSEDAQSKAALTDWLRAKASFVIEGLKEADKDEFCRCELKLQKWYGDLRGKPFAIEAENSILDISGFSKQYNCAFIWQKDGVKKLNLYLIINYFKGGKLRFKKIKPEAFEANRFYTVINKKSGEIVPMEVNFNFDDPNLIILPLAFGKRQGREFIWNDLLSLETGSLKLANGRVIEKTLYNRRTRQDEPALFVALTFERREVLDSSNIKPMNLIGVDRGENIPAVIALTDPEGCPLSRFKDSLGNPTHILRIGESYKEKQRTIQAKKEVEQRRAGGYSRKYASKAKNLADDMVRNTARDLLYYAVTQDAMLIFENLSRGFGRQGKRTFMAERQYTRMEDWLTAKLAYEGLPSQTYLSKTLAQYTSKTCSNCGFTITSADYDRVLEKLKKTATGWMTTINGKELKVEGQITYYNRYKRQNVVKDLSVELDRLSEESVNNDISSWTKGRSGEALSLLKKRFSHRPVQEKFVCLNCEFETHADEQAALNIARSWLFLRSQEYKKYQTNKTTGNTDKRAFVETWQSFYRKKLKEVWKPAV

SEQ ID NO: 47715 - protein, 978 aa, synthetic construct
  REGION 1..978: note = engineered CasX variant
QEIKRINKIRRRLVKDSNTKKAGKTGPMKTLLVRVMTPDLRERLENLRKKPENIPQPISNTSRANLNKLLTDYTEMKKAILHVYWEEFQKDPVGLMSRVAQPASKKIDQNKLKPEMDEKGNLTTAGFACSQCGQPLFVYKLEQVSEKGKAYTNYFGRCNVAEHEKLILLAQLKPEKDSDEAVTYSLGKFGQRALDFYSIHVTKESTHPVKPLAQIAGNRYASTPVGKALSDACMGTIASFLSKYQDIIIEHQKVVKGNQKRLESLRELAGKENLEYPSVTLPPQPHTKEGVDAYNEVIARVRMWVNLNLWQKLKLSRDDAKPLLRLKGFPSFPLVERQANEVDWWDMVCNVKKLINEKKEDGKVFWQNLAGYKRQEALRPYLSSEEDRKKGKKFARYQLGDLLLHLEKKHGEDWGKVYDEAWERIDKKVEGLSKHIKLEEERRSEDAQSKAALTDWLRAKASFVIEGLKEADKDEFCRCELKLQKWYGDLRGKPFAIEAENSILDISGFSKQYNCAFIWQKDGVKKLNLYLIINYFKGGKLRFKKIKPEAFEANRFYTVINKKSGEIVPMEVNFNFDDPNLIILPLAFGKRQGREFIWNDLLSLETGSLKLANGRVIEKTLYNRRTRQDEPALFVALTFERREVLDSSNIKPMNLIGVDRGENIPAVIALTDPEGCPLSRFKDSLGNPTHILRIGESYKEKQRTIQAKKEVEQRRAGGYSRKYASKAKNLADDMVRNTARDLLYYAVTQDAMLIFENLSRGFGRQGKRTFMAERQYTRMEDWLTAKLAYEGLPSQTYLSKTLAQYTSKTCSNCGFTITSADYDRVLEKLKKTATGWMTTINGKELKVEGQITYYNRYKRQNVVKDLSVELDRLSEESVNNDISSWTKGRSGEALSLLKKRFSHRPVQEKFVCLNCEFETHADEQAALNIARSWLFLRSQEYKKYQTNKTTGNTDKRAFVETWQSFYRKKLKEVWKPAV

SEQ ID NO: 47716 - protein, 978 aa, synthetic construct
  REGION 1..978: note = engineered CasX variant
QEIKRINKIRRRLVKDSNTKKAGKTGPMKTLLVRVMTPDLRERLENLRKKPENIPQPISNTSRANLNKLLTDYTEMKKAILHVYWEEFQKDPVGLMSRVAQPASKKIDQNKLKPEMDEKGNLTTAGFACSQCGQPLFVYKLEQVSEKGKAYTNYFGRCNVAEHEKLILLAQLKPEKDSDEAVTYSLGKFGQRALDFYSIHVTKESTHPVKPLAQIAGNRYASAPVGKALSDACMGTIASFLSKYQDIIIEHQKVVKGNQKRLESLRELAGKENLEYPSVTLPPQPHTKEGVDAYNEVIARVRMWVNLNLWQKLKLSRDDAKPLLRLKGFPSFPLVERQANEVDWWDMVCNVKKLINEKKEDGKVFWQNLAGYKRQEALRPYLSSEEDRKKGKKFARYQLGDLLLHLEKKHGEDWGKVYDEAWERIDKKVEGLSKHIKLEEERRSEDAQSKAALTDWLRAKASFVIEGLKEADKDEFCRCELKLQKWYGDLRGKPFAIEAENSILDISGFSKQYNCAFIWQKDGVKKLNLYLIINYFKGGKLRFKKIKPEAFEANRFYTVINKKSGEIVPMEVNFNFDDPNLIILPLAFGKRQGREFIWNDLLSLETGSLKLANGRVIEKTLYNRRTRQDEPALFVALTFERREVLDSSNIKPMNLIGVDRGENIPAVIALTDPEGCPLSRFKDSLGNPTHILRIGESYKEKQRTIQAKKEVEQRRAGGYSRKYASKAKNLADDMVRNTARDLLYYAVTQDAMLIFENLSRGFGRQGKRTFMAERQYTRMEDWLTAKLAYEGLPSQTYLSKTLAQYTSKTCSNCGFTITSADYDRVLEKLKKTATGWMTTINGKELKVEGQITYYNRYKRQNVVKDLSVELDRLSEESVNNDISSWTKGRSGEALSLLKKRFSHRPVQEKFVCLNCEFETHADEQAALNIARSWLFLRSQEYKKYQTNKTTGNTDKRAFVETWQSFYRKKLKEVWKPAV

SEQ ID NO: 47717 - protein, 978 aa, synthetic construct
  REGION 1..978: note = engineered CasX variant
QEIKRINKIRRRLVKDSNTKKAGKTGPMKTLLVRVMTPDLRERLENLRKKPENIPQPISNTSRANLNKLLTDYTEMKKAILHVYWEEFQKDPVGLMSRVAQPASKKIDQNKLKPEMDEKGNLTTAGFACSQCGQPLFVYKLEQVSEKGKAYTNYFGRCNVAEHEKLILLAQLKPEKDSDEAVTYSLGKFGQRALDFYSIHVTKESTHPVKPLAQIAGNRYASVPVGKALSDACMGTIASFLSKYQDIIIEHQKVVKGNQKRLESLRELAGKENLEYPSVTLPPQPHTKEGVDAYNEVIARVRMWVNLNLWQKLKLSRDDAKPLLRLKGFPSFPLVERQANEVDWWDMVCNVKKLINEKKEDGKVFWQNLAGYKRQEALRPYLSSEEDRKKGKKFARYQLGDLLLHLEKKHGEDWGKVYDEAWERIDKKVEGLSKHIKLEEERRSEDAQSKAALTDWLRAKASFVIEGLKEADKDEFCRCELKLQKWYGDLRGKPFAIEAENSILDISGFSKQYNCAFIWQKDGVKKLNLYLIINYFKGGKLRFKKIKPEAFEANRFYTVINKKSGEIVPMEVNFNFDDPNLIILPLAFGKRQGREFIWNDLLSLETGSLKLANGRVIEKTLYNRRTRQDEPALFVALTFERREVLDSSNIKPMNLIGVDRGENIPAVIALTDPEGCPLSRFKDSLGNPTHILRIGESYKEKQRTIQAKKEVEQRRAGGYSRKYASKAKNLADDMVRNTARDLLYYAVTQDAMLIFENLSRGFGRQGKRTFMAERQYTRMEDWLTAKLAYEGLPSQTYLSKTLAQYTSKTCSNCGFTITSADYDRVLEKLKKTATGWMTTINGKELKVEGQITYYNRYKRQNVVKDLSVELDRLSEESVNNDISSWTKGRSGEALSLLKKRFSHRPVQEKFVCLNCEFETHADEQAALNIARSWLFLRSQEYKKYQTNKTTGNTDKRAFVETWQSFYRKKLKEVWKPAV

SEQ ID NO: 47718 - protein, 978 aa, synthetic construct
  REGION 1..978: note = engineered CasX variant
QEIKRINKIRRRLVKDSNTKKAGKTGPMKTLLVRVMTPDLRERLENLRKKPENIPQPISNTSRANLNKLLTDYTEMKKAILHVYWEEFQKDPVGLMSRVAQPASKKIDQNKLKPEMDEKGNLTTAGFACSQCGQPLFVYKLEQVSEKGKAYTNYFGRCNVAEHEKLIKLAQLKPEKDSDEAVTYSLGKFGQRALDFYSIHVTKESTHPVKPLAQIAGNRYASGPVGKALSDACMGTIASFLSKYQDIIIEHQKVVKGNQKRLESLRELAGKENLEYPSVTLPPQPHTKEGVDAYNEVIARVRMWVNLNLWQKLKLSRDDAKPLLRLKGFPSFPLVERQANEVDWWDMVCNVKKLINEKKEDGKVFWQNLAGYKRQEALRPYLSSEEDRKKGKKFARYQLGDLLLHLEKKHGEDWGKVYDEAWERIDKKVEGLSKHIKLEEERRSEDAQSKAALTDWLRAKASFVIEGLKEADKDEFCRCELKLQKWYGDLRGKPFAIEAENSILDISGFSKQYNCAFIWQKDGVKKLNLYLIINYFKGGKLRFKKIKPEAFEANRFYTVINKKSGEIVPMEVNFNFDDPNLIILPLAFGKRQGREFIWNDLLSLETGSLKLANGRVIEKTLYNRRTRQDEPALFVALTFERREVLDSSNIKPMNLIGVDRGENIPAVIALTDPEGCPLSRFKDSLGNPTHILRIGESYKEKQRTIQAKKEVEQRRAGGYSRKYASKAKNLADDMVRNTARDLLYYAVTQDAMLIFENLSRGFGRQGKRTFMAERQYTRMEDWLTAKLAYEGLPSQTYLSKTLAQYTSKTCSNCGFTITSADYDRVLEKLKKTATGWMTTINGKELKVEGQITYYNRYKRQNVVKDLSVELDRLSEESVNNDISSWTKGRSGEALSLLKKRFSHRPVQEKFVCLNCEFETHADEQAALNIARSWLFLRSQEYKKYQTNKTTGNTDKRAFVETWQSFYRKKLKEVWKPAV

SEQ ID NO: 47719 - protein, 977 aa, synthetic construct
  REGION 1..977: note = engineered CasX variant
QEIKRINKIRRRLVKDSNTKKAGKTGPMKTLLVRVMTPDLRERLENLRKKPENIPQPISNTSRANLNKLLTDYTEMKKAILHVYWEEFQKDPVGLMSRVAQPASKKIDQNKLKPEMDEKGNLTTAGFACSQCGQPLFVYKLEQVSEKGKAYTNYFGRCNVAEHEKLILLAQLKPEKDSDEAVTYSLGKFGQRALDFYSIHVTKESTHPVKPLAQIAGNRYASPVGKALSDACMGTIASFLSKYQDIIIEHQKVVKGNQKRLESLRELAGKENLEYPSVTLPPQPHTKEGVDAYNEVIARVRMWVNLNLWQKLKLSRDDAKPLLRLKGFPSFPLVERQANEVDWWDMVCNVKKLINEKKEDGKVFWQNLAGYKRQEALRPYLSSEEDRKKGKKFARYQLGDLLLHLEKKHGEDWGKVYDEAWERIDKKVEGLSKHIKLEEERRSEDAQSKAALTDWLRAKASFVIEGLKEADKDEFCRCELKLQKWYGDLRGKPFAIEAENSILDISGFSKQYNCAFIWQKDGVKKLNLYLIINYFKGGKLRFKKIKPEAFEANRFYTVINKKSGEIVPMEVNFNFDDPNLIILPLAFGKRQGREFIWNDLLSLETGSLKLANGRVIEKTLYNRRTRQDEPALFVALTFERREVLDSSNIKPMNLIGVDRGENIPAVIALTDPEGCPLSRFKDSLGNPTHILRIGESYKEKQRTIQAKKEVEQRRAGGYSRKYASKAKNLADDMVRNTARDLLYYAVTQDAMLIFENLSRGFGRQGKRTFMAERQYTRMEDWLTAKLAYEGLPSQTYLSKTLAQYTSKTCSNCGFTITSADYDRVLEKLKKTATGWMTTINGKELKVEGQITYYNRYKRQNVVKDLSVELDRLSEESVNNDISSWTKGRSGEALSLLKKRFSHRPVQEKFVCLNCEFETHADEQAALNIARSWLFLRSQEYKKYQTNKTTGNTDKRAFVETWQSFYRKKLKEVWKPAV

SEQ ID NO: 47720 - protein, 978 aa, synthetic construct
  REGION 1..978: note = engineered CasX variant
QEIKRINKIRRRLVKDSNTKKAGKTGPMKTLLVRVMTPDLRERLENLRKKPENIPQPISNTSRANLNKLLTDYTEMKKAILHVYWEEFQKDPVGLMSRVAQPASKKIDQNKLKPEMDEKGNLTTAGFACSQCGQPLFVYKLEQVSEKGKAYTNYFGRCNVAEHEKLILLAQLKPEKDSDEAVTYSLGKFGQRALDFYSIHVTKESTHPVKPLAQIAGNRYASYPVGKALSDACMGTIASFLSKYQDIIIEHQKVVKGNQKRLESLRELAGKENLEYPSVTLPPQPHTKEGVDAYNEVIARVRMWVNLNLWQKLKLSRDDAKPLLRLKGFPSFPLVERQANEVDWWDMVCNVKKLINEKKEDGKVFWQNLAGYKRQEALRPYLSSEEDRKKGKKFARYQLGDLLLHLEKKHGEDWGKVYDEAWERIDKKVEGLSKHIKLEEERRSEDAQSKAALTDWLRAKASFVIEGLKEADKDEFCRCELKLQKWYGDLRGKPFAIEAENSILDISGFSKQYNCAFIWQKDGVKKLNLYLIINYFKGGKLRFKKIKPEAFEANRFYTVINKKSGEIVPMEVNFNFDDPNLIILPLAFGKRQGREFIWNDLLSLETGSLKLANGRVIEKTLYNRRTRQDEPALFVALTFERREVLDSSNIKPMNLIGVDRGENIPAVIALTDPEGCPLSRFKDSLGNPTHILRIGESYKEKQRTIQAKKEVEQRRAGGYSRKYASKAKNLADDMVRNTARDLLYYAVTQDAMLIFENLSRGFGRQGKRTFMAERQYTRMEDWLTAKLAYNGLPSKTYLSKTLAQYTSKTCSNCGFTITSADYDRVLEKLKKTATGWMTTINGKELKVEGQITYYNRYKRQNVVKDLSVELDRLSEESVNNDISSWTKGRSGEALSLLKKRFSHRPVQEKFVCLNCEFETHADEQAALNIARSWLFLRSQEYKKYQTNKTTGNTDKRAFVETWQSFYRKKLKEVWKPAV

SEQ ID NO: 47721 - protein, 978 aa, synthetic construct
  REGION 1..978: note = engineered CasX variant
QEIKRINKIRRRLVKDSNTKKAGKTGPMKTLLVRVMTPDLRERLENLRKKPENIPQPISNTSRANLNKLLTDYTEMKKAILHVYWEEFQKDPVGLMSRVAQPASKKIDQNKLKPEMDEKGNLTTAGFACSQCGQPLFVYKLEQVSEKGKAYTNYFGRCNVAEHEKLILLAQLKPEKDSDEAVTYSLGKFGQRALDFYSIHVTKESTHPVKPLAQIAGNRYASHPVGKALSDACMGTIASFLSKYQDIIIEHQKVVKGNQKRLESLRELAGKENLEYPSVTLPPQPHTKEGVDAYNEVIARVRMWVNLNLWQKLKLSRDDAKPLLRLKGFPSFPLVERQANEVDWWDMVCNVKKLINEKKEDGKVFWQNLAGYKRQEALRPYLSSEEDRKKGKKFARYQLGDLLLHLEKKHGEDWGKVYDEAWERIDKKVEGLSKHIKLEEERRSEDAQSKAALTDWLRAKASFVIEGLKEADKDEFCRCELKLQKWYGDLRGKPFAIEAENSILDISGFSKQYNCAFIWQKDGVKKLNLYLIINYFKGGKLRFKKIKPEAFEANRFYTVINKKSGEIVPMEVNFNFDDPNLIILPLAFGKRQGREFIWNDLLSLETGSLKLANGRVIEKTLYNRRTRQDEPALFVALTFERREVLDSSNIKPMNLIGVDRGENIPAVIALTDPEGCPLSRFKDSLGNPTHILRIGESYKEKQRTIQAKKEVEQRRAGGYSRKYASKAKNLADDMVRNTARDLLYYAVTQDAMLIFENLSRGFGRQGKRTFMAERQYTRMEDWLTAKLAYNGLPSKTYLSKTLAQYTSKTCSNCGFTITSADYDRVLEKLKKTATGWMTTINGKELKVEGQITYYNRYKRQNVVKDLSVELDRLSEESVNNDISSWTKGRSGEALSLLKKRFSHRPVQEKFVCLNCEFETHADEQAALNIARSWLFLRSQEYKKYQTNKTTGNTDKRAFVETWQSFYRKKLKEVWKPAV

SEQ ID NO: 47722 - protein, 978 aa, synthetic construct
  REGION 1..978: note = engineered CasX variant
QEIKRINKIRRRLVKDSNTKKAGKTGPMKTLLVRVMTPDLRERLENLRKKPENIPQPISNTSRANLNKLLTDYTEMKKAILHVYWEEFQKDPVGLMSRVAQPASKKIDQNKLKPEMDEKGNLTTAGFACSQCGQPLFVYKLEQVSEKGKAYTNYFGRCNVAEHEKLILLAQLKPEKDSDEAVTYSLGKFGQRALDFYSIHVTKESTHPVKPLAQIAGNRYASSPVGKALSDACMGTIASFLSKYQDIIIEHQKVVKGNQKRLESLRELAGKENLEYPSVTLPPQPHTKEGVDAYNEVIARVRMWVNLNLWQKLKLSRDDAKPLLRLKGFPSFPLVERQANEVDWWDMVCNVKKLINEKKEDGKVFWQNLAGYKRQEALRPYLSSEEDRKKGKKFARYQLGDLLLHLEKKHGEDWGKVYDEAWERIDKKVEGLSKHIKLEEERRSEDAQSKAALTDWLRAKASFVIEGLKEADKDEFCRCELKLQKWYGDLRGKPFAIEAENSILDISGFSKQYNCAFIWQKDGVKKLNLYLIINYFKGGKLRFKKIKPEAFEANRFYTVINKKSGEIVPMEVNFNFDDPNLIILPLAFGKRQGREFIWNDLLSLETGSLKLANGRVIEKTLYNRRTRQDEPALFVALTFERREVLDSSNIKPMNLIGVDRGENIPAVIALTDPEGCPLSRFKDSLGNPTHILRIGESYKEKQRTIQAKKEVEQRRAGGYSRKYASKAKNLADDMVRNTARDLLYYAVTQDAMLIFENLSRGFGRQGKRTFMAERQYTRMEDWLTAKLAYNGLPSKTYLSKTLAQYTSKTCSNCGFTITSADYDRVLEKLKKTATGWMTTINGKELKVEGQITYYNRYKRQNVVKDLSVELDRLSEESVNNDISSWTKGRSGEALSLLKKRFSHRPVQEKFVCLNCEFETHADEQAALNIARSWLFLRSQEYKKYQTNKTTGNTDKRAFVETWQSFYRKKLKEVWKPAV

SEQ ID NO: 47723 - protein, 978 aa, synthetic construct
  REGION 1..978: note = engineered CasX variant
QEIKRINKIRRRLVKDSNTKKAGKTGPMKTLLVRVMTPDLRERLENLRKKPENIPQPISNTSRANLNKLLTDYTEMKKAILHVYWEEFQKDPVGLMSRVAQPASKKIDQNKLKPEMDEKGNLTTAGFACSQCGQPLFVYKLEQVSEKGKAYTNYFGRCNVAEHEKLILLAQLKPEKDSDEAVTYSLGKFGQRALDFYSIHVTKESTHPVKPLAQIAGNRYASTPVGKALSDACMGTIASFLSKYQDIIIEHQKVVKGNQKRLESLRELAGKENLEYPSVTLPPQPHTKEGVDAYNEVIARVRMWVNLNLWQKLKLSRDDAKPLLRLKGFPSFPLVERQANEVDWWDMVCNVKKLINEKKEDGKVFWQNLAGYKRQEALRPYLSSEEDRKKGKKFARYQLGDLLLHLEKKHGEDWGKVYDEAWERIDKKVEGLSKHIKLEEERRSEDAQSKAALTDWLRAKASFVIEGLKEADKDEFCRCELKLQKWYGDLRGKPFAIEAENSILDISGFSKQYNCAFIWQKDGVKKLNLYLIINYFKGGKLRFKKIKPEAFEANRFYTVINKKSGEIVPMEVNFNFDDPNLIILPLAFGKRQGREFIWNDLLSLETGSLKLANGRVIEKTLYNRRTRQDEPALFVALTFERREVLDSSNIKPMNLIGVDRGENIPAVIALTDPEGCPLSRFKDSLGNPTHILRIGESYKEKQRTIQAKKEVEQRRAGGYSRKYASKAKNLADDMVRNTARDLLYYAVTQDAMLIFENLSRGFGRQGKRTFMAERQYTRMEDWLTAKLAYNGLPSKTYLSKTLAQYTSKTCSNCGFTITSADYDRVLEKLKKTATGWMTTINGKELKVEGQITYYNRYKRQNVVKDLSVELDRLSEESVNNDISSWTKGRSGEALSLLKKRFSHRPVQEKFVCLNCEFETHADEQAALNIARSWLFLRSQEYKKYQTNKTTGNTDKRAFVETWQSFYRKKLKEVWKPAV

SEQ ID NO: 47724 - protein, 978 aa, synthetic construct
  REGION 1..978: note = engineered CasX variant
QEIKRINKIRRRLVKDSNTKKAGKTGPMKTLLVRVMTPDLRERLENLRKKPENIPQPISNTSRANLNKLLTDYTEMKKAILHVYWEEFQKDPVGLMSRVAQPASKKIDQNKLKPEMDEKGNLTTAGFACSQCGQPLFVYKLEQVSEKGKAYTNYFGRCNVAEHEKLILLAQLKPEKDSDEAVTYSLGKFGQRALDFYSIHVTKESTHPVKPLAQIAGNRYASAPVGKALSDACMGTIASFLSKYQDIIIEHQKVVKGNQKRLESLRELAGKENLEYPSVTLPPQPHTKEGVDAYNEVIARVRMWVNLNLWQKLKLSRDDAKPLLRLKGFPSFPLVERQANEVDWWDMVCNVKKLINEKKEDGKVFWQNLAGYKRQEALRPYLSSEEDRKKGKKFARYQLGDLLLHLEKKHGEDWGKVYDEAWERIDKKVEGLSKHIKLEEERRSEDAQSKAALTDWLRAKASFVIEGLKEADKDEFCRCELKLQKWYGDLRGKPFAIEAENSILDISGFSKQYNCAFIWQKDGVKKLNLYLIINYFKGGKLRFKKIKPEAFEANRFYTVINKKSGEIVPMEVNFNFDDPNLIILPLAFGKRQGREFIWNDLLSLETGSLKLANGRVIEKTLYNRRTRQDEPALFVALTFERREVLDSSNIKPMNLIGVDRGENIPAVIALTDPEGCPLSRFKDSLGNPTHILRIGESYKEKQRTIQAKKEVEQRRAGGYSRKYASKAKNLADDMVRNTARDLLYYAVTQDAMLIFENLSRGFGRQGKRTFMAERQYTRMEDWLTAKLAYNGLPSKTYLSKTLAQYTSKTCSNCGFTITSADYDRVLEKLKKTATGWMTTINGKELKVEGQITYYNRYKRQNVVKDLSVELDRLSEESVNNDISSWTKGRSGEALSLLKKRFSHRPVQEKFVCLNCEFETHADEQAALNIARSWLFLRSQEYKKYQTNKTTGNTDKRAFVETWQSFYRKKLKEVWKPAV

SEQ ID NO: 47725 - protein, 978 aa, synthetic construct
  REGION 1..978: note = engineered CasX variant
QEIKRINKIRRRLVKDSNTKKAGKTGPMKTLLVRVMTPDLRERLENLRKKPENIPQPISNTSRANLNKLLTDYTEMKKAILHVYWEEFQKDPVGLMSRVAQPASKKIDQNKLKPEMDEKGNLTTAGFACSQCGQPLFVYKLEQVSEKGKAYTNYFGRCNVAEHEKLILLAQLKPEKDSDEAVTYSLGKFGQRALDFYSIHVTKESTHPVKPLAQIAGNRYASVPVGKALSDACMGTIASFLSKYQDIIIEHQKVVKGNQKRLESLRELAGKENLEYPSVTLPPQPHTKEGVDAYNEVIARVRMWVNLNLWQKLKLSRDDAKPLLRLKGFPSFPLVERQANEVDWWDMVCNVKKLINEKKEDGKVFWQNLAGYKRQEALRPYLSSEEDRKKGKKFARYQLGDLLLHLEKKHGEDWGKVYDEAWERIDKKVEGLSKHIKLEEERRSEDAQSKAALTDWLRAKASFVIEGLKEADKDEFCRCELKLQKWYGDLRGKPFAIEAENSILDISGFSKQYNCAFIWQKDGVKKLNLYLIINYFKGGKLRFKKIKPEAFEANRFYTVINKKSGEIVPMEVNFNFDDPNLIILPLAFGKRQGREFIWNDLLSLETGSLKLANGRVIEKTLYNRRTRQDEPALFVALTFERREVLDSSNIKPMNLIGVDRGENIPAVIALTDPEGCPLSRFKDSLGNPTHILRIGESYKEKQRTIQAKKEVEQRRAGGYSRKYASKAKNLADDMVRNTARDLLYYAVTQDAMLIFENLSRGFGRQGKRTFMAERQYTRMEDWLTAKLAYNGLPSKTYLSKTLAQYTSKTCSNCGFTITSADYDRVLEKLKKTATGWMTTINGKELKVEGQITYYNRYKRQNVVKDLSVELDRLSEESVNNDISSWTKGRSGEALSLLKKRFSHRPVQEKFVCLNCEFETHADEQAALNIARSWLFLRSQEYKKYQTNKTTGNTDKRAFVETWQSFYRKKLKEVWKPAV

SEQ ID NO: 47726 - protein, 978 aa, synthetic construct
  REGION 1..978: note = engineered CasX variant
QEIKRINKIRRRLVKDSNTKKAGKTGPMKTLLVRVMTPDLRERLENLRKKPENIPQPISNTSRANLNKLLTDYTEMKKAILHVYWEEFQKDPVGLMSRVAQPASKKIDQNKLKPEMDEKGNLTTAGFACSQCGQPLFVYKLEQVSEKGKAYTNYFGRCNVAEHEKLIKLAQLKPEKDSDEAVTYSLGKFGQRALDFYSIHVTKESTHPVKPLAQIAGNRYASGPVGKALSDACMGTIASFLSKYQDIIIEHQKVVKGNQKRLESLRELAGKENLEYPSVTLPPQPHTKEGVDAYNEVIARVRMWVNLNLWQKLKLSRDDAKPLLRLKGFPSFPLVERQANEVDWWDMVCNVKKLINEKKEDGKVFWQNLAGYKRQEALRPYLSSEEDRKKGKKFARYQLGDLLLHLEKKHGEDWGKVYDEAWERIDKKVEGLSKHIKLEEERRSEDAQSKAALTDWLRAKASFVIEGLKEADKDEFCRCELKLQKWYGDLRGKPFAIEAENSILDISGFSKQYNCAFIWQKDGVKKLNLYLIINYFKGGKLRFKKIKPEAFEANRFYTVINKKSGEIVPMEVNFNFDDPNLIILPLAFGKRQGREFIWNDLLSLETGSLKLANGRVIEKTLYNRRTRQDEPALFVALTFERREVLDSSNIKPMNLIGVDRGENIPAVIALTDPEGCPLSRFKDSLGNPTHILRIGESYKEKQRTIQAKKEVEQRRAGGYSRKYASKAKNLADDMVRNTARDLLYYAVTQDAMLIFENLSRGFGRQGKRTFMAERQYTRMEDWLTAKLAYNGLPSKTYLSKTLAQYTSKTCSNCGFTITSADYDRVLEKLKKTATGWMTTINGKELKVEGQITYYNRYKRQNVVKDLSVELDRLSEESVNNDISSWTKGRSGEALSLLKKRFSHRPVQEKFVCLNCEFETHADEQAALNIARSWLFLRSQEYKKYQTNKTTGNTDKRAFVETWQSFYRKKLKEVWKPAV

SEQ ID NO: 47727 - protein, 977 aa, synthetic construct
  REGION 1..977: note = engineered CasX variant
QEIKRINKIRRRLVKDSNTKKAGKTGPMKTLLVRVMTPDLRERLENLRKKPENIPQPISNTSRANLNKLLTDYTEMKKAILHVYWEEFQKDPVGLMSRVAQPASKKIDQNKLKPEMDEKGNLTTAGFACSQCGQPLFVYKLEQVSEKGKAYTNYFGRCNVAEHEKLILLAQLKPEKDSDEAVTYSLGKFGQRALDFYSIHVTKESTHPVKPLAQIAGNRYASPVGKALSDACMGTIASFLSKYQDIIIEHQKVVKGNQKRLESLRELAGKENLEYPSVTLPPQPHTKEGVDAYNEVIARVRMWVNLNLWQKLKLSRDDAKPLLRLKGFPSFPLVERQANEVDWWDMVCNVKKLINEKKEDGKVFWQNLAGYKRQEALRPYLSSEEDRKKGKKFARYQLGDLLLHLEKKHGEDWGKVYDEAWERIDKKVEGLSKHIKLEEERRSEDAQSKAALTDWLRAKASFVIEGLKEADKDEFCRCELKLQKWYGDLRGKPFAIEAENSILDISGFSKQYNCAFIWQKDGVKKLNLYLIINYFKGGKLRFKKIKPEAFEANRFYTVINKKSGEIVPMEVNFNFDDPNLIILPLAFGKRQGREFIWNDLLSLETGSLKLANGRVIEKTLYNRRTRQDEPALFVALTFERREVLDSSNIKPMNLIGVDRGENIPAVIALTDPEGCPLSRFKDSLGNPTHILRIGESYKEKQRTIQAKKEVEQRRAGGYSRKYASKAKNLADDMVRNTARDLLYYAVTQDAMLIFENLSRGFGRQGKRTFMAERQYTRMEDWLTAKLAYNGLPSKTYLSKTLAQYTSKTCSNCGFTITSADYDRVLEKLKKTATGWMTTINGKELKVEGQITYYNRYKRQNVVKDLSVELDRLSEESVNNDISSWTKGRSGEALSLLKKRFSHRPVQEKFVCLNCEFETHADEQAALNIARSWLFLRSQEYKKYQTNKTTGNTDKRAFVETWQSFYRKKLKEVWKPAV

SEQ ID NO: 47728 - protein, 978 aa, synthetic construct
  REGION 1..978: note = engineered CasX variant
QEIKRINKIRRRLVKDSNTKKAGKTGPMKTLLVRVMTPDLRERLENLRKKPENIPQPISNTSRANLNKLLTDYTEMKKAILHVYWEEFQKDPVGLMSRVAQPASKKIDQNKLKPEMDEKGNLTTAGFACSQCGQPLFVYKLEQVSEKGKAYTNYFGRCNVAEHEKLIQLAQLKPEKDSDEAVTYSLGKFGQRALDFYSIHVTKESTHPVKPLAQIAGNRYASYPVGKALSDACMGTIASFLSKYQDIIIEHQKVVKGNQKRLESLRELAGKENLEYPSVTLPPQPHTKEGVDAYNEVIARVRMWVNLNLWQKLKLSRDDAKPLLRLKGFPSFPLVERQANEVDWWDMVCNVKKLINEKKEDGKVFWQNLAGYKRQEALRPYLSSEEDRKKGKKFARYQLGDLLLHLEKKHGEDWGKVYDEAWERIDKKVEGLSKHIKLEEERRSEDAQSKAALTDWLRAKASFVIEGLKEADKDEFCRCELKLQKWYGDLRGKPFAIEAENSILDISGFSKQYNCAFIWQKDGVKKLNLYLIINYFKGGKLRFKKIKPEAFEANRFYTVINKKSGEIVPMEVNFNFDDPNLIILPLAFGKRQGREFIWNDLLSLETGSLKLANGRVIEKTLYNRRTRQDEPALFVALTFERREVLDSSNIKPMNLIGVDRGENIPAVIALTDPEGCPLSRFKDSLGNPTHILRIGESYKEKQRTIQAKKEVEQRRAGGYSRKYASKAKNLADDMVRNTARDLLYYAVTQDAMLIFENLSRGFGRQGKRTFMAERQYTRMEDWLTAKLAYEGLPSKTYLSKTLAQYTSKTCSNCGFTITSADYDRVLEKLKKTATGWMTTINGKELKVEGQITYYNRYKRQNVVKDLSVELDRLSEESVNNDISSWTKGRSGEALSLLKKRFSHRPVQEKFVCLNCEFETHADEQAALNIARSWLFLRSQEYKKYQTNKTTGNTDKRAFVETWQSFYRKKLKEVWKPAV

SEQ ID NO: 47729 - protein, 978 aa, synthetic construct
  REGION 1..978: note = engineered CasX variant
QEIKRINKIRRRLVKDSNTKKAGKTGPMKTLLVRVMTPDLRERLENLRKKPENIPQPISNTSRANLNKLLTDYTEMKKAILHVYWEEFQKDPVGLMSRVAQPASKKIDQNKLKPEMDEKGNLTTAGFACSQCGQPLFVYKLEQVSEKGKAYTNYFGRCNVAEHEKLIQLAQLKPEKDSDEAVTYSLGKFGQRALDFYSIHVTKESTHPVKPLAQIAGNRYASHPVGKALSDACMGTIASFLSKYQDIIIEHQKVVKGNQKRLESLRELAGKENLEYPSVTLPPQPHTKEGVDAYNEVIARVRMWVNLNLWQKLKLSRDDAKPLLRLKGFPSFPLVERQANEVDWWDMVCNVKKLINEKKEDGKVFWQNLAGYKRQEALRPYLSSEEDRKKGKKFARYQLGDLLLHLEKKHGEDWGKVYDEAWERIDKKVEGLSKHIKLEEERRSEDAQSKAALTDWLRAKASFVIEGLKEADKDEFCRCELKLQKWYGDLRGKPFAIEAENSILDISGFSKQYNCAFIWQKDGVKKLNLYLIINYFKGGKLRFKKIKPEAFEANRFYTVINKKSGEIVPMEVNFNFDDPNLIILPLAFGKRQGREFIWNDLLSLETGSLKLANGRVIEKTLYNRRTRQDEPALFVALTFERREVLDSSNIKPMNLIGVDRGENIPAVIALTDPEGCPLSRFKDSLGNPTHILRIGESYKEKQRTIQAKKEVEQRRAGGYSRKYASKAKNLADDMVRNTARDLLYYAVTQDAMLIFENLSRGFGRQGKRTFMAERQYTRMEDWLTAKLAYEGLPSKTYLSKTLAQYTSKTCSNCGFTITSADYDRVLEKLKKTATGWMTTINGKELKVEGQITYYNRYKRQNVVKDLSVELDRLSEESVNNDISSWTKGRSGEALSLLKKRFSHRPVQEKFVCLNCEFETHADEQAALNIARSWLFLRSQEYKKYQTNKTTGNTDKRAFVETWQSFYRKKLKEVWKPAV

SEQ ID NO: 47730 - protein, 978 aa, synthetic construct
  REGION 1..978: note = engineered CasX variant
QEIKRINKIRRRLVKDSNTKKAGKTGPMKTLLVRVMTPDLRERLENLRKKPENIPQPISNTSRANLNKLLTDYTEMKKAILHVYWEEFQKDPVGLMSRVAQPASKKIDQNKLKPEMDEKGNLTTAGFACSQCGQPLFVYKLEQVSEKGKAYTNYFGRCNVAEHEKLIQLAQLKPEKDSDEAVTYSLGKFGQRALDFYSIHVTKESTHPVKPLAQIAGNRYASSPVGKALSDACMGTIASFLSKYQDIIIEHQKVVKGNQKRLESLRELAGKENLEYPSVTLPPQPHTKEGVDAYNEVIARVRMWVNLNLWQKLKLSRDDAKPLLRLKGFPSFPLVERQANEVDWWDMVCNVKKLINEKKEDGKVFWQNLAGYKRQEALRPYLSSEEDRKKGKKFARYQLGDLLLHLEKKHGEDWGKVYDEAWERIDKKVEGLSKHIKLEEERRSEDAQSKAALTDWLRAKASFVIEGLKEADKDEFCRCELKLQKWYGDLRGKPFAIEAENSILDISGFSKQYNCAFIWQKDGVKKLNLYLIINYFKGGKLRFKKIKPEAFEANRFYTVINKKSGEIVPMEVNFNFDDPNLIILPLAFGKRQGREFIWNDLLSLETGSLKLANGRVIEKTLYNRRTRQDEPALFVALTFERREVLDSSNIKPMNLIGVDRGENIPAVIALTDPEGCPLSRFKDSLGNPTHILRIGESYKEKQRTIQAKKEVEQRRAGGYSRKYASKAKNLADDMVRNTARDLLYYAVTQDAMLIFENLSRGFGRQGKRTFMAERQYTRMEDWLTAKLAYEGLPSKTYLSKTLAQYTSKTCSNCGFTITSADYDRVLEKLKKTATGWMTTINGKELKVEGQITYYNRYKRQNVVKDLSVELDRLSEESVNNDISSWTKGRSGEALSLLKKRFSHRPVQEKFVCLNCEFETHADEQAALNIARSWLFLRSQEYKKYQTNKTTGNTDKRAFVETWQSFYRKKLKEVWKPAV

SEQ ID NO: 47731 - protein, 978 aa, synthetic construct
  REGION 1..978: note = engineered CasX variant
QEIKRINKIRRRLVKDSNTKKAGKTGPMKTLLVRVMTPDLRERLENLRKKPENIPQPISNTSRANLNKLLTDYTEMKKAILHVYWEEFQKDPVGLMSRVAQPASKKIDQNKLKPEMDEKGNLTTAGFACSQCGQPLFVYKLEQVSEKGKAYTNYFGRCNVAEHEKLIQLAQLKPEKDSDEAVTYSLGKFGQRALDFYSIHVTKESTHPVKPLAQIAGNRYASTPVGKALSDACMGTIASFLSKYQDIIIEHQKVVKGNQKRLESLRELAGKENLEYPSVTLPPQPHTKEGVDAYNEVIARVRMWVNLNLWQKLKLSRDDAKPLLRLKGFPSFPLVERQANEVDWWDMVCNVKKLINEKKEDGKVFWQNLAGYKRQEALRPYLSSEEDRKKGKKFARYQLGDLLLHLEKKHGEDWGKVYDEAWERIDKKVEGLSKHIKLEEERRSEDAQSKAALTDWLRAKASFVIEGLKEADKDEFCRCELKLQKWYGDLRGKPFAIEAENSILDISGFSKQYNCAFIWQKDGVKKLNLYLIINYFKGGKLRFKKIKPEAFEANRFYTVINKKSGEIVPMEVNFNFDDPNLIILPLAFGKRQGREFIWNDLLSLETGSLKLANGRVIEKTLYNRRTRQDEPALFVALTFERREVLDSSNIKPMNLIGVDRGENIPAVIALTDPEGCPLSRFKDSLGNPTHILRIGESYKEKQRTIQAKKEVEQRRAGGYSRKYASKAKNLADDMVRNTARDLLYYAVTQDAMLIFENLSRGFGRQGKRTFMAERQYTRMEDWLTAKLAYEGLPSKTYLSKTLAQYTSKTCSNCGFTITSADYDRVLEKLKKTATGWMTTINGKELKVEGQITYYNRYKRQNVVKDLSVELDRLSEESVNNDISSWTKGRSGEALSLLKKRFSHRPVQEKFVCLNCEFETHADEQAALNIARSWLFLRSQEYKKYQTNKTTGNTDKRAFVETWQSFYRKKLKEVWKPAV

SEQ ID NO: 47732 - protein, 978 aa, synthetic construct
  REGION 1..978: note = engineered CasX variant
QEIKRINKIRRRLVKDSNTKKAGKTGPMKTLLVRVMTPDLRERLENLRKKPENIPQPISNTSRANLNKLLTDYTEMKKAILHVYWEEFQKDPVGLMSRVAQPASKKIDQNKLKPEMDEKGNLTTAGFACSQCGQPLFVYKLEQVSEKGKAYTNYFGRCNVAEHEKLIQLAQLKPEKDSDEAVTYSLGKFGQRALDFYSIHVTKESTHPVKPLAQIAGNRYASAPVGKALSDACMGTIASFLSKYQDIIIEHQKVVKGNQKRLESLRELAGKENLEYPSVTLPPQPHTKEGVDAYNEVIARVRMWVNLNLWQKLKLSRDDAKPLLRLKGFPSFPLVERQANEVDWWDMVCNVKKLINEKKEDGKVFWQNLAGYKRQEALRPYLSSEEDRKKGKKFARYQLGDLLLHLEKKHGEDWGKVYDEAWERIDKKVEGLSKHIKLEEERRSEDAQSKAALTDWLRAKASFVIEGLKEADKDEFCRCELKLQKWYGDLRGKPFAIEAENSILDISGFSKQYNCAFIWQKDGVKKLNLYLIINYFKGGKLRFKKIKPEAFEANRFYTVINKKSGEIVPMEVNFNFDDPNLIILPLAFGKRQGREFIWNDLLSLETGSLKLANGRVIEKTLYNRRTRQDEPALFVALTFERREVLDSSNIKPMNLIGVDRGENIPAVIALTDPEGCPLSRFKDSLGNPTHILRIGESYKEKQRTIQAKKEVEQRRAGGYSRKYASKAKNLADDMVRNTARDLLYYAVTQDAMLIFENLSRGFGRQGKRTFMAERQYTRMEDWLTAKLAYEGLPSKTYLSKTLAQYTSKTCSNCGFTITSADYDRVLEKLKKTATGWMTTINGKELKVEGQITYYNRYKRQNVVKDLSVELDRLSEESVNNDISSWTKGRSGEALSLLKKRFSHRPVQEKFVCLNCEFETHADEQAALNIARSWLFLRSQEYKKYQTNKTTGNTDKRAFVETWQSFYRKKLKEVWKPAV

SEQ ID NO: 47733 - protein, 978 aa, synthetic construct
  REGION 1..978: note = engineered CasX variant
QEIKRINKIRRRLVKDSNTKKAGKTGPMKTLLVRVMTPDLRERLENLRKKPENIPQPISNTSRANLNKLLTDYTEMKKAILHVYWEEFQKDPVGLMSRVAQPASKKIDQNKLKPEMDEKGNLTTAGFACSQCGQPLFVYKLEQVSEKGKAYTNYFGRCNVAEHEKLIQLAQLKPEKDSDEAVTYSLGKFGQRALDFYSIHVTKESTHPVKPLAQIAGNRYASVPVGKALSDACMGTIASFLSKYQDIIIEHQKVVKGNQKRLESLRELAGKENLEYPSVTLPPQPHTKEGVDAYNEVIARVRMWVNLNLWQKLKLSRDDAKPLLRLKGFPSFPLVERQANEVDWWDMVCNVKKLINEKKEDGKVFWQNLAGYKRQEALRPYLSSEEDRKKGKKFARYQLGDLLLHLEKKHGEDWGKVYDEAWERIDKKVEGLSKHIKLEEERRSEDAQSKAALTDWLRAKASFVIEGLKEADKDEFCRCELKLQKWYGDLRGKPFAIEAENSILDISGFSKQYNCAFIWQKDGVKKLNLYLIINYFKGGKLRFKKIKPEAFEANRFYTVINKKSGEIVPMEVNFNFDDPNLIILPLAFGKRQGREFIWNDLLSLETGSLKLANGRVIEKTLYNRRTRQDEPALFVALTFERREVLDSSNIKPMNLIGVDRGENIPAVIALTDPEGCPLSRFKDSLGNPTHILRIGESYKEKQRTIQAKKEVEQRRAGGYSRKYASKAKNLADDMVRNTARDLLYYAVTQDAMLIFENLSRGFGRQGKRTFMAERQYTRMEDWLTAKLAYEGLPSKTYLSKTLAQYTSKTCSNCGFTITSADYDRVLEKLKKTATGWMTTINGKELKVEGQITYYNRYKRQNVVKDLSVELDRLSEESVNNDISSWTKGRSGEALSLLKKRFSHRPVQEKFVCLNCEFETHADEQAALNIARSWLFLRSQEYKKYQTNKTTGNTDKRAFVETWQSFYRKKLKEVWKPAV

SEQ ID NO: 47734 - protein, 979 aa, synthetic construct
  REGION 1..979: note = engineered CasX variant
QEIKRINKIRRRLVKDSNTKKAGKTGPMKTLLVRVMTPDLRERLENLRKKPENIPQPISNTSRANLNKLLTDYTEMKKAILHVYWEEFQKDPVGLMSRVAQPASKKIDQNKLKPEMDEKGNLTTAGFACSQCGQPLFVYKLEQVSEKGKAYTNYFGRCNVAEHEKLIQKLAQLKPEKDSDEAVTYSLGKFGQRALDFYSIHVTKESTHPVKPLAQIAGNRYASGPVGKALSDACMGTIASFLSKYQDIIIEHQKVVKGNQKRLESLRELAGKENLEYPSVTLPPQPHTKEGVDAYNEVIARVRMWVNLNLWQKLKLSRDDAKPLLRLKGFPSFPLVERQANEVDWWDMVCNVKKLINEKKEDGKVFWQNLAGYKRQEALRPYLSSEEDRKKGKKFARYQLGDLLLHLEKKHGEDWGKVYDEAWERIDKKVEGLSKHIKLEEERRSEDAQSKAALTDWLRAKASFVIEGLKEADKDEFCRCELKLQKWYGDLRGKPFAIEAENSILDISGFSKQYNCAFIWQKDGVKKLNLYLIINYFKGGKLRFKKIKPEAFEANRFYTVINKKSGEIVPMEVNFNFDDPNLIILPLAFGKRQGREFIWNDLLSLETGSLKLANGRVIEKTLYNRRTRQDEPALFVALTFERREVLDSSNIKPMNLIGVDRGENIPAVIALTDPEGCPLSRFKDSLGNPTHILRIGESYKEKQRTIQAKKEVEQRRAGGYSRKYASKAKNLADDMVRNTARDLLYYAVTQDAMLIFENLSRGFGRQGKRTFMAERQYTRMEDWLTAKLAYEGLPSKTYLSKTLAQYTSKTCSNCGFTITSADYDRVLEKLKKTATGWMTTINGKELKVEGQITYYNRYKRQNVVKDLSVELDRLSEESVNNDISSWTKGRSGEALSLLKKRFSHRPVQEKFVCLNCEFETHADEQAALNIARSWLFLRSQEYKKYQTNKTTGNTDKRAFVETWQSFYRKKLKEVWKPAV

SEQ ID NO: 47735 - protein, 977 aa, synthetic construct
  REGION 1..977: note = engineered CasX variant
QEIKRINKIRRRLVKDSNTKKAGKTGPMKTLLVRVMTPDLRERLENLRKKPENIPQPISNTSRANLNKLLTDYTEMKKAILHVYWEEFQKDPVGLMSRVAQPASKKIDQNKLKPEMDEKGNLTTAGFACSQCGQPLFVYKLEQVSEKGKAYTNYFGRCNVAEHEKLIQLAQLKPEKDSDEAVTYSLGKFGQRALDFYSIHVTKESTHPVKPLAQIAGNRYASPVGKALSDACMGTIASFLSKYQDIIIEHQKVVKGNQKRLESLRELAGKENLEYPSVTLPPQPHTKEGVDAYNEVIARVRMWVNLNLWQKLKLSRDDAKPLLRLKGFPSFPLVERQANEVDWWDMVCNVKKLINEKKEDGKVFWQNLAGYKRQEALRPYLSSEEDRKKGKKFARYQLGDLLLHLEKKHGEDWGKVYDEAWERIDKKVEGLSKHIKLEEERRSEDAQSKAALTDWLRAKASFVIEGLKEADKDEFCRCELKLQKWYGDLRGKPFAIEAENSILDISGFSKQYNCAFIWQKDGVKKLNLYLIINYFKGGKLRFKKIKPEAFEANRFYTVINKKSGEIVPMEVNFNFDDPNLIILPLAFGKRQGREFIWNDLLSLETGSLKLANGRVIEKTLYNRRTRQDEPALFVALTFERREVLDSSNIKPMNLIGVDRGENIPAVIALTDPEGCPLSRFKDSLGNPTHILRIGESYKEKQRTIQAKKEVEQRRAGGYSRKYASKAKNLADDMVRNTARDLLYYAVTQDAMLIFENLSRGFGRQGKRTFMAERQYTRMEDWLTAKLAYEGLPSKTYLSKTLAQYTSKTCSNCGFTITSADYDRVLEKLKKTATGWMTTINGKELKVEGQITYYNRYKRQNVVKDLSVELDRLSEESVNNDISSWTKGRSGEALSLLKKRFSHRPVQEKFVCLNCEFETHADEQAALNIARSWLFLRSQEYKKYQTNKTTGNTDKRAFVETWQSFYRKKLKEVWKPAV

SEQ ID NO: 47736 - protein, 978 aa, synthetic construct
  REGION 1..978: note = engineered CasX variant
QEIKRINKIRRRLVKDSNTKKAGKTGPMKTLLVRVMTPDLRERLENLRKKPENIPQPISNTSRANLNKLLTDYTEMKKAILHVYWEEFQKDPVGLMSRVAQPASKKIDQNKLKPEMDEKGNLTTAGFACSQCGQPLFVYKLEQVSEKGKAYTNYFGRCNVAEHEKLILLAQLKPEKDSDEAVTYSLGKFGQRALDFYSIHVTKESTHPVKPLAQIAGNRYASYPVGKALSDACMGTIASFLSKYQDIIIEHQKVVKGNQKRLESLRELAGKENLEYPSVTLPPQPHTKEGVDAYNEVIARVRMWVNLNLWQKLKLSRDDAKPLLRLKGFPSFPLVERQANEVDWWDMVCNVKKLINEKKEDGKVFWQNLAIYKRQEALRPYLSSEEDRKKGKKFARYQLGDLLLHLEKKHGEDWGKVYDEAWERIDKKVEGLSKHIKLEEERRSEDAQSKAALTDWLRAKASFVIEGLKEADKDEFCRCELKLQKWYGDLRGKPFAIEAENSILDISGFSKQYNCAFIWQKDGVKKLNLYLIINYFKGGKLRFKKIKPEAFEANRFYTVINKKSGEIVPMEVNFNFDDPNLIILPLAFGKRQGREFIWNDLLSLETGSLKLANGRVIEKTLYNRRTRQDEPALFVALTFERREVLDSSNIKPMNLIGVDRGENIPAVIALTDPEGCPLSRFKDSLGNPTHILRIGESYKEKQRTIQAKKEVEQRRAGGYSRKYASKAKNLADDMVRNTARDLLYYAVTQDAMLIFENLSRGFGRQGKRTFMAERQYTRMEDWLTAKLAYEGLPSKTYLSKTLAQYTSKTCSNCGFTITSADYDRVLEKLKKTATGWMTTINGKELKVEGQITYYNRYKRQNVVKDLSVELDRLSEESVNNDISSWTKGRSGEALSLLKKRFSHRPVQEKFVCLNCEFETHADEQAALNIARSWLFLRSQEYKKYQTNKTTGNTDKRAFVETWQSFYRKKLKEVWKPAV

SEQ ID NO: 47737 - protein, 978 aa, synthetic construct
  REGION 1..978: note = engineered CasX variant
QEIKRINKIRRRLVKDSNTKKAGKTGPMKTLLVRVMTPDLRERLENLRKKPENIPQPISNTSRANLNKLLTDYTEMKKAILHVYWEEFQKDPVGLMSRVAQPASKKIDQNKLKPEMDEKGNLTTAGFACSQCGQPLFVYKLEQVSEKGKAYTNYFGRCNVAEHEKLILLAQLKPEKDSDEAVTYSLGKFGQRALDFYSIHVTKESTHPVKPLAQIAGNRYASHPVGKALSDACMGTIASFLSKYQDIIIEHQKVVKGNQKRLESLRELAGKENLEYPSVTLPPQPHTKEGVDAYNEVIARVRMWVNLNLWQKLKLSRDDAKPLLRLKGFPSFPLVERQANEVDWWDMVCNVKKLINEKKEDGKVFWQNLAIYKRQEALRPYLSSEEDRKKGKKFARYQLGDLLLHLEKKHGEDWGKVYDEAWERIDKKVEGLSKHIKLEEERRSEDAQSKAALTDWLRAKASFVIEGLKEADKDEFCRCELKLQKWYGDLRGKPFAIEAENSILDISGFSKQYNCAFIWQKDGVKKLNLYLIINYFKGGKLRFKKIKPEAFEANRFYTVINKKSGEIVPMEVNFNFDDPNLIILPLAFGKRQGREFIWNDLLSLETGSLKLANGRVIEKTLYNRRTRQDEPALFVALTFERREVLDSSNIKPMNLIGVDRGENIPAVIALTDPEGCPLSRFKDSLGNPTHILRIGESYKEKQRTIQAKKEVEQRRAGGYSRKYASKAKNLADDMVRNTARDLLYYAVTQDAMLIFENLSRGFGRQGKRTFMAERQYTRMEDWLTAKLAYEGLPSKTYLSKTLAQYTSKTCSNCGFTITSADYDRVLEKLKKTATGWMTTINGKELKVEGQITYYNRYKRQNVVKDLSVELDRLSEESVNNDISSWTKGRSGEALSLLKKRFSHRPVQEKFVCLNCEFETHADEQAALNIARSWLFLRSQEYKKYQTNKTTGNTDKRAFVETWQSFYRKKLKEVWKPAV

SEQ ID NO: 47738 - protein, 978 aa, synthetic construct
  REGION 1..978: note = engineered CasX variant
QEIKRINKIRRRLVKDSNTKKAGKTGPMKTLLVRVMTPDLRERLENLRKKPENIPQPISNTSRANLNKLLTDYTEMKKAILHVYWEEFQKDPVGLMSRVAQPASKKIDQNKLKPEMDEKGNLTTAGFACSQCGQPLFVYKLEQVSEKGKAYTNYFGRCNVAEHEKLILLAQLKPEKDSDEAVTYSLGKFGQRALDFYSIHVTKESTHPVKPLAQIAGNRYASSPVGKALSDACMGTIASFLSKYQDIIIEHQKVVKGNQKRLESLRELAGKENLEYPSVTLPPQPHTKEGVDAYNEVIARVRMWVNLNLWQKLKLSRDDAKPLLRLKGFPSFPLVERQANEVDWWDMVCNVKKLINEKKEDGKVFWQNLAIYKRQEALRPYLSSEEDRKKGKKFARYQLGDLLLHLEKKHGEDWGKVYDEAWERIDKKVEGLSKHIKLEEERRSEDAQSKAALTDWLRAKASFVIEGLKEADKDEFCRCELKLQKWYGDLRGKPFAIEAENSILDISGFSKQYNCAFIWQKDGVKKLNLYLIINYFKGGKLRFKKIKPEAFEANRFYTVINKKSGEIVPMEVNFNFDDPNLIILPLAFGKRQGREFIWNDLLSLETGSLKLANGRVIEKTLYNRRTRQDEPALFVALTFERREVLDSSNIKPMNLIGVDRGENIPAVIALTDPEGCPLSRFKDSLGNPTHILRIGESYKEKQRTIQAKKEVEQRRAGGYSRKYASKAKNLADDMVRNTARDLLYYAVTQDAMLIFENLSRGFGRQGKRTFMAERQYTRMEDWLTAKLAYEGLPSKTYLSKTLAQYTSKTCSNCGFTITSADYDRVLEKLKKTATGWMTTINGKELKVEGQITYYNRYKRQNVVKDLSVELDRLSEESVNNDISSWTKGRSGEALSLLKKRFSHRPVQEKFVCLNCEFETHADEQAALNIARSWLFLRSQEYKKYQTNKTTGNTDKRAFVETWQSFYRKKLKEVWKPAV

SEQ ID NO: 47739 - protein, 978 aa, synthetic construct
  REGION 1..978: note = engineered CasX variant
QEIKRINKIRRRLVKDSNTKKAGKTGPMKTLLVRVMTPDLRERLENLRKKPENIPQPISNTSRANLNKLLTDYTEMKKAILHVYWEEFQKDPVGLMSRVAQPASKKIDQNKLKPEMDEKGNLTTAGFACSQCGQPLFVYKLEQVSEKGKAYTNYFGRCNVAEHEKLILLAQLKPEKDSDEAVTYSLGKFGQRALDFYSIHVTKESTHPVKPLAQIAGNRYASTPVGKALSDACMGTIASFLSKYQDIIIEHQKVVKGNQKRLESLRELAGKENLEYPSVTLPPQPHTKEGVDAYNEVIARVRMWVNLNLWQKLKLSRDDAKPLLRLKGFPSFPLVERQANEVDWWDMVCNVKKLINEKKEDGKVFWQNLAIYKRQEALRPYLSSEEDRKKGKKFARYQLGDLLLHLEKKHGEDWGKVYDEAWERIDKKVEGLSKHIKLEEERRSEDAQSKAALTDWLRAKASFVIEGLKEADKDEFCRCELKLQKWYGDLRGKPFAIEAENSILDISGFSKQYNCAFIWQKDGVKKLNLYLIINYFKGGKLRFKKIKPEAFEANRFYTVINKKSGEIVPMEVNFNFDDPNLIILPLAFGKRQGREFIWNDLLSLETGSLKLANGRVIEKTLYNRRTRQDEPALFVALTFERREVLDSSNIKPMNLIGVDRGENIPAVIALTDPEGCPLSRFKDSLGNPTHILRIGESYKEKQRTIQAKKEVEQRRAGGYSRKYASKAKNLADDMVRNTARDLLYYAVTQDAMLIFENLSRGFGRQGKRTFMAERQYTRMEDWLTAKLAYEGLPSKTYLSKTLAQYTSKTCSNCGFTITSADYDRVLEKLKKTATGWMTTINGKELKVEGQITYYNRYKRQNVVKDLSVELDRLSEESVNNDISSWTKGRSGEALSLLKKRFSHRPVQEKFVCLNCEFETHADEQAALNIARSWLFLRSQEYKKYQTNKTTGNTDKRAFVETWQSFYRKKLKEVWKPAV

SEQ ID NO: 47740 - protein, 978 aa, synthetic construct
  REGION 1..978: note = engineered CasX variant
QEIKRINKIRRRLVKDSNTKKAGKTGPMKTLLVRVMTPDLRERLENLRKKPENIPQPISNTSRANLNKLLTDYTEMKKAILHVYWEEFQKDPVGLMSRVAQPASKKIDQNKLKPEMDEKGNLTTAGFACSQCGQPLFVYKLEQVSEKGKAYTNYFGRCNVAEHEKLILLAQLKPEKDSDEAVTYSLGKFGQRALDFYSIHVTKESTHPVKPLAQIAGNRYASAPVGKALSDACMGTIASFLSKYQDIIIEHQKVVKGNQKRLESLRELAGKENLEYPSVTLPPQPHTKEGVDAYNEVIARVRMWVNLNLWQKLKLSRDDAKPLLRLKGFPSFPLVERQANEVDWWDMVCNVKKLINEKKEDGKVFWQNLAIYKRQEALRPYLSSEEDRKKGKKFARYQLGDLLLHLEKKHGEDWGKVYDEAWERIDKKVEGLSKHIKLEEERRSEDAQSKAALTDWLRAKASFVIEGLKEADKDEFCRCELKLQKWYGDLRGKPFAIEAENSILDISGFSKQYNCAFIWQKDGVKKLNLYLIINYFKGGKLRFKKIKPEAFEANRFYTVINKKSGEIVPMEVNFNFDDPNLIILPLAFGKRQGREFIWNDLLSLETGSLKLANGRVIEKTLYNRRTRQDEPALFVALTFERREVLDSSNIKPMNLIGVDRGENIPAVIALTDPEGCPLSRFKDSLGNPTHILRIGESYKEKQRTIQAKKEVEQRRAGGYSRKYASKAKNLADDMVRNTARDLLYYAVTQDAMLIFENLSRGFGRQGKRTFMAERQYTRMEDWLTAKLAYEGLPSKTYLSKTLAQYTSKTCSNCGFTITSADYDRVLEKLKKTATGWMTTINGKELKVEGQITYYNRYKRQNVVKDLSVELDRLSEESVNNDISSWTKGRSGEALSLLKKRFSHRPVQEKFVCLNCEFETHADEQAALNIARSWLFLRSQEYKKYQTNKTTGNTDKRAFVETWQSFYRKKLKEVWKPAV

SEQ ID NO: 47741 - protein, 978 aa, synthetic construct
  REGION 1..978: note = engineered CasX variant
QEIKRINKIRRRLVKDSNTKKAGKTGPMKTLLVRVMTPDLRERLENLRKKPENIPQPISNTSRANLNKLLTDYTEMKKAILHVYWEEFQKDPVGLMSRVAQPASKKIDQNKLKPEMDEKGNLTTAGFACSQCGQPLFVYKLEQVSEKGKAYTNYFGRCNVAEHEKLILLAQLKPEKDSDEAVTYSLGKFGQRALDFYSIHVTKESTHPVKPLAQIAGNRYASVPVGKALSDACMGTIASFLSKYQDIIIEHQKVVKGNQKRLESLRELAGKENLEYPSVTLPPQPHTKEGVDAYNEVIARVRMWVNLNLWQKLKLSRDDAKPLLRLKGFPSFPLVERQANEVDWWDMVCNVKKLINEKKEDGKVFWQNLAIYKRQEALRPYLSSEEDRKKGKKFARYQLGDLLLHLEKKHGEDWGKVYDEAWERIDKKVEGLSKHIKLEEERRSEDAQSKAALTDWLRAKASFVIEGLKEADKDEFCRCELKLQKWYGDLRGKPFAIEAENSILDISGFSKQYNCAFIWQKDGVKKLNLYLIINYFKGGKLRFKKIKPEAFEANRFYTVINKKSGEIVPMEVNFNFDDPNLIILPLAFGKRQGREFIWNDLLSLETGSLKLANGRVIEKTLYNRRTRQDEPALFVALTFERREVLDSSNIKPMNLIGVDRGENIPAVIALTDPEGCPLSRFKDSLGNPTHILRIGESYKEKQRTIQAKKEVEQRRAGGYSRKYASKAKNLADDMVRNTARDLLYYAVTQDAMLIFENLSRGFGRQGKRTFMAERQYTRMEDWLTAKLAYEGLPSKTYLSKTLAQYTSKTCSNCGFTITSADYDRVLEKLKKTATGWMTTINGKELKVEGQITYYNRYKRQNVVKDLSVELDRLSEESVNNDISSWTKGRSGEALSLLKKRFSHRPVQEKFVCLNCEFETHADEQAALNIARSWLFLRSQEYKKYQTNKTTGNTDKRAFVETWQSFYRKKLKEVWKPAV

SEQ ID NO: 47742 - protein, 978 aa, synthetic construct
  REGION 1..978: note = engineered CasX variant
QEIKRINKIRRRLVKDSNTKKAGKTGPMKTLLVRVMTPDLRERLENLRKKPENIPQPISNTSRANLNKLLTDYTEMKKAILHVYWEEFQKDPVGLMSRVAQPASKKIDQNKLKPEMDEKGNLTTAGFACSQCGQPLFVYKLEQVSEKGKAYTNYFGRCNVAEHEKLIKLAQLKPEKDSDEAVTYSLGKFGQRALDFYSIHVTKESTHPVKPLAQIAGNRYASGPVGKALSDACMGTIASFLSKYQDIIIEHQKVVKGNQKRLESLRELAGKENLEYPSVTLPPQPHTKEGVDAYNEVIARVRMWVNLNLWQKLKLSRDDAKPLLRLKGFPSFPLVERQANEVDWWDMVCNVKKLINEKKEDGKVFWQNLAIYKRQEALRPYLSSEEDRKKGKKFARYQLGDLLLHLEKKHGEDWGKVYDEAWERIDKKVEGLSKHIKLEEERRSEDAQSKAALTDWLRAKASFVIEGLKEADKDEFCRCELKLQKWYGDLRGKPFAIEAENSILDISGFSKQYNCAFIWQKDGVKKLNLYLIINYFKGGKLRFKKIKPEAFEANRFYTVINKKSGEIVPMEVNFNFDDPNLIILPLAFGKRQGREFIWNDLLSLETGSLKLANGRVIEKTLYNRRTRQDEPALFVALTFERREVLDSSNIKPMNLIGVDRGENIPAVIALTDPEGCPLSRFKDSLGNPTHILRIGESYKEKQRTIQAKKEVEQRRAGGYSRKYASKAKNLADDMVRNTARDLLYYAVTQDAMLIFENLSRGFGRQGKRTFMAERQYTRMEDWLTAKLAYEGLPSKTYLSKTLAQYTSKTCSNCGFTITSADYDRVLEKLKKTATGWMTTINGKELKVEGQITYYNRYKRQNVVKDLSVELDRLSEESVNNDISSWTKGRSGEALSLLKKRFSHRPVQEKFVCLNCEFETHADEQAALNIARSWLFLRSQEYKKYQTNKTTGNTDKRAFVETWQSFYRKKLKEVWKPAV

SEQ ID NO: 47743 - protein, 977 aa, synthetic construct
  REGION 1..977: note = engineered CasX variant
QEIKRINKIRRRLVKDSNTKKAGKTGPMKTLLVRVMTPDLRERLENLRKKPENIPQPISNTSRANLNKLLTDYTEMKKAILHVYWEEFQKDPVGLMSRVAQPASKKIDQNKLKPEMDEKGNLTTAGFACSQCGQPLFVYKLEQVSEKGKAYTNYFGRCNVAEHEKLILLAQLKPEKDSDEAVTYSLGKFGQRALDFYSIHVTKESTHPVKPLAQIAGNRYASPVGKALSDACMGTIASFLSKYQDIIIEHQKVVKGNQKRLESLRELAGKENLEYPSVTLPPQPHTKEGVDAYNEVIARVRMWVNLNLWQKLKLSRDDAKPLLRLKGFPSFPLVERQANEVDWWDMVCNVKKLINEKKEDGKVFWQNLAIYKRQEALRPYLSSEEDRKKGKKFARYQLGDLLLHLEKKHGEDWGKVYDEAWERIDKKVEGLSKHIKLEEERRSEDAQSKAALTDWLRAKASFVIEGLKEADKDEFCRCELKLQKWYGDLRGKPFAIEAENSILDISGFSKQYNCAFIWQKDGVKKLNLYLIINYFKGGKLRFKKIKPEAFEANRFYTVINKKSGEIVPMEVNFNFDDPNLIILPLAFGKRQGREFIWNDLLSLETGSLKLANGRVIEKTLYNRRTRQDEPALFVALTFERREVLDSSNIKPMNLIGVDRGENIPAVIALTDPEGCPLSRFKDSLGNPTHILRIGESYKEKQRTIQAKKEVEQRRAGGYSRKYASKAKNLADDMVRNTARDLLYYAVTQDAMLIFENLSRGFGRQGKRTFMAERQYTRMEDWLTAKLAYEGLPSKTYLSKTLAQYTSKTCSNCGFTITSADYDRVLEKLKKTATGWMTTINGKELKVEGQITYYNRYKRQNVVKDLSVELDRLSEESVNNDISSWTKGRSGEALSLLKKRFSHRPVQEKFVCLNCEFETHADEQAALNIARSWLFLRSQEYKKYQTNKTTGNTDKRAFVETWQSFYRKKLKEVWKPAV

SEQ ID NO: 47744 - protein, 978 aa, synthetic construct
  REGION 1..978: note = engineered CasX variant
QEIKRINKIRRRLVKDSNTKKAGKTGPMKTLLVRVMTPDLRERLENLRKKPENIPQPISNTSRANLNKLLTDYTEMKKAILHVYWEEFQKDPVGLMSRVAQPASKKIDQNKLKPEMDEKGNLTTAGFACSQCGQPLFVYKLEQVSEKGKAYTNYFGRCNVAEHEKLILLAQLKPEKDSDEAVTYSLGKFGQRALDFYSIHVTKESTHPVKPLAQIAGNRYASYPVGKALSDACMGTIASFLSKYQDIIIEHQKVVKGNQKRLESLRELAGKENLEYPSVTLPPQPHTKEGVDAYNEVIARVRMWVNLNLWQKLKLSRDDAKPLLRLKGFPSFPLVERQANEVDWWDMVCNVKKLINEKKEDGKVFWQNLAGYKRQEALRPYLSSEEDREKGKKFARYQLGDLLLHLEKKHGEDWGKVYDEAWERIDKKVEGLSKHIKLEEERRSEDAQSKAALTDWLRAKASFVIEGLKEADKDEFCRCELKLQKWYGDLRGKPFAIEAENSILDISGFSKQYNCAFIWQKDGVKKLNLYLIINYFKGGKLRFKKIKPEAFEANRFYTVINKKSGEIVPMEVNFNFDDPNLIILPLAFGKRQGREFIWNDLLSLETGSLKLANGRVIEKTLYNRRTRQDEPALFVALTFERREVLDSSNIKPMNLIGVDRGENIPAVIALTDPEGCPLSRFKDSLGNPTHILRIGESYKEKQRTIQAKKEVEQRRAGGYSRKYASKAKNLADDMVRNTARDLLYYAVTQDAMLIFENLSRGFGRQGKRTFMAERQYTRMEDWLTAKLAYEGLPSKTYLSKTLAQYTSKTCSNCGFTITSADYDRVLEKLKKTATGWMTTINGKELKVEGQITYYNRYKRQNVVKDLSVELDRLSEESVNNDISSWTKGRSGEALSLLKKRFSHRPVQEKFVCLNCEFETHADEQAALNIARSWLFLRSQEYKKYQTNKTTGNTDKRAFVETWQSFYRKKLKEVWKPAV

SEQ ID NO: 47745 - protein, 978 aa, synthetic construct
  REGION 1..978: note = engineered CasX variant
QEIKRINKIRRRLVKDSNTKKAGKTGPMKTLLVRVMTPDLRERLENLRKKPENIPQPISNTSRANLNKLLTDYTEMKKAILHVYWEEFQKDPVGLMSRVAQPASKKIDQNKLKPEMDEKGNLTTAGFACSQCGQPLFVYKLEQVSEKGKAYTNYFGRCNVAEHEKLILLAQLKPEKDSDEAVTYSLGKFGQRALDFYSIHVTKESTHPVKPLAQIAGNRYASHPVGKALSDACMGTIASFLSKYQDIIIEHQKVVKGNQKRLESLRELAGKENLEYPSVTLPPQPHTKEGVDAYNEVIARVRMWVNLNLWQKLKLSRDDAKPLLRLKGFPSFPLVERQANEVDWWDMVCNVKKLINEKKEDGKVFWQNLAGYKRQEALRPYLSSEEDREKGKKFARYQLGDLLLHLEKKHGEDWGKVYDEAWERIDKKVEGLSKHIKLEEERRSEDAQSKAALTDWLRAKASFVIEGLKEADKDEFCRCELKLQKWYGDLRGKPFAIEAENSILDISGFSKQYNCAFIWQKDGVKKLNLYLIINYFKGGKLRFKKIKPEAFEANRFYTVINKKSGEIVPMEVNFNFDDPNLIILPLAFGKRQGREFIWNDLLSLETGSLKLANGRVIEKTLYNRRTRQDEPALFVALTFERREVLDSSNIKPMNLIGVDRGENIPAVIALTDPEGCPLSRFKDSLGNPTHILRIGESYKEKQRTIQAKKEVEQRRAGGYSRKYASKAKNLADDMVRNTARDLLYYAVTQDAMLIFENLSRGFGRQGKRTFMAERQYTRMEDWLTAKLAYEGLPSKTYLSKTLAQYTSKTCSNCGFTITSADYDRVLEKLKKTATGWMTTINGKELKVEGQITYYNRYKRQNVVKDLSVELDRLSEESVNNDISSWTKGRSGEALSLLKKRFSHRPVQEKFVCLNCEFETHADEQAALNIARSWLFLRSQEYKKYQTNKTTGNTDKRAFVETWQSFYRKKLKEVWKPAV

SEQ ID NO: 47746 - protein, 978 aa, synthetic construct
  REGION 1..978: note = engineered CasX variant
QEIKRINKIRRRLVKDSNTKKAGKTGPMKTLLVRVMTPDLRERLENLRKKPENIPQPISNTSRANLNKLLTDYTEMKKAILHVYWEEFQKDPVGLMSRVAQPASKKIDQNKLKPEMDEKGNLTTAGFACSQCGQPLFVYKLEQVSEKGKAYTNYFGRCNVAEHEKLILLAQLKPEKDSDEAVTYSLGKFGQRALDFYSIHVTKESTHPVKPLAQIAGNRYASSPVGKALSDACMGTIASFLSKYQDIIIEHQKVVKGNQKRLESLRELAGKENLEYPSVTLPPQPHTKEGVDAYNEVIARVRMWVNLNLWQKLKLSRDDAKPLLRLKGFPSFPLVERQANEVDWWDMVCNVKKLINEKKEDGKVFWQNLAGYKRQEALRPYLSSEEDREKGKKFARYQLGDLLLHLEKKHGEDWGKVYDEAWERIDKKVEGLSKHIKLEEERRSEDAQSKAALTDWLRAKASFVIEGLKEADKDEFCRCELKLQKWYGDLRGKPFAIEAENSILDISGFSKQYNCAFIWQKDGVKKLNLYLIINYFKGGKLRFKKIKPEAFEANRFYTVINKKSGEIVPMEVNFNFDDPNLIILPLAFGKRQGREFIWNDLLSLETGSLKLANGRVIEKTLYNRRTRQDEPALFVALTFERREVLDSSNIKPMNLIGVDRGENIPAVIALTDPEGCPLSRFKDSLGNPTHILRIGESYKEKQRTIQAKKEVEQRRAGGYSRKYASKAKNLADDMVRNTARDLLYYAVTQDAMLIFENLSRGFGRQGKRTFMAERQYTRMEDWLTAKLAYEGLPSKTYLSKTLAQYTSKTCSNCGFTITSADYDRVLEKLKKTATGWMTTINGKELKVEGQITYYNRYKRQNVVKDLSVELDRLSEESVNNDISSWTKGRSGEALSLLKKRFSHRPVQEKFVCLNCEFETHADEQAALNIARSWLFLRSQEYKKYQTNKTTGNTDKRAFVETWQSFYRKKLKEVWKPAV

SEQ ID NO: 47747 - protein, 978 aa, synthetic construct
  REGION 1..978: note = engineered CasX variant
QEIKRINKIRRRLVKDSNTKKAGKTGPMKTLLVRVMTPDLRERLENLRKKPENIPQPISNTSRANLNKLLTDYTEMKKAILHVYWEEFQKDPVGLMSRVAQPASKKIDQNKLKPEMDEKGNLTTAGFACSQCGQPLFVYKLEQVSEKGKAYTNYFGRCNVAEHEKLILLAQLKPEKDSDEAVTYSLGKFGQRALDFYSIHVTKESTHPVKPLAQIAGNRYASTPVGKALSDACMGTIASFLSKYQDIIIEHQKVVKGNQKRLESLRELAGKENLEYPSVTLPPQPHTKEGVDAYNEVIARVRMWVNLNLWQKLKLSRDDAKPLLRLKGFPSFPLVERQANEVDWWDMVCNVKKLINEKKEDGKVFWQNLAGYKRQEALRPYLSSEEDREKGKKFARYQLGDLLLHLEKKHGEDWGKVYDEAWERIDKKVEGLSKHIKLEEERRSEDAQSKAALTDWLRAKASFVIEGLKEADKDEFCRCELKLQKWYGDLRGKPFAIEAENSILDISGFSKQYNCAFIWQKDGVKKLNLYLIINYFKGGKLRFKKIKPEAFEANRFYTVINKKSGEIVPMEVNFNFDDPNLIILPLAFGKRQGREFIWNDLLSLETGSLKLANGRVIEKTLYNRRTRQDEPALFVALTFERREVLDSSNIKPMNLIGVDRGENIPAVIALTDPEGCPLSRFKDSLGNPTHILRIGESYKEKQRTIQAKKEVEQRRAGGYSRKYASKAKNLADDMVRNTARDLLYYAVTQDAMLIFENLSRGFGRQGKRTFMAERQYTRMEDWLTAKLAYEGLPSKTYLSKTLAQYTSKTCSNCGFTITSADYDRVLEKLKKTATGWMTTINGKELKVEGQITYYNRYKRQNVVKDLSVELDRLSEESVNNDISSWTKGRSGEALSLLKKRFSHRPVQEKFVCLNCEFETHADEQAALNIARSWLFLRSQEYKKYQTNKTTGNTDKRAFVETWQSFYRKKLKEVWKPAV

SEQ ID NO: 47748 - protein, 978 aa, synthetic construct
  REGION 1..978: note = engineered CasX variant
QEIKRINKIRRRLVKDSNTKKAGKTGPMKTLLVRVMTPDLRERLENLRKKPENIPQPISNTSRANLNKLLTDYTEMKKAILHVYWEEFQKDPVGLMSRVAQPASKKIDQNKLKPEMDEKGNLTTAGFACSQCGQPLFVYKLEQVSEKGKAYTNYFGRCNVAEHEKLILLAQLKPEKDSDEAVTYSLGKFGQRALDFYSIHVTKESTHPVKPLAQIAGNRYASAPVGKALSDACMGTIASFLSKYQDIIIEHQKVVKGNQKRLESLRELAGKENLEYPSVTLPPQPHTKEGVDAYNEVIARVRMWVNLNLWQKLKLSRDDAKPLLRLKGFPSFPLVERQANEVDWWDMVCNVKKLINEKKEDGKVFWQNLAGYKRQEALRPYLSSEEDREKGKKFARYQLGDLLLHLEKKHGEDWGKVYDEAWERIDKKVEGLSKHIKLEEERRSEDAQSKAALTDWLRAKASFVIEGLKEADKDEFCRCELKLQKWYGDLRGKPFAIEAENSILDISGFSKQYNCAFIWQKDGVKKLNLYLIINYFKGGKLRFKKIKPEAFEANRFYTVINKKSGEIVPMEVNFNFDDPNLIILPLAFGKRQGREFIWNDLLSLETGSLKLANGRVIEKTLYNRRTRQDEPALFVALTFERREVLDSSNIKPMNLIGVDRGENIPAVIALTDPEGCPLSRFKDSLGNPTHILRIGESYKEKQRTIQAKKEVEQRRAGGYSRKYASKAKNLADDMVRNTARDLLYYAVTQDAMLIFENLSRGFGRQGKRTFMAERQYTRMEDWLTAKLAYEGLPSKTYLSKTLAQYTSKTCSNCGFTITSADYDRVLEKLKKTATGWMTTINGKELKVEGQITYYNRYKRQNVVKDLSVELDRLSEESVNNDISSWTKGRSGEALSLLKKRFSHRPVQEKFVCLNCEFETHADEQAALNIARSWLFLRSQEYKKYQTNKTTGNTDKRAFVETWQSFYRKKLKEVWKPAV

SEQ ID NO: 47749 - protein, 978 aa, synthetic construct
  REGION 1..978: note = engineered CasX variant
QEIKRINKIRRRLVKDSNTKKAGKTGPMKTLLVRVMTPDLRERLENLRKKPENIPQPISNTSRANLNKLLTDYTEMKKAILHVYWEEFQKDPVGLMSRVAQPASKKIDQNKLKPEMDEKGNLTTAGFACSQCGQPLFVYKLEQVSEKGKAYTNYFGRCNVAEHEKLILLAQLKPEKDSDEAVTYSLGKFGQRALDFYSIHVTKESTHPVKPLAQIAGNRYASVPVGKALSDACMGTIASFLSKYQDIIIEHQKVVKGNQKRLESLRELAGKENLEYPSVTLPPQPHTKEGVDAYNEVIARVRMWVNLNLWQKLKLSRDDAKPLLRLKGFPSFPLVERQANEVDWWDMVCNVKKLINEKKEDGKVFWQNLAGYKRQEALRPYLSSEEDREKGKKFARYQLGDLLLHLEKKHGEDWGKVYDEAWERIDKKVEGLSKHIKLEEERRSEDAQSKAALTDWLRAKASFVIEGLKEADKDEFCRCELKLQKWYGDLRGKPFAIEAENSILDISGFSKQYNCAFIWQKDGVKKLNLYLIINYFKGGKLRFKKIKPEAFEANRFYTVINKKSGEIVPMEVNFNFDDPNLIILPLAFGKRQGREFIWNDLLSLETGSLKLANGRVIEKTLYNRRTRQDEPALFVALTFERREVLDSSNIKPMNLIGVDRGENIPAVIALTDPEGCPLSRFKDSLGNPTHILRIGESYKEKQRTIQAKKEVEQRRAGGYSRKYASKAKNLADDMVRNTARDLLYYAVTQDAMLIFENLSRGFGRQGKRTFMAERQYTRMEDWLTAKLAYEGLPSKTYLSKTLAQYTSKTCSNCGFTITSADYDRVLEKLKKTATGWMTTINGKELKVEGQITYYNRYKRQNVVKDLSVELDRLSEESVNNDISSWTKGRSGEALSLLKKRFSHRPVQEKFVCLNCEFETHADEQAALNIARSWLFLRSQEYKKYQTNKTTGNTDKRAFVETWQSFYRKKLKEVWKPAV

SEQ ID NO: 47750 - protein, 978 aa, synthetic construct
  REGION 1..978: note = engineered CasX variant
QEIKRINKIRRRLVKDSNTKKAGKTGPMKTLLVRVMTPDLRERLENLRKKPENIPQPISNTSRANLNKLLTDYTEMKKAILHVYWEEFQKDPVGLMSRVAQPASKKIDQNKLKPEMDEKGNLTTAGFACSQCGQPLFVYKLEQVSEKGKAYTNYFGRCNVAEHEKLIKLAQLKPEKDSDEAVTYSLGKFGQRALDFYSIHVTKESTHPVKPLAQIAGNRYASGPVGKALSDACMGTIASFLSKYQDIIIEHQKVVKGNQKRLESLRELAGKENLEYPSVTLPPQPHTKEGVDAYNEVIARVRMWVNLNLWQKLKLSRDDAKPLLRLKGFPSFPLVERQANEVDWWDMVCNVKKLINEKKEDGKVFWQNLAGYKRQEALRPYLSSEEDREKGKKFARYQLGDLLLHLEKKHGEDWGKVYDEAWERIDKKVEGLSKHIKLEEERRSEDAQSKAALTDWLRAKASFVIEGLKEADKDEFCRCELKLQKWYGDLRGKPFAIEAENSILDISGFSKQYNCAFIWQKDGVKKLNLYLIINYFKGGKLRFKKIKPEAFEANRFYTVINKKSGEIVPMEVNFNFDDPNLIILPLAFGKRQGREFIWNDLLSLETGSLKLANGRVIEKTLYNRRTRQDEPALFVALTFERREVLDSSNIKPMNLIGVDRGENIPAVIALTDPEGCPLSRFKDSLGNPTHILRIGESYKEKQRTIQAKKEVEQRRAGGYSRKYASKAKNLADDMVRNTARDLLYYAVTQDAMLIFENLSRGFGRQGKRTFMAERQYTRMEDWLTAKLAYEGLPSKTYLSKTLAQYTSKTCSNCGFTITSADYDRVLEKLKKTATGWMTTINGKELKVEGQITYYNRYKRQNVVKDLSVELDRLSEESVNNDISSWTKGRSGEALSLLKKRFSHRPVQEKFVCLNCEFETHADEQAALNIARSWLFLRSQEYKKYQTNKTTGNTDKRAFVETWQSFYRKKLKEVWKPAV

SEQ ID NO: 47751 - protein, 977 aa, synthetic construct
  REGION 1..977: note = engineered CasX variant
QEIKRINKIRRRLVKDSNTKKAGKTGPMKTLLVRVMTPDLRERLENLRKKPENIPQPISNTSRANLNKLLTDYTEMKKAILHVYWEEFQKDPVGLMSRVAQPASKKIDQNKLKPEMDEKGNLTTAGFACSQCGQPLFVYKLEQVSEKGKAYTNYFGRCNVAEHEKLILLAQLKPEKDSDEAVTYSLGKFGQRALDFYSIHVTKESTHPVKPLAQIAGNRYASPVGKALSDACMGTIASFLSKYQDIIIEHQKVVKGNQKRLESLRELAGKENLEYPSVTLPPQPHTKEGVDAYNEVIARVRMWVNLNLWQKLKLSRDDAKPLLRLKGFPSFPLVERQANEVDWWDMVCNVKKLINEKKEDGKVFWQNLAGYKRQEALRPYLSSEEDREKGKKFARYQLGDLLLHLEKKHGEDWGKVYDEAWERIDKKVEGLSKHIKLEEERRSEDAQSKAALTDWLRAKASFVIEGLKEADKDEFCRCELKLQKWYGDLRGKPFAIEAENSILDISGFSKQYNCAFIWQKDGVKKLNLYLIINYFKGGKLRFKKIKPEAFEANRFYTVINKKSGEIVPMEVNFNFDDPNLIILPLAFGKRQGREFIWNDLLSLETGSLKLANGRVIEKTLYNRRTRQDEPALFVALTFERREVLDSSNIKPMNLIGVDRGENIPAVIALTDPEGCPLSRFKDSLGNPTHILRIGESYKEKQRTIQAKKEVEQRRAGGYSRKYASKAKNLADDMVRNTARDLLYYAVTQDAMLIFENLSRGFGRQGKRTFMAERQYTRMEDWLTAKLAYEGLPSKTYLSKTLAQYTSKTCSNCGFTITSADYDRVLEKLKKTATGWMTTINGKELKVEGQITYYNRYKRQNVVKDLSVELDRLSEESVNNDISSWTKGRSGEALSLLKKRFSHRPVQEKFVCLNCEFETHADEQAALNIARSWLFLRSQEYKKYQTNKTTGNTDKRAFVETWQSFYRKKLKEVWKPAV

SEQ ID NO: 47752 - protein, 978 aa, synthetic construct
  REGION 1..978: note = engineered CasX variant
QEIKRINKIRRRLVKDSNTKKAGKTGPMKTLLVRVMTPDLRERLENLRKKPENIPQPISNTSRANLNKLLTDYTEMKKAILHVYWEEFQKDPVGLMSRVAQPASKKIDQNKLKPEMDEKGNLTTAGFACSQCGQPLFVYKLEQVSEKGKAYTNYFGRCNVAEHEKLILLAQLKPEKDSDEAVTYSLGKFGQRALDFYSIHVTKESTHPVKPLAQIAGNRYASYPVGKALSDACMGTIASFLSKYQDIIIEHQKVVKGNQKRLESLRELAGKENLEYPSVTLPPQPHTKEGVDAYNEVIARVRMWVNLNLWQKLKLSRDDAKPLLRLKGFPSFPLVERQANEVDWWDMVCNVKKLINEKKEDGKVFWQNLAGYKRQEALRPYLSSEEDRKKGKKFARYQLGDLLLHLEKKHGEDWGKVYDEAWERIDKKVEGLSKHIKLEEERRSEDAQSKAALTDWLRAKASFVIEGLKEADKDEFCRCELKLQKWYGDLRGKPFAIEAENSILDISGFSKQYNCAFIWQKDGVKKLNLYLIINYFKGGKLRFKKIKPEAFEANRFYTVINKKSGEIVIMEVNFNFDDPNLIILPLAFGKRQGREFIWNDLLSLETGSLKLANGRVIEKTLYNRRTRQDEPALFVALTFERREVLDSSNIKPMNLIGVDRGENIPAVIALTDPEGCPLSRFKDSLGNPTHILRIGESYKEKQRTIQAKKEVEQRRAGGYSRKYASKAKNLADDMVRNTARDLLYYAVTQDAMLIFENLSRGFGRQGKRTFMAERQYTRMEDWLTAKLAYEGLPSKTYLSKTLAQYTSKTCSNCGFTITSADYDRVLEKLKKTATGWMTTINGKELKVEGQITYYNRYKRQNVVKDLSVELDRLSEESVNNDISSWTKGRSGEALSLLKKRFSHRPVQEKFVCLNCEFETHADEQAALNIARSWLFLRSQEYKKYQTNKTTGNTDKRAFVETWQSFYRKKLKEVWKPAV

SEQ ID NO: 47753 - protein, 978 aa, synthetic construct
  REGION 1..978: note = engineered CasX variant
QEIKRINKIRRRLVKDSNTKKAGKTGPMKTLLVRVMTPDLRERLENLRKKPENIPQPISNTSRANLNKLLTDYTEMKKAILHVYWEEFQKDPVGLMSRVAQPASKKIDQNKLKPEMDEKGNLTTAGFACSQCGQPLFVYKLEQVSEKGKAYTNYFGRCNVAEHEKLILLAQLKPEKDSDEAVTYSLGKFGQRALDFYSIHVTKESTHPVKPLAQIAGNRYASHPVGKALSDACMGTIASFLSKYQDIIIEHQKVVKGNQKRLESLRELAGKENLEYPSVTLPPQPHTKEGVDAYNEVIARVRMWVNLNLWQKLKLSRDDAKPLLRLKGFPSFPLVERQANEVDWWDMVCNVKKLINEKKEDGKVFWQNLAGYKRQEALRPYLSSEEDRKKGKKFARYQLGDLLLHLEKKHGEDWGKVYDEAWERIDKKVEGLSKHIKLEEERRSEDAQSKAALTDWLRAKASFVIEGLKEADKDEFCRCELKLQKWYGDLRGKPFAIEAENSILDISGFSKQYNCAFIWQKDGVKKLNLYLIINYFKGGKLRFKKIKPEAFEANRFYTVINKKSGEIVIMEVNFNFDDPNLIILPLAFGKRQGREFIWNDLLSLETGSLKLANGRVIEKTLYNRRTRQDEPALFVALTFERREVLDSSNIKPMNLIGVDRGENIPAVIALTDPEGCPLSRFKDSLGNPTHILRIGESYKEKQRTIQAKKEVEQRRAGGYSRKYASKAKNLADDMVRNTARDLLYYAVTQDAMLIFENLSRGFGRQGKRTFMAERQYTRMEDWLTAKLAYEGLPSKTYLSKTLAQYTSKTCSNCGFTITSADYDRVLEKLKKTATGWMTTINGKELKVEGQITYYNRYKRQNVVKDLSVELDRLSEESVNNDISSWTKGRSGEALSLLKKRFSHRPVQEKFVCLNCEFETHADEQAALNIARSWLFLRSQEYKKYQTNKTTGNTDKRAFVETWQSFYRKKLKEVWKPAV

SEQ ID NO: 47754 - protein, 978 aa, synthetic construct
  REGION 1..978: note = engineered CasX variant
QEIKRINKIRRRLVKDSNTKKAGKTGPMKTLLVRVMTPDLRERLENLRKKPENIPQPISNTSRANLNKLLTDYTEMKKAILHVYWEEFQKDPVGLMSRVAQPASKKIDQNKLKPEMDEKGNLTTAGFACSQCGQPLFVYKLEQVSEKGKAYTNYFGRCNVAEHEKLILLAQLKPEKDSDEAVTYSLGKFGQRALDFYSIHVTKESTHPVKPLAQIAGNRYASSPVGKALSDACMGTIASFLSKYQDIIIEHQKVVKGNQKRLESLRELAGKENLEYPSVTLPPQPHTKEGVDAYNEVIARVRMWVNLNLWQKLKLSRDDAKPLLRLKGFPSFPLVERQANEVDWWDMVCNVKKLINEKKEDGKVFWQNLAGYKRQEALRPYLSSEEDRKKGKKFARYQLGDLLLHLEKKHGEDWGKVYDEAWERIDKKVEGLSKHIKLEEERRSEDAQSKAALTDWLRAKASFVIEGLKEADKDEFCRCELKLQKWYGDLRGKPFAIEAENSILDISGFSKQYNCAFIWQKDGVKKLNLYLIINYFKGGKLRFKKIKPEAFEANRFYTVINKKSGEIVIMEVNFNFDDPNLIILPLAFGKRQGREFIWNDLLSLETGSLKLANGRVIEKTLYNRRTRQDEPALFVALTFERREVLDSSNIKPMNLIGVDRGENIPAVIALTDPEGCPLSRFKDSLGNPTHILRIGESYKEKQRTIQAKKEVEQRRAGGYSRKYASKAKNLADDMVRNTARDLLYYAVTQDAMLIFENLSRGFGRQGKRTFMAERQYTRMEDWLTAKLAYEGLPSKTYLSKTLAQYTSKTCSNCGFTITSADYDRVLEKLKKTATGWMTTINGKELKVEGQITYYNRYKRQNVVKDLSVELDRLSEESVNNDISSWTKGRSGEALSLLKKRFSHRPVQEKFVCLNCEFETHADEQAALNIARSWLFLRSQEYKKYQTNKTTGNTDKRAFVETWQSFYRKKLKEVWKPAV

SEQ ID NO: 47755 - protein, 978 aa, synthetic construct
  REGION 1..978: note = engineered CasX variant
QEIKRINKIRRRLVKDSNTKKAGKTGPMKTLLVRVMTPDLRERLENLRKKPENIPQPISNTSRANLNKLLTDYTEMKKAILHVYWEEFQKDPVGLMSRVAQPASKKIDQNKLKPEMDEKGNLTTAGFACSQCGQPLFVYKLEQVSEKGKAYTNYFGRCNVAEHEKLILLAQLKPEKDSDEAVTYSLGKFGQRALDFYSIHVTKESTHPVKPLAQIAGNRYASTPVGKALSDACMGTIASFLSKYQDIIIEHQKVVKGNQKRLESLRELAGKENLEYPSVTLPPQPHTKEGVDAYNEVIARVRMWVNLNLWQKLKLSRDDAKPLLRLKGFPSFPLVERQANEVDWWDMVCNVKKLINEKKEDGKVFWQNLAGYKRQEALRPYLSSEEDRKKGKKFARYQLGDLLLHLEKKHGEDWGKVYDEAWERIDKKVEGLSKHIKLEEERRSEDAQSKAALTDWLRAKASFVIEGLKEADKDEFCRCELKLQKWYGDLRGKPFAIEAENSILDISGFSKQYNCAFIWQKDGVKKLNLYLIINYFKGGKLRFKKIKPEAFEANRFYTVINKKSGEIVIMEVNFNFDDPNLIILPLAFGKRQGREFIWNDLLSLETGSLKLANGRVIEKTLYNRRTRQDEPALFVALTFERREVLDSSNIKPMNLIGVDRGENIPAVIALTDPEGCPLSRFKDSLGNPTHILRIGESYKEKQRTIQAKKEVEQRRAGGYSRKYASKAKNLADDMVRNTARDLLYYAVTQDAMLIFENLSRGFGRQGKRTFMAERQYTRMEDWLTAKLAYEGLPSKTYLSKTLAQYTSKTCSNCGFTITSADYDRVLEKLKKTATGWMTTINGKELKVEGQITYYNRYKRQNVVKDLSVELDRLSEESVNNDISSWTKGRSGEALSLLKKRFSHRPVQEKFVCLNCEFETHADEQAALNIARSWLFLRSQEYKKYQTNKTTGNTDKRAFVETWQSFYRKKLKEVWKPAV

SEQ ID NO: 47756 - protein, 978 aa, synthetic construct
  REGION 1..978: note = engineered CasX variant
QEIKRINKIRRRLVKDSNTKKAGKTGPMKTLLVRVMTPDLRERLENLRKKPENIPQPISNTSRANLNKLLTDYTEMKKAILHVYWEEFQKDPVGLMSRVAQPASKKIDQNKLKPEMDEKGNLTTAGFACSQCGQPLFVYKLEQVSEKGKAYTNYFGRCNVAEHEKLILLAQLKPEKDSDEAVTYSLGKFGQRALDFYSIHVTKESTHPVKPLAQIAGNRYASAPVGKALSDACMGTIASFLSKYQDIIIEHQKVVKGNQKRLESLRELAGKENLEYPSVTLPPQPHTKEGVDAYNEVIARVRMWVNLNLWQKLKLSRDDAKPLLRLKGFPSFPLVERQANEVDWWDMVCNVKKLINEKKEDGKVFWQNLAGYKRQEALRPYLSSEEDRKKGKKFARYQLGDLLLHLEKKHGEDWGKVYDEAWERIDKKVEGLSKHIKLEEERRSEDAQSKAALTDWLRAKASFVIEGLKEADKDEFCRCELKLQKWYGDLRGKPFAIEAENSILDISGFSKQYNCAFIWQKDGVKKLNLYLIINYFKGGKLRFKKIKPEAFEANRFYTVINKKSGEIVIMEVNFNFDDPNLIILPLAFGKRQGREFIWNDLLSLETGSLKLANGRVIEKTLYNRRTRQDEPALFVALTFERREVLDSSNIKPMNLIGVDRGENIPAVIALTDPEGCPLSRFKDSLGNPTHILRIGESYKEKQRTIQAKKEVEQRRAGGYSRKYASKAKNLADDMVRNTARDLLYYAVTQDAMLIFENLSRGFGRQGKRTFMAERQYTRMEDWLTAKLAYEGLPSKTYLSKTLAQYTSKTCSNCGFTITSADYDRVLEKLKKTATGWMTTINGKELKVEGQITYYNRYKRQNVVKDLSVELDRLSEESVNNDISSWTKGRSGEALSLLKKRFSHRPVQEKFVCLNCEFETHADEQAALNIARSWLFLRSQEYKKYQTNKTTGNTDKRAFVETWQSFYRKKLKEVWKPAV

SEQ ID NO: 47757 - protein, 978 aa, synthetic construct
  REGION 1..978: note = engineered CasX variant
QEIKRINKIRRRLVKDSNTKKAGKTGPMKTLLVRVMTPDLRERLENLRKKPENIPQPISNTSRANLNKLLTDYTEMKKAILHVYWEEFQKDPVGLMSRVAQPASKKIDQNKLKPEMDEKGNLTTAGFACSQCGQPLFVYKLEQVSEKGKAYTNYFGRCNVAEHEKLILLAQLKPEKDSDEAVTYSLGKFGQRALDFYSIHVTKESTHPVKPLAQIAGNRYASVPVGKALSDACMGTIASFLSKYQDIIIEHQKVVKGNQKRLESLRELAGKENLEYPSVTLPPQPHTKEGVDAYNEVIARVRMWVNLNLWQKLKLSRDDAKPLLRLKGFPSFPLVERQANEVDWWDMVCNVKKLINEKKEDGKVFWQNLAGYKRQEALRPYLSSEEDRKKGKKFARYQLGDLLLHLEKKHGEDWGKVYDEAWERIDKKVEGLSKHIKLEEERRSEDAQSKAALTDWLRAKASFVIEGLKEADKDEFCRCELKLQKWYGDLRGKPFAIEAENSILDISGFSKQYNCAFIWQKDGVKKLNLYLIINYFKGGKLRFKKIKPEAFEANRFYTVINKKSGEIVIMEVNFNFDDPNLIILPLAFGKRQGREFIWNDLLSLETGSLKLANGRVIEKTLYNRRTRQDEPALFVALTFERREVLDSSNIKPMNLIGVDRGENIPAVIALTDPEGCPLSRFKDSLGNPTHILRIGESYKEKQRTIQAKKEVEQRRAGGYSRKYASKAKNLADDMVRNTARDLLYYAVTQDAMLIFENLSRGFGRQGKRTFMAERQYTRMEDWLTAKLAYEGLPSKTYLSKTLAQYTSKTCSNCGFTITSADYDRVLEKLKKTATGWMTTINGKELKVEGQITYYNRYKRQNVVKDLSVELDRLSEESVNNDISSWTKGRSGEALSLLKKRFSHRPVQEKFVCLNCEFETHADEQAALNIARSWLFLRSQEYKKYQTNKTTGNTDKRAFVETWQSFYRKKLKEVWKPAV

SEQ ID NO: 47758 - protein, 978 aa, synthetic construct
  REGION 1..978: note = engineered CasX variant
QEIKRINKIRRRLVKDSNTKKAGKTGPMKTLLVRVMTPDLRERLENLRKKPENIPQPISNTSRANLNKLLTDYTEMKKAILHVYWEEFQKDPVGLMSRVAQPASKKIDQNKLKPEMDEKGNLTTAGFACSQCGQPLFVYKLEQVSEKGKAYTNYFGRCNVAEHEKLIKLAQLKPEKDSDEAVTYSLGKFGQRALDFYSIHVTKESTHPVKPLAQIAGNRYASGPVGKALSDACMGTIASFLSKYQDIIIEHQKVVKGNQKRLESLRELAGKENLEYPSVTLPPQPHTKEGVDAYNEVIARVRMWVNLNLWQKLKLSRDDAKPLLRLKGFPSFPLVERQANEVDWWDMVCNVKKLINEKKEDGKVFWQNLAGYKRQEALRPYLSSEEDRKKGKKFARYQLGDLLLHLEKKHGEDWGKVYDEAWERIDKKVEGLSKHIKLEEERRSEDAQSKAALTDWLRAKASFVIEGLKEADKDEFCRCELKLQKWYGDLRGKPFAIEAENSILDISGFSKQYNCAFIWQKDGVKKLNLYLIINYFKGGKLRFKKIKPEAFEANRFYTVINKKSGEIVIMEVNFNFDDPNLIILPLAFGKRQGREFIWNDLLSLETGSLKLANGRVIEKTLYNRRTRQDEPALFVALTFERREVLDSSNIKPMNLIGVDRGENIPAVIALTDPEGCPLSRFKDSLGNPTHILRIGESYKEKQRTIQAKKEVEQRRAGGYSRKYASKAKNLADDMVRNTARDLLYYAVTQDAMLIFENLSRGFGRQGKRTFMAERQYTRMEDWLTAKLAYEGLPSKTYLSKTLAQYTSKTCSNCGFTITSADYDRVLEKLKKTATGWMTTINGKELKVEGQITYYNRYKRQNVVKDLSVELDRLSEESVNNDISSWTKGRSGEALSLLKKRFSHRPVQEKFVCLNCEFETHADEQAALNIARSWLFLRSQEYKKYQTNKTTGNTDKRAFVETWQSFYRKKLKEVWKPAV

SEQ ID NO: 47759 - protein, 977 aa, synthetic construct
  REGION 1..977: note = engineered CasX variant
QEIKRINKIRRRLVKDSNTKKAGKTGPMKTLLVRVMTPDLRERLENLRKKPENIPQPISNTSRANLNKLLTDYTEMKKAILHVYWEEFQKDPVGLMSRVAQPASKKIDQNKLKPEMDEKGNLTTAGFACSQCGQPLFVYKLEQVSEKGKAYTNYFGRCNVAEHEKLILLAQLKPEKDSDEAVTYSLGKFGQRALDFYSIHVTKESTHPVKPLAQIAGNRYASPVGKALSDACMGTIASFLSKYQDIIIEHQKVVKGNQKRLESLRELAGKENLEYPSVTLPPQPHTKEGVDAYNEVIARVRMWVNLNLWQKLKLSRDDAKPLLRLKGFPSFPLVERQANEVDWWDMVCNVKKLINEKKEDGKVFWQNLAGYKRQEALRPYLSSEEDRKKGKKFARYQLGDLLLHLEKKHGEDWGKVYDEAWERIDKKVEGLSKHIKLEEERRSEDAQSKAALTDWLRAKASFVIEGLKEADKDEFCRCELKLQKWYGDLRGKPFAIEAENSILDISGFSKQYNCAFIWQKDGVKKLNLYLIINYFKGGKLRFKKIKPEAFEANRFYTVINKKSGEIVIMEVNFNFDDPNLIILPLAFGKRQGREFIWNDLLSLETGSLKLANGRVIEKTLYNRRTRQDEPALFVALTFERREVLDSSNIKPMNLIGVDRGENIPAVIALTDPEGCPLSRFKDSLGNPTHILRIGESYKEKQRTIQAKKEVEQRRAGGYSRKYASKAKNLADDMVRNTARDLLYYAVTQDAMLIFENLSRGFGRQGKRTFMAERQYTRMEDWLTAKLAYEGLPSKTYLSKTLAQYTSKTCSNCGFTITSADYDRVLEKLKKTATGWMTTINGKELKVEGQITYYNRYKRQNVVKDLSVELDRLSEESVNNDISSWTKGRSGEALSLLKKRFSHRPVQEKFVCLNCEFETHADEQAALNIARSWLFLRSQEYKKYQTNKTTGNTDKRAFVETWQSFYRKKLKEVWKPAV

SEQ ID NO: 47760 - protein, 979 aa, synthetic construct
  REGION 1..979: note = engineered CasX variant
QEIKRINKIRRRLVKDSNTKKAGKTGPMKTLLVRVMTPDLRERLENLRKKPENIPQPISNTSRANLNKLLTDYTEMKKAILHVYWEEFQKDPVGLMSRVAQPASKKIDQNKLKPEMDEKGNLTTAGFACSQCGQPLFVYKLEQVSEKGKAYTNYFGRCNVAEHEKLILLAQLKPEKDSDEAVTYSLGKFGQRALDFYSIHVTKESTHPVKPLAQIAGNRYASYPVGKALSGACMGTIASFLSKYQDIIIEHQKVVKGNQKRLESLRELAGKENLEYPSVTLPPQPHTKEGVDAYNEVIARVRMWVNLNLWQKLKLSRDDAKPLLRLKGFPSFPLVERQANEVDWWDMVCNVKKLINEKKEDGKVFWQNLAGYKRQEALRPYLSSEEDRKKGKKFARYQLGDLLLHLEKKHGEDWGKVYDEAWERIDKKVEGLSKHIKLEEERRSEDAQSKAALTDWLRAKASFVIEGLKEADKDEFCRCELKLQKWYGDLRGKPFAIEAENSILDISGFSKQYNCAFIWQKDGVKKLNLYLIINYFKGGKLRFKKIKPEAFEANRFYTVINKKSGEIVPMEVNFNFDDPNLIILPLAFGKRQGREFIWNDLLSLETGSLKLANGRVIEKTLYNRRTRQDEPALFVALTFERREVLDSSNIKPMNLIGVDRGENIPAVIALTDPEGCPLSRFKDSLGNPTHILRIGESYKEKQRTIQAKKEVEQRRAGGYSRKYASKAKNLADDMVRNTARDLLYYAVTQDAMLIFENLSRGFGRQGKRTFMAERQYTRMEDWLTAKLAYEGLPSKTYLSKTLAQYTSKTCSNCGFTITSADYDRVLEKLKKTATGWMTTINGKELKVEGQITYYNRYKRQNVVKDLSVELDRLSEESVNNDISSWTKGRSGEALSLLKKRFSHRPVQEKFVCLNCGFETHADEQAALNIARSWLFLRSQEYKKYQTNKTSTGNTDKRAFVETWQSFYRKKLKEVWKPAV

SEQ ID NO: 47761 - protein, 979 aa, synthetic construct
  REGION 1..979: note = engineered CasX variant
QEIKRINKIRRRLVKDSNTKKAGKTGPMKTLLVRVMTPDLRERLENLRKKPENIPQPISNTSRANLNKLLTDYTEMKKAILHVYWEEFQKDPVGLMSRVAQPASKKIDQNKLKPEMDEKGNLTTAGFACSQCGQPLFVYKLEQVSEKGKAYTNYFGRCNVAEHEKLILLAQLKPEKDSDEAVTYSLGKFGQRALDFYSIHVTKESTHPVKPLAQIAGNRYASHPVGKALSGACMGTIASFLSKYQDIIIEHQKVVKGNQKRLESLRELAGKENLEYPSVTLPPQPHTKEGVDAYNEVIARVRMWVNLNLWQKLKLSRDDAKPLLRLKGFPSFPLVERQANEVDWWDMVCNVKKLINEKKEDGKVFWQNLAGYKRQEALRPYLSSEEDRKKGKKFARYQLGDLLLHLEKKHGEDWGKVYDEAWERIDKKVEGLSKHIKLEEERRSEDAQSKAALTDWLRAKASFVIEGLKEADKDEFCRCELKLQKWYGDLRGKPFAIEAENSILDISGFSKQYNCAFIWQKDGVKKLNLYLIINYFKGGKLRFKKIKPEAFEANRFYTVINKKSGEIVPMEVNFNFDDPNLIILPLAFGKRQGREFIWNDLLSLETGSLKLANGRVIEKTLYNRRTRQDEPALFVALTFERREVLDSSNIKPMNLIGVDRGENIPAVIALTDPEGCPLSRFKDSLGNPTHILRIGESYKEKQRTIQAKKEVEQRRAGGYSRKYASKAKNLADDMVRNTARDLLYYAVTQDAMLIFENLSRGFGRQGKRTFMAERQYTRMEDWLTAKLAYEGLPSKTYLSKTLAQYTSKTCSNCGFTITSADYDRVLEKLKKTATGWMTTINGKELKVEGQITYYNRYKRQNVVKDLSVELDRLSEESVNNDISSWTKGRSGEALSLLKKRFSHRPVQEKFVCLNCGFETHADEQAALNIARSWLFLRSQEYKKYQTNKTSTGNTDKRAFVETWQSFYRKKLKEVWKPAV

SEQ ID NO: 47762 - protein, 979 aa, synthetic construct
  REGION 1..979: note = engineered CasX variant
QEIKRINKIRRRLVKDSNTKKAGKTGPMKTLLVRVMTPDLRERLENLRKKPENIPQPISNTSRANLNKLLTDYTEMKKAILHVYWEEFQKDPVGLMSRVAQPASKKIDQNKLKPEMDEKGNLTTAGFACSQCGQPLFVYKLEQVSEKGKAYTNYFGRCNVAEHEKLILLAQLKPEKDSDEAVTYSLGKFGQRALDFYSIHVTKESTHPVKPLAQIAGNRYASSPVGKALSGACMGTIASFLSKYQDIIIEHQKVVKGNQKRLESLRELAGKENLEYPSVTLPPQPHTKEGVDAYNEVIARVRMWVNLNLWQKLKLSRDDAKPLLRLKGFPSFPLVERQANEVDWWDMVCNVKKLINEKKEDGKVFWQNLAGYKRQEALRPYLSSEEDRKKGKKFARYQLGDLLLHLEKKHGEDWGKVYDEAWERIDKKVEGLSKHIKLEEERRSEDAQSKAALTDWLRAKASFVIEGLKEADKDEFCRCELKLQKWYGDLRGKPFAIEAENSILDISGFSKQYNCAFIWQKDGVKKLNLYLIINYFKGGKLRFKKIKPEAFEANRFYTVINKKSGEIVPMEVNFNFDDPNLIILPLAFGKRQGREFIWNDLLSLETGSLKLANGRVIEKTLYNRRTRQDEPALFVALTFERREVLDSSNIKPMNLIGVDRGENIPAVIALTDPEGCPLSRFKDSLGNPTHILRIGESYKEKQRTIQAKKEVEQRRAGGYSRKYASKAKNLADDMVRNTARDLLYYAVTQDAMLIFENLSRGFGRQGKRTFMAERQYTRMEDWLTAKLAYEGLPSKTYLSKTLAQYTSKTCSNCGFTITSADYDRVLEKLKKTATGWMTTINGKELKVEGQITYYNRYKRQNVVKDLSVELDRLSEESVNNDISSWTKGRSGEALSLLKKRFSHRPVQEKFVCLNCGFETHADEQAALNIARSWLFLRSQEYKKYQTNKTSTGNTDKRAFVETWQSFYRKKLKEVWKPAV

SEQ ID NO: 47763 - protein, 979 aa, synthetic construct
  REGION 1..979: note = engineered CasX variant
QEIKRINKIRRRLVKDSNTKKAGKTGPMKTLLVRVMTPDLRERLENLRKKPENIPQPISNTSRANLNKLLTDYTEMKKAILHVYWEEFQKDPVGLMSRVAQPASKKIDQNKLKPEMDEKGNLTTAGFACSQCGQPLFVYKLEQVSEKGKAYTNYFGRCNVAEHEKLILLAQLKPEKDSDEAVTYSLGKFGQRALDFYSIHVTKESTHPVKPLAQIAGNRYASTPVGKALSGACMGTIASFLSKYQDIIIEHQKVVKGNQKRLESLRELAGKENLEYPSVTLPPQPHTKEGVDAYNEVIARVRMWVNLNLWQKLKLSRDDAKPLLRLKGFPSFPLVERQANEVDWWDMVCNVKKLINEKKEDGKVFWQNLAGYKRQEALRPYLSSEEDRKKGKKFARYQLGDLLLHLEKKHGEDWGKVYDEAWERIDKKVEGLSKHIKLEEERRSEDAQSKAALTDWLRAKASFVIEGLKEADKDEFCRCELKLQKWYGDLRGKPFAIEAENSILDISGFSKQYNCAFIWQKDGVKKLNLYLIINYFKGGKLRFKKIKPEAFEANRFYTVINKKSGEIVPMEVNFNFDDPNLIILPLAFGKRQGREFIWNDLLSLETGSLKLANGRVIEKTLYNRRTRQDEPALFVALTFERREVLDSSNIKPMNLIGVDRGENIPAVIALTDPEGCPLSRFKDSLGNPTHILRIGESYKEKQRTIQAKKEVEQRRAGGYSRKYASKAKNLADDMVRNTARDLLYYAVTQDAMLIFENLSRGFGRQGKRTFMAERQYTRMEDWLTAKLAYEGLPSKTYLSKTLAQYTSKTCSNCGFTITSADYDRVLEKLKKTATGWMTTINGKELKVEGQITYYNRYKRQNVVKDLSVELDRLSEESVNNDISSWTKGRSGEALSLLKKRFSHRPVQEKFVCLNCGFETHADEQAALNIARSWLFLRSQEYKKYQTNKTSTGNTDKRAFVETWQSFYRKKLKEVWKPAV

SEQ ID NO: 47764 - protein, 979 aa, synthetic construct
  REGION 1..979: note = engineered CasX variant
QEIKRINKIRRRLVKDSNTKKAGKTGPMKTLLVRVMTPDLRERLENLRKKPENIPQPISNTSRANLNKLLTDYTEMKKAILHVYWEEFQKDPVGLMSRVAQPASKKIDQNKLKPEMDEKGNLTTAGFACSQCGQPLFVYKLEQVSEKGKAYTNYFGRCNVAEHEKLILLAQLKPEKDSDEAVTYSLGKFGQRALDFYSIHVTKESTHPVKPLAQIAGNRYASAPVGKALSGACMGTIASFLSKYQDIIIEHQKVVKGNQKRLESLRELAGKENLEYPSVTLPPQPHTKEGVDAYNEVIARVRMWVNLNLWQKLKLSRDDAKPLLRLKGFPSFPLVERQANEVDWWDMVCNVKKLINEKKEDGKVFWQNLAGYKRQEALRPYLSSEEDRKKGKKFARYQLGDLLLHLEKKHGEDWGKVYDEAWERIDKKVEGLSKHIKLEEERRSEDAQSKAALTDWLRAKASFVIEGLKEADKDEFCRCELKLQKWYGDLRGKPFAIEAENSILDISGFSKQYNCAFIWQKDGVKKLNLYLIINYFKGGKLRFKKIKPEAFEANRFYTVINKKSGEIVPMEVNFNFDDPNLIILPLAFGKRQGREFIWNDLLSLETGSLKLANGRVIEKTLYNRRTRQDEPALFVALTFERREVLDSSNIKPMNLIGVDRGENIPAVIALTDPEGCPLSRFKDSLGNPTHILRIGESYKEKQRTIQAKKEVEQRRAGGYSRKYASKAKNLADDMVRNTARDLLYYAVTQDAMLIFENLSRGFGRQGKRTFMAERQYTRMEDWLTAKLAYEGLPSKTYLSKTLAQYTSKTCSNCGFTITSADYDRVLEKLKKTATGWMTTINGKELKVEGQITYYNRYKRQNVVKDLSVELDRLSEESVNNDISSWTKGRSGEALSLLKKRFSHRPVQEKFVCLNCGFETHADEQAALNIARSWLFLRSQEYKKYQTNKTSTGNTDKRAFVETWQSFYRKKLKEVWKPAV

SEQ ID NO: 47765 - protein, 979 aa, synthetic construct
  REGION 1..979: note = engineered CasX variant
QEIKRINKIRRRLVKDSNTKKAGKTGPMKTLLVRVMTPDLRERLENLRKKPENIPQPISNTSRANLNKLLTDYTEMKKAILHVYWEEFQKDPVGLMSRVAQPASKKIDQNKLKPEMDEKGNLTTAGFACSQCGQPLFVYKLEQVSEKGKAYTNYFGRCNVAEHEKLILLAQLKPEKDSDEAVTYSLGKFGQRALDFYSIHVTKESTHPVKPLAQIAGNRYASVPVGKALSGACMGTIASFLSKYQDIIIEHQKVVKGNQKRLESLRELAGKENLEYPSVTLPPQPHTKEGVDAYNEVIARVRMWVNLNLWQKLKLSRDDAKPLLRLKGFPSFPLVERQANEVDWWDMVCNVKKLINEKKEDGKVFWQNLAGYKRQEALRPYLSSEEDRKKGKKFARYQLGDLLLHLEKKHGEDWGKVYDEAWERIDKKVEGLSKHIKLEEERRSEDAQSKAALTDWLRAKASFVIEGLKEADKDEFCRCELKLQKWYGDLRGKPFAIEAENSILDISGFSKQYNCAFIWQKDGVKKLNLYLIINYFKGGKLRFKKIKPEAFEANRFYTVINKKSGEIVPMEVNFNFDDPNLIILPLAFGKRQGREFIWNDLLSLETGSLKLANGRVIEKTLYNRRTRQDEPALFVALTFERREVLDSSNIKPMNLIGVDRGENIPAVIALTDPEGCPLSRFKDSLGNPTHILRIGESYKEKQRTIQAKKEVEQRRAGGYSRKYASKAKNLADDMVRNTARDLLYYAVTQDAMLIFENLSRGFGRQGKRTFMAERQYTRMEDWLTAKLAYEGLPSKTYLSKTLAQYTSKTCSNCGFTITSADYDRVLEKLKKTATGWMTTINGKELKVEGQITYYNRYKRQNVVKDLSVELDRLSEESVNNDISSWTKGRSGEALSLLKKRFSHRPVQEKFVCLNCGFETHADEQAALNIARSWLFLRSQEYKKYQTNKTSTGNTDKRAFVETWQSFYRKKLKEVWKPAV

SEQ ID NO: 47766 - protein, 979 aa, synthetic construct
  REGION 1..979: note = engineered CasX variant
QEIKRINKIRRRLVKDSNTKKAGKTGPMKTLLVRVMTPDLRERLENLRKKPENIPQPISNTSRANLNKLLTDYTEMKKAILHVYWEEFQKDPVGLMSRVAQPASKKIDQNKLKPEMDEKGNLTTAGFACSQCGQPLFVYKLEQVSEKGKAYTNYFGRCNVAEHEKLIKLAQLKPEKDSDEAVTYSLGKFGQRALDFYSIHVTKESTHPVKPLAQIAGNRYASGPVGKALSGACMGTIASFLSKYQDIIIEHQKVVKGNQKRLESLRELAGKENLEYPSVTLPPQPHTKEGVDAYNEVIARVRMWVNLNLWQKLKLSRDDAKPLLRLKGFPSFPLVERQANEVDWWDMVCNVKKLINEKKEDGKVFWQNLAGYKRQEALRPYLSSEEDRKKGKKFARYQLGDLLLHLEKKHGEDWGKVYDEAWERIDKKVEGLSKHIKLEEERRSEDAQSKAALTDWLRAKASFVIEGLKEADKDEFCRCELKLQKWYGDLRGKPFAIEAENSILDISGFSKQYNCAFIWQKDGVKKLNLYLIINYFKGGKLRFKKIKPEAFEANRFYTVINKKSGEIVPMEVNFNFDDPNLIILPLAFGKRQGREFIWNDLLSLETGSLKLANGRVIEKTLYNRRTRQDEPALFVALTFERREVLDSSNIKPMNLIGVDRGENIPAVIALTDPEGCPLSRFKDSLGNPTHILRIGESYKEKQRTIQAKKEVEQRRAGGYSRKYASKAKNLADDMVRNTARDLLYYAVTQDAMLIFENLSRGFGRQGKRTFMAERQYTRMEDWLTAKLAYEGLPSKTYLSKTLAQYTSKTCSNCGFTITSADYDRVLEKLKKTATGWMTTINGKELKVEGQITYYNRYKRQNVVKDLSVELDRLSEESVNNDISSWTKGRSGEALSLLKKRFSHRPVQEKFVCLNCGFETHADEQAALNIARSWLFLRSQEYKKYQTNKTSTGNTDKRAFVETWQSFYRKKLKEVWKPAV

SEQ ID NO: 47767 - protein, 978 aa, synthetic construct
  REGION 1..978: note = engineered CasX variant
QEIKRINKIRRRLVKDSNTKKAGKTGPMKTLLVRVMTPDLRERLENLRKKPENIPQPISNTSRANLNKLLTDYTEMKKAILHVYWEEFQKDPVGLMSRVAQPASKKIDQNKLKPEMDEKGNLTTAGFACSQCGQPLFVYKLEQVSEKGKAYTNYFGRCNVAEHEKLILLAQLKPEKDSDEAVTYSLGKFGQRALDFYSIHVTKESTHPVKPLAQIAGNRYASPVGKALSGACMGTIASFLSKYQDIIIEHQKVVKGNQKRLESLRELAGKENLEYPSVTLPPQPHTKEGVDAYNEVIARVRMWVNLNLWQKLKLSRDDAKPLLRLKGFPSFPLVERQANEVDWWDMVCNVKKLINEKKEDGKVFWQNLAGYKRQEALRPYLSSEEDRKKGKKFARYQLGDLLLHLEKKHGEDWGKVYDEAWERIDKKVEGLSKHIKLEEERRSEDAQSKAALTDWLRAKASFVIEGLKEADKDEFCRCELKLQKWYGDLRGKPFAIEAENSILDISGFSKQYNCAFIWQKDGVKKLNLYLIINYFKGGKLRFKKIKPEAFEANRFYTVINKKSGEIVPMEVNFNFDDPNLIILPLAFGKRQGREFIWNDLLSLETGSLKLANGRVIEKTLYNRRTRQDEPALFVALTFERREVLDSSNIKPMNLIGVDRGENIPAVIALTDPEGCPLSRFKDSLGNPTHILRIGESYKEKQRTIQAKKEVEQRRAGGYSRKYASKAKNLADDMVRNTARDLLYYAVTQDAMLIFENLSRGFGRQGKRTFMAERQYTRMEDWLTAKLAYEGLPSKTYLSKTLAQYTSKTCSNCGFTITSADYDRVLEKLKKTATGWMTTINGKELKVEGQITYYNRYKRQNVVKDLSVELDRLSEESVNNDISSWTKGRSGEALSLLKKRFSHRPVQEKFVCLNCGFETHADEQAALNIARSWLFLRSQEYKKYQTNKTSTGNTDKRAFVETWQSFYRKKLKEVWKPAV

SEQ ID NO: 47768 - protein, 979 aa, synthetic construct
  REGION 1..979: note = engineered CasX variant
QEIKRINKIRRRLVKDSNTKKAGKTGPMKTLLVRVMTPDLRERLENLRKKPENIPQPISNTSRANLNKLLTDYTEMKKAILHVYWEEFQKDPVGLMSRVAQPASKKIDQNKLKPEMDEKGNLTTAGFACSQCGQPLFVYKLEQVSEKGKAYTNYFGRCNVAEHEKLILLAQLKPEKDSDEAVTYSLGKFGQRALDFYSIHVTKESTHPVKPLAQIAGNRYASYPVGKALSDACMGTIASFLSKYQDIIIEHQKVVKGNQKRLESLRELAGKENLEYPSVTLPPQPHTKEGVDAYNEVIARVRMWVNLNLWQKLKLSRDDAKPLLRLKNFPSFPLVERQANEVDWWDMVCNVKKLINEKKEDGKVFWQNLAGYKRQEALRPYLSSEEDRKKGKKFARYQLGDLLLHLEKKHGEDWGKVYDEAWERIDKKVEGLSKHIKLEEERRSEDAQSKAALTDWLRAKASFVIEGLKEADKDEFCRCELKLQKWYGDLRGKPFAIEAENSILDISGFSKQYNCAFIWQKDGVKKLNLYLIINYFKGGKLRFKKIKPEAFEANRFYTVINKKSGEIVPMEVNFNFDDPNLIILPLAFGKRQGREFIWNDLLSLETGSLKLANGRVIEKTLYNRRTRQDEPALFVALTFERREVLDSSNIKPMNLIGVDRGENIPAVIALTDPEGCPLSRFKDSLGNPTHILRIGESYKEKQRTIQAKKEVEQRRAGGYSRKYASKAKNLADDMVRNTARDLLYYAVTQDAMLIFENLSRGFGRQGKRTFMAERQYTRMEDWLTAKLAYEGLPSKTYLSKTLAQYTSKTCSNCGFTITSADYDRVLEKLKKTATGWMTTINGKELKVEGQITYYNRYKRQNVVKDLSVELDRLSEESVNNDISSWTKGRSGEALSLLKKRFSHRPVQEKFVCLNCGFETHADEQAALNIARSWLFLRSQEYKKYQTNKTSTGNTDKRAFVETWQSFYRKKLKEVWKPAV

SEQ ID NO: 47769 - protein, 979 aa, synthetic construct
  REGION 1..979: note = engineered CasX variant
QEIKRINKIRRRLVKDSNTKKAGKTGPMKTLLVRVMTPDLRERLENLRKKPENIPQPISNTSRANLNKLLTDYTEMKKAILHVYWEEFQKDPVGLMSRVAQPASKKIDQNKLKPEMDEKGNLTTAGFACSQCGQPLFVYKLEQVSEKGKAYTNYFGRCNVAEHEKLILLAQLKPEKDSDEAVTYSLGKFGQRALDFYSIHVTKESTHPVKPLAQIAGNRYASHPVGKALSDACMGTIASFLSKYQDIIIEHQKVVKGNQKRLESLRELAGKENLEYPSVTLPPQPHTKEGVDAYNEVIARVRMWVNLNLWQKLKLSRDDAKPLLRLKNFPSFPLVERQANEVDWWDMVCNVKKLINEKKEDGKVFWQNLAGYKRQEALRPYLSSEEDRKKGKKFARYQLGDLLLHLEKKHGEDWGKVYDEAWERIDKKVEGLSKHIKLEEERRSEDAQSKAALTDWLRAKASFVIEGLKEADKDEFCRCELKLQKWYGDLRGKPFAIEAENSILDISGFSKQYNCAFIWQKDGVKKLNLYLIINYFKGGKLRFKKIKPEAFEANRFYTVINKKSGEIVPMEVNFNFDDPNLIILPLAFGKRQGREFIWNDLLSLETGSLKLANGRVIEKTLYNRRTRQDEPALFVALTFERREVLDSSNIKPMNLIGVDRGENIPAVIALTDPEGCPLSRFKDSLGNPTHILRIGESYKEKQRTIQAKKEVEQRRAGGYSRKYASKAKNLADDMVRNTARDLLYYAVTQDAMLIFENLSRGFGRQGKRTFMAERQYTRMEDWLTAKLAYEGLPSKTYLSKTLAQYTSKTCSNCGFTITSADYDRVLEKLKKTATGWMTTINGKELKVEGQITYYNRYKRQNVVKDLSVELDRLSEESVNNDISSWTKGRSGEALSLLKKRFSHRPVQEKFVCLNCGFETHADEQAALNIARSWLFLRSQEYKKYQTNKTSTGNTDKRAFVETWQSFYRKKLKEVWKPAV

SEQ ID NO: 47770 - protein, 979 aa, synthetic construct
  REGION 1..979: note = engineered CasX variant
QEIKRINKIRRRLVKDSNTKKAGKTGPMKTLLVRVMTPDLRERLENLRKKPENIPQPISNTSRANLNKLLTDYTEMKKAILHVYWEEFQKDPVGLMSRVAQPASKKIDQNKLKPEMDEKGNLTTAGFACSQCGQPLFVYKLEQVSEKGKAYTNYFGRCNVAEHEKLILLAQLKPEKDSDEAVTYSLGKFGQRALDFYSIHVTKESTHPVKPLAQIAGNRYASSPVGKALSDACMGTIASFLSKYQDIIIEHQKVVKGNQKRLESLRELAGKENLEYPSVTLPPQPHTKEGVDAYNEVIARVRMWVNLNLWQKLKLSRDDAKPLLRLKNFPSFPLVERQANEVDWWDMVCNVKKLINEKKEDGKVFWQNLAGYKRQEALRPYLSSEEDRKKGKKFARYQLGDLLLHLEKKHGEDWGKVYDEAWERIDKKVEGLSKHIKLEEERRSEDAQSKAALTDWLRAKASFVIEGLKEADKDEFCRCELKLQKWYGDLRGKPFAIEAENSILDISGFSKQYNCAFIWQKDGVKKLNLYLIINYFKGGKLRFKKIKPEAFEANRFYTVINKKSGEIVPMEVNFNFDDPNLIILPLAFGKRQGREFIWNDLLSLETGSLKLANGRVIEKTLYNRRTRQDEPALFVALTFERREVLDSSNIKPMNLIGVDRGENIPAVIALTDPEGCPLSRFKDSLGNPTHILRIGESYKEKQRTIQAKKEVEQRRAGGYSRKYASKAKNLADDMVRNTARDLLYYAVTQDAMLIFENLSRGFGRQGKRTFMAERQYTRMEDWLTAKLAYEGLPSKTYLSKTLAQYTSKTCSNCGFTITSADYDRVLEKLKKTATGWMTTINGKELKVEGQITYYNRYKRQNVVKDLSVELDRLSEESVNNDISSWTKGRSGEALSLLKKRFSHRPVQEKFVCLNCGFETHADEQAALNIARSWLFLRSQEYKKYQTNKTSTGNTDKRAFVETWQSFYRKKLKEVWKPAV

SEQ ID NO: 47771 - protein, 979 aa, synthetic construct
  REGION 1..979: note = engineered CasX variant
QEIKRINKIRRRLVKDSNTKKAGKTGPMKTLLVRVMTPDLRERLENLRKKPENIPQPISNTSRANLNKLLTDYTEMKKAILHVYWEEFQKDPVGLMSRVAQPASKKIDQNKLKPEMDEKGNLTTAGFACSQCGQPLFVYKLEQVSEKGKAYTNYFGRCNVAEHEKLILLAQLKPEKDSDEAVTYSLGKFGQRALDFYSIHVTKESTHPVKPLAQIAGNRYASTPVGKALSDACMGTIASFLSKYQDIIIEHQKVVKGNQKRLESLRELAGKENLEYPSVTLPPQPHTKEGVDAYNEVIARVRMWVNLNLWQKLKLSRDDAKPLLRLKNFPSFPLVERQANEVDWWDMVCNVKKLINEKKEDGKVFWQNLAGYKRQEALRPYLSSEEDRKKGKKFARYQLGDLLLHLEKKHGEDWGKVYDEAWERIDKKVEGLSKHIKLEEERRSEDAQSKAALTDWLRAKASFVIEGLKEADKDEFCRCELKLQKWYGDLRGKPFAIEAENSILDISGFSKQYNCAFIWQKDGVKKLNLYLIINYFKGGKLRFKKIKPEAFEANRFYTVINKKSGEIVPMEVNFNFDDPNLIILPLAFGKRQGREFIWNDLLSLETGSLKLANGRVIEKTLYNRRTRQDEPALFVALTFERREVLDSSNIKPMNLIGVDRGENIPAVIALTDPEGCPLSRFKDSLGNPTHILRIGESYKEKQRTIQAKKEVEQRRAGGYSRKYASKAKNLADDMVRNTARDLLYYAVTQDAMLIFENLSRGFGRQGKRTFMAERQYTRMEDWLTAKLAYEGLPSKTYLSKTLAQYTSKTCSNCGFTITSADYDRVLEKLKKTATGWMTTINGKELKVEGQITYYNRYKRQNVVKDLSVELDRLSEESVNNDISSWTKGRSGEALSLLKKRFSHRPVQEKFVCLNCGFETHADEQAALNIARSWLFLRSQEYKKYQTNKTSTGNTDKRAFVETWQSFYRKKLKEVWKPAV

SEQ ID NO: 47772 - protein, 979 aa, synthetic construct
  REGION 1..979: note = engineered CasX variant
QEIKRINKIRRRLVKDSNTKKAGKTGPMKTLLVRVMTPDLRERLENLRKKPENIPQPISNTSRANLNKLLTDYTEMKKAILHVYWEEFQKDPVGLMSRVAQPASKKIDQNKLKPEMDEKGNLTTAGFACSQCGQPLFVYKLEQVSEKGKAYTNYFGRCNVAEHEKLILLAQLKPEKDSDEAVTYSLGKFGQRALDFYSIHVTKESTHPVKPLAQIAGNRYASAPVGKALSDACMGTIASFLSKYQDIIIEHQKVVKGNQKRLESLRELAGKENLEYPSVTLPPQPHTKEGVDAYNEVIARVRMWVNLNLWQKLKLSRDDAKPLLRLKNFPSFPLVERQANEVDWWDMVCNVKKLINEKKEDGKVFWQNLAGYKRQEALRPYLSSEEDRKKGKKFARYQLGDLLLHLEKKHGEDWGKVYDEAWERIDKKVEGLSKHIKLEEERRSEDAQSKAALTDWLRAKASFVIEGLKEADKDEFCRCELKLQKWYGDLRGKPFAIEAENSILDISGFSKQYNCAFIWQKDGVKKLNLYLIINYFKGGKLRFKKIKPEAFEANRFYTVINKKSGEIVPMEVNFNFDDPNLIILPLAFGKRQGREFIWNDLLSLETGSLKLANGRVIEKTLYNRRTRQDEPALFVALTFERREVLDSSNIKPMNLIGVDRGENIPAVIALTDPEGCPLSRFKDSLGNPTHILRIGESYKEKQRTIQAKKEVEQRRAGGYSRKYASKAKNLADDMVRNTARDLLYYAVTQDAMLIFENLSRGFGRQGKRTFMAERQYTRMEDWLTAKLAYEGLPSKTYLSKTLAQYTSKTCSNCGFTITSADYDRVLEKLKKTATGWMTTINGKELKVEGQITYYNRYKRQNVVKDLSVELDRLSEESVNNDISSWTKGRSGEALSLLKKRFSHRPVQEKFVCLNCGFETHADEQAALNIARSWLFLRSQEYKKYQTNKTSTGNTDKRAFVETWQSFYRKKLKEVWKPAV

SEQ ID NO: 47773 - protein, 979 aa, synthetic construct
  REGION 1..979: note = engineered CasX variant
QEIKRINKIRRRLVKDSNTKKAGKTGPMKTLLVRVMTPDLRERLENLRKKPENIPQPISNTSRANLNKLLTDYTEMKKAILHVYWEEFQKDPVGLMSRVAQPASKKIDQNKLKPEMDEKGNLTTAGFACSQCGQPLFVYKLEQVSEKGKAYTNYFGRCNVAEHEKLILLAQLKPEKDSDEAVTYSLGKFGQRALDFYSIHVTKESTHPVKPLAQIAGNRYASVPVGKALSDACMGTIASFLSKYQDIIIEHQKVVKGNQKRLESLRELAGKENLEYPSVTLPPQPHTKEGVDAYNEVIARVRMWVNLNLWQKLKLSRDDAKPLLRLKNFPSFPLVERQANEVDWWDMVCNVKKLINEKKEDGKVFWQNLAGYKRQEALRPYLSSEEDRKKGKKFARYQLGDLLLHLEKKHGEDWGKVYDEAWERIDKKVEGLSKHIKLEEERRSEDAQSKAALTDWLRAKASFVIEGLKEADKDEFCRCELKLQKWYGDLRGKPFAIEAENSILDISGFSKQYNCAFIWQKDGVKKLNLYLIINYFKGGKLRFKKIKPEAFEANRFYTVINKKSGEIVPMEVNFNFDDPNLIILPLAFGKRQGREFIWNDLLSLETGSLKLANGRVIEKTLYNRRTRQDEPALFVALTFERREVLDSSNIKPMNLIGVDRGENIPAVIALTDPEGCPLSRFKDSLGNPTHILRIGESYKEKQRTIQAKKEVEQRRAGGYSRKYASKAKNLADDMVRNTARDLLYYAVTQDAMLIFENLSRGFGRQGKRTFMAERQYTRMEDWLTAKLAYEGLPSKTYLSKTLAQYTSKTCSNCGFTITSADYDRVLEKLKKTATGWMTTINGKELKVEGQITYYNRYKRQNVVKDLSVELDRLSEESVNNDISSWTKGRSGEALSLLKKRFSHRPVQEKFVCLNCGFETHADEQAALNIARSWLFLRSQEYKKYQTNKTSTGNTDKRAFVETWQSFYRKKLKEVWKPAV

SEQ ID NO: 47774 - protein, 979 aa, synthetic construct
  REGION 1..979: note = engineered CasX variant
QEIKRINKIRRRLVKDSNTKKAGKTGPMKTLLVRVMTPDLRERLENLRKKPENIPQPISNTSRANLNKLLTDYTEMKKAILHVYWEEFQKDPVGLMSRVAQPASKKIDQNKLKPEMDEKGNLTTAGFACSQCGQPLFVYKLEQVSEKGKAYTNYFGRCNVAEHEKLIKLAQLKPEKDSDEAVTYSLGKFGQRALDFYSIHVTKESTHPVKPLAQIAGNRYASGPVGKALSDACMGTIASFLSKYQDIIIEHQKVVKGNQKRLESLRELAGKENLEYPSVTLPPQPHTKEGVDAYNEVIARVRMWVNLNLWQKLKLSRDDAKPLLRLKNFPSFPLVERQANEVDWWDMVCNVKKLINEKKEDGKVFWQNLAGYKRQEALRPYLSSEEDRKKGKKFARYQLGDLLLHLEKKHGEDWGKVYDEAWERIDKKVEGLSKHIKLEEERRSEDAQSKAALTDWLRAKASFVIEGLKEADKDEFCRCELKLQKWYGDLRGKPFAIEAENSILDISGFSKQYNCAFIWQKDGVKKLNLYLIINYFKGGKLRFKKIKPEAFEANRFYTVINKKSGEIVPMEVNFNFDDPNLIILPLAFGKRQGREFIWNDLLSLETGSLKLANGRVIEKTLYNRRTRQDEPALFVALTFERREVLDSSNIKPMNLIGVDRGENIPAVIALTDPEGCPLSRFKDSLGNPTHILRIGESYKEKQRTIQAKKEVEQRRAGGYSRKYASKAKNLADDMVRNTARDLLYYAVTQDAMLIFENLSRGFGRQGKRTFMAERQYTRMEDWLTAKLAYEGLPSKTYLSKTLAQYTSKTCSNCGFTITSADYDRVLEKLKKTATGWMTTINGKELKVEGQITYYNRYKRQNVVKDLSVELDRLSEESVNNDISSWTKGRSGEALSLLKKRFSHRPVQEKFVCLNCGFETHADEQAALNIARSWLFLRSQEYKKYQTNKTSTGNTDKRAFVETWQSFYRKKLKEVWKPAV

SEQ ID NO: 47775 - protein, 978 aa, synthetic construct
  REGION 1..978: note = engineered CasX variant
QEIKRINKIRRRLVKDSNTKKAGKTGPMKTLLVRVMTPDLRERLENLRKKPENIPQPISNTSRANLNKLLTDYTEMKKAILHVYWEEFQKDPVGLMSRVAQPASKKIDQNKLKPEMDEKGNLTTAGFACSQCGQPLFVYKLEQVSEKGKAYTNYFGRCNVAEHEKLILLAQLKPEKDSDEAVTYSLGKFGQRALDFYSIHVTKESTHPVKPLAQIAGNRYASPVGKALSDACMGTIASFLSKYQDIIIEHQKVVKGNQKRLESLRELAGKENLEYPSVTLPPQPHTKEGVDAYNEVIARVRMWVNLNLWQKLKLSRDDAKPLLRLKNFPSFPLVERQANEVDWWDMVCNVKKLINEKKEDGKVFWQNLAGYKRQEALRPYLSSEEDRKKGKKFARYQLGDLLLHLEKKHGEDWGKVYDEAWERIDKKVEGLSKHIKLEEERRSEDAQSKAALTDWLRAKASFVIEGLKEADKDEFCRCELKLQKWYGDLRGKPFAIEAENSILDISGFSKQYNCAFIWQKDGVKKLNLYLIINYFKGGKLRFKKIKPEAFEANRFYTVINKKSGEIVPMEVNFNFDDPNLIILPLAFGKRQGREFIWNDLLSLETGSLKLANGRVIEKTLYNRRTRQDEPALFVALTFERREVLDSSNIKPMNLIGVDRGENIPAVIALTDPEGCPLSRFKDSLGNPTHILRIGESYKEKQRTIQAKKEVEQRRAGGYSRKYASKAKNLADDMVRNTARDLLYYAVTQDAMLIFENLSRGFGRQGKRTFMAERQYTRMEDWLTAKLAYEGLPSKTYLSKTLAQYTSKTCSNCGFTITSADYDRVLEKLKKTATGWMTTINGKELKVEGQITYYNRYKRQNVVKDLSVELDRLSEESVNNDISSWTKGRSGEALSLLKKRFSHRPVQEKFVCLNCGFETHADEQAALNIARSWLFLRSQEYKKYQTNKTSTGNTDKRAFVETWQSFYRKKLKEVWKPAV

SEQ ID NO: 47776 - protein, 979 aa, synthetic construct
  REGION 1..979: note = engineered CasX variant
QEIKRINKIRRRLVKDSNTKKAGKTGPMKTLLVRVMTPDLRERLENLRKKPENIPQPISNTSRANLNKLLTDYTEMKKAILHVYWEEFQKDPVGLMSRVAQPASKKIDQNKLKPEMDEKGNLTTAGFACSQCGQPLFVYKLEQVSEKGKAYTNYFGRCNVAEHEKLILLAQLKPEKDSDEAVTYSLGKFGQRALDFYSIHVTKESTHPVKPLAQIAGNRYASYPVGKALSDACMGTIASFLSKYQDIIIEHQKVVKGNQKRLESLRELAGKENLEYPSVTLPPQPHTKEGVDAYNEVIARVRMWVNLNLWQKLKLSRDDAKPLLRLKGFPSFPLVERQANEVDWWDMVCNVKKLINEKKEDGKVFWQNLAGYKRQEALRPYLSSEEDRKKGKKFARYQLGDLLNHLEKKHGEDWGKVYDEAWERIDKKVEGLSKHIKLEEERRSEDAQSKAALTDWLRAKASFVIEGLKEADKDEFCRCELKLQKWYGDLRGKPFAIEAENSILDISGFSKQYNCAFIWQKDGVKKLNLYLIINYFKGGKLRFKKIKPEAFEANRFYTVINKKSGEIVPMEVNFNFDDPNLIILPLAFGKRQGREFIWNDLLSLETGSLKLANGRVIEKTLYNRRTRQDEPALFVALTFERREVLDSSNIKPMNLIGVDRGENIPAVIALTDPEGCPLSRFKDSLGNPTHILRIGESYKEKQRTIQAKKEVEQRRAGGYSRKYASKAKNLADDMVRNTARDLLYYAVTQDAMLIFENLSRGFGRQGKRTFMAERQYTRMEDWLTAKLAYEGLPSKTYLSKTLAQYTSKTCSNCGFTITSADYDRVLEKLKKTATGWMTTINGKELKVEGQITYYNRYKRQNVVKDLSVELDRLSEESVNNDISSWTKGRSGEALSLLKKRFSHRPVQEKFVCLNCGFETHADEQAALNIARSWLFLRSQEYKKYQTNKTSTGNTDKRAFVETWQSFYRKKLKEVWKPAV

SEQ ID NO: 47777 - protein, 979 aa, synthetic construct
  REGION 1..979: note = engineered CasX variant
QEIKRINKIRRRLVKDSNTKKAGKTGPMKTLLVRVMTPDLRERLENLRKKPENIPQPISNTSRANLNKLLTDYTEMKKAILHVYWEEFQKDPVGLMSRVAQPASKKIDQNKLKPEMDEKGNLTTAGFACSQCGQPLFVYKLEQVSEKGKAYTNYFGRCNVAEHEKLILLAQLKPEKDSDEAVTYSLGKFGQRALDFYSIHVTKESTHPVKPLAQIAGNRYASHPVGKALSDACMGTIASFLSKYQDIIIEHQKVVKGNQKRLESLRELAGKENLEYPSVTLPPQPHTKEGVDAYNEVIARVRMWVNLNLWQKLKLSRDDAKPLLRLKGFPSFPLVERQANEVDWWDMVCNVKKLINEKKEDGKVFWQNLAGYKRQEALRPYLSSEEDRKKGKKFARYQLGDLLNHLEKKHGEDWGKVYDEAWERIDKKVEGLSKHIKLEEERRSEDAQSKAALTDWLRAKASFVIEGLKEADKDEFCRCELKLQKWYGDLRGKPFAIEAENSILDISGFSKQYNCAFIWQKDGVKKLNLYLIINYFKGGKLRFKKIKPEAFEANRFYTVINKKSGEIVPMEVNFNFDDPNLIILPLAFGKRQGREFIWNDLLSLETGSLKLANGRVIEKTLYNRRTRQDEPALFVALTFERREVLDSSNIKPMNLIGVDRGENIPAVIALTDPEGCPLSRFKDSLGNPTHILRIGESYKEKQRTIQAKKEVEQRRAGGYSRKYASKAKNLADDMVRNTARDLLYYAVTQDAMLIFENLSRGFGRQGKRTFMAERQYTRMEDWLTAKLAYEGLPSKTYLSKTLAQYTSKTCSNCGFTITSADYDRVLEKLKKTATGWMTTINGKELKVEGQITYYNRYKRQNVVKDLSVELDRLSEESVNNDISSWTKGRSGEALSLLKKRFSHRPVQEKFVCLNCGFETHADEQAALNIARSWLFLRSQEYKKYQTNKTSTGNTDKRAFVETWQSFYRKKLKEVWKPAV

SEQ ID NO: 47778 - protein, 979 aa, synthetic construct
  REGION 1..979: note = engineered CasX variant
QEIKRINKIRRRLVKDSNTKKAGKTGPMKTLLVRVMTPDLRERLENLRKKPENIPQPISNTSRANLNKLLTDYTEMKKAILHVYWEEFQKDPVGLMSRVAQPASKKIDQNKLKPEMDEKGNLTTAGFACSQCGQPLFVYKLEQVSEKGKAYTNYFGRCNVAEHEKLILLAQLKPEKDSDEAVTYSLGKFGQRALDFYSIHVTKESTHPVKPLAQIAGNRYASSPVGKALSDACMGTIASFLSKYQDIIIEHQKVVKGNQKRLESLRELAGKENLEYPSVTLPPQPHTKEGVDAYNEVIARVRMWVNLNLWQKLKLSRDDAKPLLRLKGFPSFPLVERQANEVDWWDMVCNVKKLINEKKEDGKVFWQNLAGYKRQEALRPYLSSEEDRKKGKKFARYQLGDLLNHLEKKHGEDWGKVYDEAWERIDKKVEGLSKHIKLEEERRSEDAQSKAALTDWLRAKASFVIEGLKEADKDEFCRCELKLQKWYGDLRGKPFAIEAENSILDISGFSKQYNCAFIWQKDGVKKLNLYLIINYFKGGKLRFKKIKPEAFEANRFYTVINKKSGEIVPMEVNFNFDDPNLIILPLAFGKRQGREFIWNDLLSLETGSLKLANGRVIEKTLYNRRTRQDEPALFVALTFERREVLDSSNIKPMNLIGVDRGENIPAVIALTDPEGCPLSRFKDSLGNPTHILRIGESYKEKQRTIQAKKEVEQRRAGGYSRKYASKAKNLADDMVRNTARDLLYYAVTQDAMLIFENLSRGFGRQGKRTFMAERQYTRMEDWLTAKLAYEGLPSKTYLSKTLAQYTSKTCSNCGFTITSADYDRVLEKLKKTATGWMTTINGKELKVEGQITYYNRYKRQNVVKDLSVELDRLSEESVNNDISSWTKGRSGEALSLLKKRFSHRPVQEKFVCLNCGFETHADEQAALNIARSWLFLRSQEYKKYQTNKTSTGNTDKRAFVETWQSFYRKKLKEVWKPAV

SEQ ID NO: 47779 - protein, 979 aa, synthetic construct
  REGION 1..979: note = engineered CasX variant
QEIKRINKIRRRLVKDSNTKKAGKTGPMKTLLVRVMTPDLRERLENLRKKPENIPQPISNTSRANLNKLLTDYTEMKKAILHVYWEEFQKDPVGLMSRVAQPASKKIDQNKLKPEMDEKGNLTTAGFACSQCGQPLFVYKLEQVSEKGKAYTNYFGRCNVAEHEKLILLAQLKPEKDSDEAVTYSLGKFGQRALDFYSIHVTKESTHPVKPLAQIAGNRYASTPVGKALSDACMGTIASFLSKYQDIIIEHQKVVKGNQKRLESLRELAGKENLEYPSVTLPPQPHTKEGVDAYNEVIARVRMWVNLNLWQKLKLSRDDAKPLLRLKGFPSFPLVERQANEVDWWDMVCNVKKLINEKKEDGKVFWQNLAGYKRQEALRPYLSSEEDRKKGKKFARYQLGDLLNHLEKKHGEDWGKVYDEAWERIDKKVEGLSKHIKLEEERRSEDAQSKAALTDWLRAKASFVIEGLKEADKDEFCRCELKLQKWYGDLRGKPFAIEAENSILDISGFSKQYNCAFIWQKDGVKKLNLYLIINYFKGGKLRFKKIKPEAFEANRFYTVINKKSGEIVPMEVNFNFDDPNLIILPLAFGKRQGREFIWNDLLSLETGSLKLANGRVIEKTLYNRRTRQDEPALFVALTFERREVLDSSNIKPMNLIGVDRGENIPAVIALTDPEGCPLSRFKDSLGNPTHILRIGESYKEKQRTIQAKKEVEQRRAGGYSRKYASKAKNLADDMVRNTARDLLYYAVTQDAMLIFENLSRGFGRQGKRTFMAERQYTRMEDWLTAKLAYEGLPSKTYLSKTLAQYTSKTCSNCGFTITSADYDRVLEKLKKTATGWMTTINGKELKVEGQITYYNRYKRQNVVKDLSVELDRLSEESVNNDISSWTKGRSGEALSLLKKRFSHRPVQEKFVCLNCGFETHADEQAALNIARSWLFLRSQEYKKYQTNKTSTGNTDKRAFVETWQSFYRKKLKEVWKPAV

SEQ ID NO: 47780 - protein, 979 aa, synthetic construct
  REGION 1..979: note = engineered CasX variant
QEIKRINKIRRRLVKDSNTKKAGKTGPMKTLLVRVMTPDLRERLENLRKKPENIPQPISNTSRANLNKLLTDYTEMKKAILHVYWEEFQKDPVGLMSRVAQPASKKIDQNKLKPEMDEKGNLTTAGFACSQCGQPLFVYKLEQVSEKGKAYTNYFGRCNVAEHEKLILLAQLKPEKDSDEAVTYSLGKFGQRALDFYSIHVTKESTHPVKPLAQIAGNRYASAPVGKALSDACMGTIASFLSKYQDIIIEHQKVVKGNQKRLESLRELAGKENLEYPSVTLPPQPHTKEGVDAYNEVIARVRMWVNLNLWQKLKLSRDDAKPLLRLKGFPSFPLVERQANEVDWWDMVCNVKKLINEKKEDGKVFWQNLAGYKRQEALRPYLSSEEDRKKGKKFARYQLGDLLNHLEKKHGEDWGKVYDEAWERIDKKVEGLSKHIKLEEERRSEDAQSKAALTDWLRAKASFVIEGLKEADKDEFCRCELKLQKWYGDLRGKPFAIEAENSILDISGFSKQYNCAFIWQKDGVKKLNLYLIINYFKGGKLRFKKIKPEAFEANRFYTVINKKSGEIVPMEVNFNFDDPNLIILPLAFGKRQGREFIWNDLLSLETGSLKLANGRVIEKTLYNRRTRQDEPALFVALTFERREVLDSSNIKPMNLIGVDRGENIPAVIALTDPEGCPLSRFKDSLGNPTHILRIGESYKEKQRTIQAKKEVEQRRAGGYSRKYASKAKNLADDMVRNTARDLLYYAVTQDAMLIFENLSRGFGRQGKRTFMAERQYTRMEDWLTAKLAYEGLPSKTYLSKTLAQYTSKTCSNCGFTITSADYDRVLEKLKKTATGWMTTINGKELKVEGQITYYNRYKRQNVVKDLSVELDRLSEESVNNDISSWTKGRSGEALSLLKKRFSHRPVQEKFVCLNCGFETHADEQAALNIARSWLFLRSQEYKKYQTNKTSTGNTDKRAFVETWQSFYRKKLKEVWKPAV

SEQ ID NO: 47781 - protein, 979 aa, synthetic construct
  REGION 1..979: note = engineered CasX variant
QEIKRINKIRRRLVKDSNTKKAGKTGPMKTLLVRVMTPDLRERLENLRKKPENIPQPISNTSRANLNKLLTDYTEMKKAILHVYWEEFQKDPVGLMSRVAQPASKKIDQNKLKPEMDEKGNLTTAGFACSQCGQPLFVYKLEQVSEKGKAYTNYFGRCNVAEHEKLILLAQLKPEKDSDEAVTYSLGKFGQRALDFYSIHVTKESTHPVKPLAQIAGNRYASVPVGKALSDACMGTIASFLSKYQDIIIEHQKVVKGNQKRLESLRELAGKENLEYPSVTLPPQPHTKEGVDAYNEVIARVRMWVNLNLWQKLKLSRDDAKPLLRLKGFPSFPLVERQANEVDWWDMVCNVKKLINEKKEDGKVFWQNLAGYKRQEALRPYLSSEEDRKKGKKFARYQLGDLLNHLEKKHGEDWGKVYDEAWERIDKKVEGLSKHIKLEEERRSEDAQSKAALTDWLRAKASFVIEGLKEADKDEFCRCELKLQKWYGDLRGKPFAIEAENSILDISGFSKQYNCAFIWQKDGVKKLNLYLIINYFKGGKLRFKKIKPEAFEANRFYTVINKKSGEIVPMEVNFNFDDPNLIILPLAFGKRQGREFIWNDLLSLETGSLKLANGRVIEKTLYNRRTRQDEPALFVALTFERREVLDSSNIKPMNLIGVDRGENIPAVIALTDPEGCPLSRFKDSLGNPTHILRIGESYKEKQRTIQAKKEVEQRRAGGYSRKYASKAKNLADDMVRNTARDLLYYAVTQDAMLIFENLSRGFGRQGKRTFMAERQYTRMEDWLTAKLAYEGLPSKTYLSKTLAQYTSKTCSNCGFTITSADYDRVLEKLKKTATGWMTTINGKELKVEGQITYYNRYKRQNVVKDLSVELDRLSEESVNNDISSWTKGRSGEALSLLKKRFSHRPVQEKFVCLNCGFETHADEQAALNIARSWLFLRSQEYKKYQTNKTSTGNTDKRAFVETWQSFYRKKLKEVWKPAV

SEQ ID NO: 47782 - protein, 979 aa, synthetic construct
  REGION 1..979: note = engineered CasX variant
QEIKRINKIRRRLVKDSNTKKAGKTGPMKTLLVRVMTPDLRERLENLRKKPENIPQPISNTSRANLNKLLTDYTEMKKAILHVYWEEFQKDPVGLMSRVAQPASKKIDQNKLKPEMDEKGNLTTAGFACSQCGQPLFVYKLEQVSEKGKAYTNYFGRCNVAEHEKLIKLAQLKPEKDSDEAVTYSLGKFGQRALDFYSIHVTKESTHPVKPLAQIAGNRYASGPVGKALSDACMGTIASFLSKYQDIIIEHQKVVKGNQKRLESLRELAGKENLEYPSVTLPPQPHTKEGVDAYNEVIARVRMWVNLNLWQKLKLSRDDAKPLLRLKGFPSFPLVERQANEVDWWDMVCNVKKLINEKKEDGKVFWQNLAGYKRQEALRPYLSSEEDRKKGKKFARYQLGDLLNHLEKKHGEDWGKVYDEAWERIDKKVEGLSKHIKLEEERRSEDAQSKAALTDWLRAKASFVIEGLKEADKDEFCRCELKLQKWYGDLRGKPFAIEAENSILDISGFSKQYNCAFIWQKDGVKKLNLYLIINYFKGGKLRFKKIKPEAFEANRFYTVINKKSGEIVPMEVNFNFDDPNLIILPLAFGKRQGREFIWNDLLSLETGSLKLANGRVIEKTLYNRRTRQDEPALFVALTFERREVLDSSNIKPMNLIGVDRGENIPAVIALTDPEGCPLSRFKDSLGNPTHILRIGESYKEKQRTIQAKKEVEQRRAGGYSRKYASKAKNLADDMVRNTARDLLYYAVTQDAMLIFENLSRGFGRQGKRTFMAERQYTRMEDWLTAKLAYEGLPSKTYLSKTLAQYTSKTCSNCGFTITSADYDRVLEKLKKTATGWMTTINGKELKVEGQITYYNRYKRQNVVKDLSVELDRLSEESVNNDISSWTKGRSGEALSLLKKRFSHRPVQEKFVCLNCGFETHADEQAALNIARSWLFLRSQEYKKYQTNKTSTGNTDKRAFVETWQSFYRKKLKEVWKPAV

SEQ ID NO: 47783 - protein, 978 aa, synthetic construct
  REGION 1..978: note = engineered CasX variant
QEIKRINKIRRRLVKDSNTKKAGKTGPMKTLLVRVMTPDLRERLENLRKKPENIPQPISNTSRANLNKLLTDYTEMKKAILHVYWEEFQKDPVGLMSRVAQPASKKIDQNKLKPEMDEKGNLTTAGFACSQCGQPLFVYKLEQVSEKGKAYTNYFGRCNVAEHEKLILLAQLKPEKDSDEAVTYSLGKFGQRALDFYSIHVTKESTHPVKPLAQIAGNRYASPVGKALSDACMGTIASFLSKYQDIIIEHQKVVKGNQKRLESLRELAGKENLEYPSVTLPPQPHTKEGVDAYNEVIARVRMWVNLNLWQKLKLSRDDAKPLLRLKGFPSFPLVERQANEVDWWDMVCNVKKLINEKKEDGKVFWQNLAGYKRQEALRPYLSSEEDRKKGKKFARYQLGDLLNHLEKKHGEDWGKVYDEAWERIDKKVEGLSKHIKLEEERRSEDAQSKAALTDWLRAKASFVIEGLKEADKDEFCRCELKLQKWYGDLRGKPFAIEAENSILDISGFSKQYNCAFIWQKDGVKKLNLYLIINYFKGGKLRFKKIKPEAFEANRFYTVINKKSGEIVPMEVNFNFDDPNLIILPLAFGKRQGREFIWNDLLSLETGSLKLANGRVIEKTLYNRRTRQDEPALFVALTFERREVLDSSNIKPMNLIGVDRGENIPAVIALTDPEGCPLSRFKDSLGNPTHILRIGESYKEKQRTIQAKKEVEQRRAGGYSRKYASKAKNLADDMVRNTARDLLYYAVTQDAMLIFENLSRGFGRQGKRTFMAERQYTRMEDWLTAKLAYEGLPSKTYLSKTLAQYTSKTCSNCGFTITSADYDRVLEKLKKTATGWMTTINGKELKVEGQITYYNRYKRQNVVKDLSVELDRLSEESVNNDISSWTKGRSGEALSLLKKRFSHRPVQEKFVCLNCGFETHADEQAALNIARSWLFLRSQEYKKYQTNKTSTGNTDKRAFVETWQSFYRKKLKEVWKPAV

SEQ ID NO: 47784 - protein, 979 aa, synthetic construct
  REGION 1..979: note = engineered CasX variant
QEIKRINKIRRRLVKDSNTKKAGKTGPMKTLLVRVMTPDLRERLENLRKKPENIPQPISNTSRANLNKLLTDYTEMKKAILHVYWEEFQKDPVGLMSRVAQPASKKIDQNKLKPEMDEKGNLTTAGFACSQCGQPLFVYKLEQVSEKGKAYTNYFGRCNVAEHEKLILLAQLKPEKDSDEAVTYSLGKFGQRALDFYSIHVTKESTHPVKPLAQIAGNRYASYPVGKALSDACMGTIASFLSKYQDIIIEHQKVVKGNQKRLESLRELAGKENLEYPSVTLPPQPHTKEGVDAYNEVIARVRMWVNLNLWQKLKLSRDDAKPLLRLKGFPSFPLVERQANEVDWWDMVCNVKKLINEKKEDGKVFWQNLAGYKRQEALRPYLSSEEDRKKGKKFARYQLGDLLWHLEKKHGEDWGKVYDEAWERIDKKVEGLSKHIKLEEERRSEDAQSKAALTDWLRAKASFVIEGLKEADKDEFCRCELKLQKWYGDLRGKPFAIEAENSILDISGFSKQYNCAFIWQKDGVKKLNLYLIINYFKGGKLRFKKIKPEAFEANRFYTVINKKSGEIVPMEVNFNFDDPNLIILPLAFGKRQGREFIWNDLLSLETGSLKLANGRVIEKTLYNRRTRQDEPALFVALTFERREVLDSSNIKPMNLIGVDRGENIPAVIALTDPEGCPLSRFKDSLGNPTHILRIGESYKEKQRTIQAKKEVEQRRAGGYSRKYASKAKNLADDMVRNTARDLLYYAVTQDAMLIFENLSRGFGRQGKRTFMAERQYTRMEDWLTAKLAYEGLPSKTYLSKTLAQYTSKTCSNCGFTITSADYDRVLEKLKKTATGWMTTINGKELKVEGQITYYNRYKRQNVVKDLSVELDRLSEESVNNDISSWTKGRSGEALSLLKKRFSHRPVQEKFVCLNCGFETHADEQAALNIARSWLFLRSQEYKKYQTNKTSTGNTDKRAFVETWQSFYRKKLKEVWKPAV

SEQ ID NO: 47785 - protein, 979 aa, synthetic construct
  REGION 1..979: note = engineered CasX variant
QEIKRINKIRRRLVKDSNTKKAGKTGPMKTLLVRVMTPDLRERLENLRKKPENIPQPISNTSRANLNKLLTDYTEMKKAILHVYWEEFQKDPVGLMSRVAQPASKKIDQNKLKPEMDEKGNLTTAGFACSQCGQPLFVYKLEQVSEKGKAYTNYFGRCNVAEHEKLILLAQLKPEKDSDEAVTYSLGKFGQRALDFYSIHVTKESTHPVKPLAQIAGNRYASHPVGKALSDACMGTIASFLSKYQDIIIEHQKVVKGNQKRLESLRELAGKENLEYPSVTLPPQPHTKEGVDAYNEVIARVRMWVNLNLWQKLKLSRDDAKPLLRLKGFPSFPLVERQANEVDWWDMVCNVKKLINEKKEDGKVFWQNLAGYKRQEALRPYLSSEEDRKKGKKFARYQLGDLLWHLEKKHGEDWGKVYDEAWERIDKKVEGLSKHIKLEEERRSEDAQSKAALTDWLRAKASFVIEGLKEADKDEFCRCELKLQKWYGDLRGKPFAIEAENSILDISGFSKQYNCAFIWQKDGVKKLNLYLIINYFKGGKLRFKKIKPEAFEANRFYTVINKKSGEIVPMEVNFNFDDPNLIILPLAFGKRQGREFIWNDLLSLETGSLKLANGRVIEKTLYNRRTRQDEPALFVALTFERREVLDSSNIKPMNLIGVDRGENIPAVIALTDPEGCPLSRFKDSLGNPTHILRIGESYKEKQRTIQAKKEVEQRRAGGYSRKYASKAKNLADDMVRNTARDLLYYAVTQDAMLIFENLSRGFGRQGKRTFMAERQYTRMEDWLTAKLAYEGLPSKTYLSKTLAQYTSKTCSNCGFTITSADYDRVLEKLKKTATGWMTTINGKELKVEGQITYYNRYKRQNVVKDLSVELDRLSEESVNNDISSWTKGRSGEALSLLKKRFSHRPVQEKFVCLNCGFETHADEQAALNIARSWLFLRSQEYKKYQTNKTSTGNTDKRAFVETWQSFYRKKLKEVWKPAV

SEQ ID NO: 47786 - protein, 979 aa, synthetic construct
  REGION 1..979: note = engineered CasX variant
QEIKRINKIRRRLVKDSNTKKAGKTGPMKTLLVRVMTPDLRERLENLRKKPENIPQPISNTSRANLNKLLTDYTEMKKAILHVYWEEFQKDPVGLMSRVAQPASKKIDQNKLKPEMDEKGNLTTAGFACSQCGQPLFVYKLEQVSEKGKAYTNYFGRCNVAEHEKLILLAQLKPEKDSDEAVTYSLGKFGQRALDFYSIHVTKESTHPVKPLAQIAGNRYASSPVGKALSDACMGTIASFLSKYQDIIIEHQKVVKGNQKRLESLRELAGKENLEYPSVTLPPQPHTKEGVDAYNEVIARVRMWVNLNLWQKLKLSRDDAKPLLRLKGFPSFPLVERQANEVDWWDMVCNVKKLINEKKEDGKVFWQNLAGYKRQEALRPYLSSEEDRKKGKKFARYQLGDLLWHLEKKHGEDWGKVYDEAWERIDKKVEGLSKHIKLEEERRSEDAQSKAALTDWLRAKASFVIEGLKEADKDEFCRCELKLQKWYGDLRGKPFAIEAENSILDISGFSKQYNCAFIWQKDGVKKLNLYLIINYFKGGKLRFKKIKPEAFEANRFYTVINKKSGEIVPMEVNFNFDDPNLIILPLAFGKRQGREFIWNDLLSLETGSLKLANGRVIEKTLYNRRTRQDEPALFVALTFERREVLDSSNIKPMNLIGVDRGENIPAVIALTDPEGCPLSRFKDSLGNPTHILRIGESYKEKQRTIQAKKEVEQRRAGGYSRKYASKAKNLADDMVRNTARDLLYYAVTQDAMLIFENLSRGFGRQGKRTFMAERQYTRMEDWLTAKLAYEGLPSKTYLSKTLAQYTSKTCSNCGFTITSADYDRVLEKLKKTATGWMTTINGKELKVEGQITYYNRYKRQNVVKDLSVELDRLSEESVNNDISSWTKGRSGEALSLLKKRFSHRPVQEKFVCLNCGFETHADEQAALNIARSWLFLRSQEYKKYQTNKTSTGNTDKRAFVETWQSFYRKKLKEVWKPAV

SEQ ID NO: 47787 - protein, 979 aa, synthetic construct
  REGION 1..979: note = engineered CasX variant
QEIKRINKIRRRLVKDSNTKKAGKTGPMKTLLVRVMTPDLRERLENLRKKPENIPQPISNTSRANLNKLLTDYTEMKKAILHVYWEEFQKDPVGLMSRVAQPASKKIDQNKLKPEMDEKGNLTTAGFACSQCGQPLFVYKLEQVSEKGKAYTNYFGRCNVAEHEKLILLAQLKPEKDSDEAVTYSLGKFGQRALDFYSIHVTKESTHPVKPLAQIAGNRYASTPVGKALSDACMGTIASFLSKYQDIIIEHQKVVKGNQKRLESLRELAGKENLEYPSVTLPPQPHTKEGVDAYNEVIARVRMWVNLNLWQKLKLSRDDAKPLLRLKGFPSFPLVERQANEVDWWDMVCNVKKLINEKKEDGKVFWQNLAGYKRQEALRPYLSSEEDRKKGKKFARYQLGDLLWHLEKKHGEDWGKVYDEAWERIDKKVEGLSKHIKLEEERRSEDAQSKAALTDWLRAKASFVIEGLKEADKDEFCRCELKLQKWYGDLRGKPFAIEAENSILDISGFSKQYNCAFIWQKDGVKKLNLYLIINYFKGGKLRFKKIKPEAFEANRFYTVINKKSGEIVPMEVNFNFDDPNLIILPLAFGKRQGREFIWNDLLSLETGSLKLANGRVIEKTLYNRRTRQDEPALFVALTFERREVLDSSNIKPMNLIGVDRGENIPAVIALTDPEGCPLSRFKDSLGNPTHILRIGESYKEKQRTIQAKKEVEQRRAGGYSRKYASKAKNLADDMVRNTARDLLYYAVTQDAMLIFENLSRGFGRQGKRTFMAERQYTRMEDWLTAKLAYEGLPSKTYLSKTLAQYTSKTCSNCGFTITSADYDRVLEKLKKTATGWMTTINGKELKVEGQITYYNRYKRQNVVKDLSVELDRLSEESVNNDISSWTKGRSGEALSLLKKRFSHRPVQEKFVCLNCGFETHADEQAALNIARSWLFLRSQEYKKYQTNKTSTGNTDKRAFVETWQSFYRKKLKEVWKPAV

SEQ ID NO: 47788 - protein, 979 aa, synthetic construct
  REGION 1..979: note = engineered CasX variant
QEIKRINKIRRRLVKDSNTKKAGKTGPMKTLLVRVMTPDLRERLENLRKKPENIPQPISNTSRANLNKLLTDYTEMKKAILHVYWEEFQKDPVGLMSRVAQPASKKIDQNKLKPEMDEKGNLTTAGFACSQCGQPLFVYKLEQVSEKGKAYTNYFGRCNVAEHEKLILLAQLKPEKDSDEAVTYSLGKFGQRALDFYSIHVTKESTHPVKPLAQIAGNRYASAPVGKALSDACMGTIASFLSKYQDIIIEHQKVVKGNQKRLESLRELAGKENLEYPSVTLPPQPHTKEGVDAYNEVIARVRMWVNLNLWQKLKLSRDDAKPLLRLKGFPSFPLVERQANEVDWWDMVCNVKKLINEKKEDGKVFWQNLAGYKRQEALRPYLSSEEDRKKGKKFARYQLGDLLWHLEKKHGEDWGKVYDEAWERIDKKVEGLSKHIKLEEERRSEDAQSKAALTDWLRAKASFVIEGLKEADKDEFCRCELKLQKWYGDLRGKPFAIEAENSILDISGFSKQYNCAFIWQKDGVKKLNLYLIINYFKGGKLRFKKIKPEAFEANRFYTVINKKSGEIVPMEVNFNFDDPNLIILPLAFGKRQGREFIWNDLLSLETGSLKLANGRVIEKTLYNRRTRQDEPALFVALTFERREVLDSSNIKPMNLIGVDRGENIPAVIALTDPEGCPLSRFKDSLGNPTHILRIGESYKEKQRTIQAKKEVEQRRAGGYSRKYASKAKNLADDMVRNTARDLLYYAVTQDAMLIFENLSRGFGRQGKRTFMAERQYTRMEDWLTAKLAYEGLPSKTYLSKTLAQYTSKTCSNCGFTITSADYDRVLEKLKKTATGWMTTINGKELKVEGQITYYNRYKRQNVVKDLSVELDRLSEESVNNDISSWTKGRSGEALSLLKKRFSHRPVQEKFVCLNCGFETHADEQAALNIARSWLFLRSQEYKKYQTNKTSTGNTDKRAFVETWQSFYRKKLKEVWKPAV

SEQ ID NO: 47789 - protein, 979 aa, synthetic construct
  REGION 1..979: note = engineered CasX variant
QEIKRINKIRRRLVKDSNTKKAGKTGPMKTLLVRVMTPDLRERLENLRKKPENIPQPISNTSRANLNKLLTDYTEMKKAILHVYWEEFQKDPVGLMSRVAQPASKKIDQNKLKPEMDEKGNLTTAGFACSQCGQPLFVYKLEQVSEKGKAYTNYFGRCNVAEHEKLILLAQLKPEKDSDEAVTYSLGKFGQRALDFYSIHVTKESTHPVKPLAQIAGNRYASVPVGKALSDACMGTIASFLSKYQDIIIEHQKVVKGNQKRLESLRELAGKENLEYPSVTLPPQPHTKEGVDAYNEVIARVRMWVNLNLWQKLKLSRDDAKPLLRLKGFPSFPLVERQANEVDWWDMVCNVKKLINEKKEDGKVFWQNLAGYKRQEALRPYLSSEEDRKKGKKFARYQLGDLLWHLEKKHGEDWGKVYDEAWERIDKKVEGLSKHIKLEEERRSEDAQSKAALTDWLRAKASFVIEGLKEADKDEFCRCELKLQKWYGDLRGKPFAIEAENSILDISGFSKQYNCAFIWQKDGVKKLNLYLIINYFKGGKLRFKKIKPEAFEANRFYTVINKKSGEIVPMEVNFNFDDPNLIILPLAFGKRQGREFIWNDLLSLETGSLKLANGRVIEKTLYNRRTRQDEPALFVALTFERREVLDSSNIKPMNLIGVDRGENIPAVIALTDPEGCPLSRFKDSLGNPTHILRIGESYKEKQRTIQAKKEVEQRRAGGYSRKYASKAKNLADDMVRNTARDLLYYAVTQDAMLIFENLSRGFGRQGKRTFMAERQYTRMEDWLTAKLAYEGLPSKTYLSKTLAQYTSKTCSNCGFTITSADYDRVLEKLKKTATGWMTTINGKELKVEGQITYYNRYKRQNVVKDLSVELDRLSEESVNNDISSWTKGRSGEALSLLKKRFSHRPVQEKFVCLNCGFETHADEQAALNIARSWLFLRSQEYKKYQTNKTSTGNTDKRAFVETWQSFYRKKLKEVWKPAV

SEQ ID NO: 47790 - protein, 979 aa, synthetic construct
  REGION 1..979: note = engineered CasX variant
QEIKRINKIRRRLVKDSNTKKAGKTGPMKTLLVRVMTPDLRERLENLRKKPENIPQPISNTSRANLNKLLTDYTEMKKAILHVYWEEFQKDPVGLMSRVAQPASKKIDQNKLKPEMDEKGNLTTAGFACSQCGQPLFVYKLEQVSEKGKAYTNYFGRCNVAEHEKLIKLAQLKPEKDSDEAVTYSLGKFGQRALDFYSIHVTKESTHPVKPLAQIAGNRYASGPVGKALSDACMGTIASFLSKYQDIIIEHQKVVKGNQKRLESLRELAGKENLEYPSVTLPPQPHTKEGVDAYNEVIARVRMWVNLNLWQKLKLSRDDAKPLLRLKGFPSFPLVERQANEVDWWDMVCNVKKLINEKKEDGKVFWQNLAGYKRQEALRPYLSSEEDRKKGKKFARYQLGDLLWHLEKKHGEDWGKVYDEAWERIDKKVEGLSKHIKLEEERRSEDAQSKAALTDWLRAKASFVIEGLKEADKDEFCRCELKLQKWYGDLRGKPFAIEAENSILDISGFSKQYNCAFIWQKDGVKKLNLYLIINYFKGGKLRFKKIKPEAFEANRFYTVINKKSGEIVPMEVNFNFDDPNLIILPLAFGKRQGREFIWNDLLSLETGSLKLANGRVIEKTLYNRRTRQDEPALFVALTFERREVLDSSNIKPMNLIGVDRGENIPAVIALTDPEGCPLSRFKDSLGNPTHILRIGESYKEKQRTIQAKKEVEQRRAGGYSRKYASKAKNLADDMVRNTARDLLYYAVTQDAMLIFENLSRGFGRQGKRTFMAERQYTRMEDWLTAKLAYEGLPSKTYLSKTLAQYTSKTCSNCGFTITSADYDRVLEKLKKTATGWMTTINGKELKVEGQITYYNRYKRQNVVKDLSVELDRLSEESVNNDISSWTKGRSGEALSLLKKRFSHRPVQEKFVCLNCGFETHADEQAALNIARSWLFLRSQEYKKYQTNKTSTGNTDKRAFVETWQSFYRKKLKEVWKPAV

SEQ ID NO: 47791 - protein, 978 aa, synthetic construct
  REGION 1..978: note = engineered CasX variant
QEIKRINKIRRRLVKDSNTKKAGKTGPMKTLLVRVMTPDLRERLENLRKKPENIPQPISNTSRANLNKLLTDYTEMKKAILHVYWEEFQKDPVGLMSRVAQPASKKIDQNKLKPEMDEKGNLTTAGFACSQCGQPLFVYKLEQVSEKGKAYTNYFGRCNVAEHEKLILLAQLKPEKDSDEAVTYSLGKFGQRALDFYSIHVTKESTHPVKPLAQIAGNRYASPVGKALSDACMGTIASFLSKYQDIIIEHQKVVKGNQKRLESLRELAGKENLEYPSVTLPPQPHTKEGVDAYNEVIARVRMWVNLNLWQKLKLSRDDAKPLLRLKGFPSFPLVERQANEVDWWDMVCNVKKLINEKKEDGKVFWQNLAGYKRQEALRPYLSSEEDRKKGKKFARYQLGDLLWHLEKKHGEDWGKVYDEAWERIDKKVEGLSKHIKLEEERRSEDAQSKAALTDWLRAKASFVIEGLKEADKDEFCRCELKLQKWYGDLRGKPFAIEAENSILDISGFSKQYNCAFIWQKDGVKKLNLYLIINYFKGGKLRFKKIKPEAFEANRFYTVINKKSGEIVPMEVNFNFDDPNLIILPLAFGKRQGREFIWNDLLSLETGSLKLANGRVIEKTLYNRRTRQDEPALFVALTFERREVLDSSNIKPMNLIGVDRGENIPAVIALTDPEGCPLSRFKDSLGNPTHILRIGESYKEKQRTIQAKKEVEQRRAGGYSRKYASKAKNLADDMVRNTARDLLYYAVTQDAMLIFENLSRGFGRQGKRTFMAERQYTRMEDWLTAKLAYEGLPSKTYLSKTLAQYTSKTCSNCGFTITSADYDRVLEKLKKTATGWMTTINGKELKVEGQITYYNRYKRQNVVKDLSVELDRLSEESVNNDISSWTKGRSGEALSLLKKRFSHRPVQEKFVCLNCGFETHADEQAALNIARSWLFLRSQEYKKYQTNKTSTGNTDKRAFVETWQSFYRKKLKEVWKPAV

SEQ ID NO: 47792 - protein, 979 aa, synthetic construct
  REGION 1..979: note = engineered CasX variant
QEIKRINKIRRRLVKDSNTKKAGKTGPMKTLLVRVMTPDLRERLENLRKKPENIPQPISNTSRANLNKLLTDYTEMKKAILHVYWEEFQKDPVGLMSRVAQPASKKIDQNKLKPEMDEKGNLTTAGFACSQCGQPLFVYKLEQVSEKGKAYTNYFGRCNVAEHEKLILLAQLKPEKDSDEAVTYSLGKFGQRALDFYSIHVTKESTHPVKPLAQIAGNRYASYPVGKALSDACMGTIASFLSKYQDIIIEHQKVVKGNQKRLESLRELAGKENLEYPSVTLPPQPHTKEGVDAYNEVIARVRMWVNLNLWQKLKLSRDDAKPLLRLKGFPSFPLVERQANEVDWWDMVCNVKKLINEKKEDGKVFWQNLAGYKRQEALRPYLSSEEDRKKGKKFARYQLGDLLLHLYKKHGEDWGKVYDEAWERIDKKVEGLSKHIKLEEERRSEDAQSKAALTDWLRAKASFVIEGLKEADKDEFCRCELKLQKWYGDLRGKPFAIEAENSILDISGFSKQYNCAFIWQKDGVKKLNLYLIINYFKGGKLRFKKIKPEAFEANRFYTVINKKSGEIVPMEVNFNFDDPNLIILPLAFGKRQGREFIWNDLLSLETGSLKLANGRVIEKTLYNRRTRQDEPALFVALTFERREVLDSSNIKPMNLIGVDRGENIPAVIALTDPEGCPLSRFKDSLGNPTHILRIGESYKEKQRTIQAKKEVEQRRAGGYSRKYASKAKNLADDMVRNTARDLLYYAVTQDAMLIFENLSRGFGRQGKRTFMAERQYTRMEDWLTAKLAYEGLPSKTYLSKTLAQYTSKTCSNCGFTITSADYDRVLEKLKKTATGWMTTINGKELKVEGQITYYNRYKRQNVVKDLSVELDRLSEESVNNDISSWTKGRSGEALSLLKKRFSHRPVQEKFVCLNCGFETHADEQAALNIARSWLFLRSQEYKKYQTNKTSTGNTDKRAFVETWQSFYRKKLKEVWKPAV

SEQ ID NO: 47793 - protein, 979 aa, synthetic construct
  REGION 1..979: note = engineered CasX variant
QEIKRINKIRRRLVKDSNTKKAGKTGPMKTLLVRVMTPDLRERLENLRKKPENIPQPISNTSRANLNKLLTDYTEMKKAILHVYWEEFQKDPVGLMSRVAQPASKKIDQNKLKPEMDEKGNLTTAGFACSQCGQPLFVYKLEQVSEKGKAYTNYFGRCNVAEHEKLILLAQLKPEKDSDEAVTYSLGKFGQRALDFYSIHVTKESTHPVKPLAQIAGNRYASHPVGKALSDACMGTIASFLSKYQDIIIEHQKVVKGNQKRLESLRELAGKENLEYPSVTLPPQPHTKEGVDAYNEVIARVRMWVNLNLWQKLKLSRDDAKPLLRLKGFPSFPLVERQANEVDWWDMVCNVKKLINEKKEDGKVFWQNLAGYKRQEALRPYLSSEEDRKKGKKFARYQLGDLLLHLYKKHGEDWGKVYDEAWERIDKKVEGLSKHIKLEEERRSEDAQSKAALTDWLRAKASFVIEGLKEADKDEFCRCELKLQKWYGDLRGKPFAIEAENSILDISGFSKQYNCAFIWQKDGVKKLNLYLIINYFKGGKLRFKKIKPEAFEANRFYTVINKKSGEIVPMEVNFNFDDPNLIILPLAFGKRQGREFIWNDLLSLETGSLKLANGRVIEKTLYNRRTRQDEPALFVALTFERREVLDSSNIKPMNLIGVDRGENIPAVIALTDPEGCPLSRFKDSLGNPTHILRIGESYKEKQRTIQAKKEVEQRRAGGYSRKYASKAKNLADDMVRNTARDLLYYAVTQDAMLIFENLSRGFGRQGKRTFMAERQYTRMEDWLTAKLAYEGLPSKTYLSKTLAQYTSKTCSNCGFTITSADYDRVLEKLKKTATGWMTTINGKELKVEGQITYYNRYKRQNVVKDLSVELDRLSEESVNNDISSWTKGRSGEALSLLKKRFSHRPVQEKFVCLNCGFETHADEQAALNIARSWLFLRSQEYKKYQTNKTSTGNTDKRAFVETWQSFYRKKLKEVWKPAV

SEQ ID NO: 47794 - protein, 979 aa, synthetic construct
  REGION 1..979: note = engineered CasX variant
QEIKRINKIRRRLVKDSNTKKAGKTGPMKTLLVRVMTPDLRERLENLRKKPENIPQPISNTSRANLNKLLTDYTEMKKAILHVYWEEFQKDPVGLMSRVAQPASKKIDQNKLKPEMDEKGNLTTAGFACSQCGQPLFVYKLEQVSEKGKAYTNYFGRCNVAEHEKLILLAQLKPEKDSDEAVTYSLGKFGQRALDFYSIHVTKESTHPVKPLAQIAGNRYASSPVGKALSDACMGTIASFLSKYQDIIIEHQKVVKGNQKRLESLRELAGKENLEYPSVTLPPQPHTKEGVDAYNEVIARVRMWVNLNLWQKLKLSRDDAKPLLRLKGFPSFPLVERQANEVDWWDMVCNVKKLINEKKEDGKVFWQNLAGYKRQEALRPYLSSEEDRKKGKKFARYQLGDLLLHLYKKHGEDWGKVYDEAWERIDKKVEGLSKHIKLEEERRSEDAQSKAALTDWLRAKASFVIEGLKEADKDEFCRCELKLQKWYGDLRGKPFAIEAENSILDISGFSKQYNCAFIWQKDGVKKLNLYLIINYFKGGKLRFKKIKPEAFEANRFYTVINKKSGEIVPMEVNFNFDDPNLIILPLAFGKRQGREFIWNDLLSLETGSLKLANGRVIEKTLYNRRTRQDEPALFVALTFERREVLDSSNIKPMNLIGVDRGENIPAVIALTDPEGCPLSRFKDSLGNPTHILRIGESYKEKQRTIQAKKEVEQRRAGGYSRKYASKAKNLADDMVRNTARDLLYYAVTQDAMLIFENLSRGFGRQGKRTFMAERQYTRMEDWLTAKLAYEGLPSKTYLSKTLAQYTSKTCSNCGFTITSADYDRVLEKLKKTATGWMTTINGKELKVEGQITYYNRYKRQNVVKDLSVELDRLSEESVNNDISSWTKGRSGEALSLLKKRFSHRPVQEKFVCLNCGFETHADEQAALNIARSWLFLRSQEYKKYQTNKTSTGNTDKRAFVETWQSFYRKKLKEVWKPAV

SEQ ID NO: 47795 - protein, 979 aa, synthetic construct
  REGION 1..979: note = engineered CasX variant
QEIKRINKIRRRLVKDSNTKKAGKTGPMKTLLVRVMTPDLRERLENLRKKPENIPQPISNTSRANLNKLLTDYTEMKKAILHVYWEEFQKDPVGLMSRVAQPASKKIDQNKLKPEMDEKGNLTTAGFACSQCGQPLFVYKLEQVSEKGKAYTNYFGRCNVAEHEKLILLAQLKPEKDSDEAVTYSLGKFGQRALDFYSIHVTKESTHPVKPLAQIAGNRYASTPVGKALSDACMGTIASFLSKYQDIIIEHQKVVKGNQKRLESLRELAGKENLEYPSVTLPPQPHTKEGVDAYNEVIARVRMWVNLNLWQKLKLSRDDAKPLLRLKGFPSFPLVERQANEVDWWDMVCNVKKLINEKKEDGKVFWQNLAGYKRQEALRPYLSSEEDRKKGKKFARYQLGDLLLHLYKKHGEDWGKVYDEAWERIDKKVEGLSKHIKLEEERRSEDAQSKAALTDWLRAKASFVIEGLKEADKDEFCRCELKLQKWYGDLRGKPFAIEAENSILDISGFSKQYNCAFIWQKDGVKKLNLYLIINYFKGGKLRFKKIKPEAFEANRFYTVINKKSGEIVPMEVNFNFDDPNLIILPLAFGKRQGREFIWNDLLSLETGSLKLANGRVIEKTLYNRRTRQDEPALFVALTFERREVLDSSNIKPMNLIGVDRGENIPAVIALTDPEGCPLSRFKDSLGNPTHILRIGESYKEKQRTIQAKKEVEQRRAGGYSRKYASKAKNLADDMVRNTARDLLYYAVTQDAMLIFENLSRGFGRQGKRTFMAERQYTRMEDWLTAKLAYEGLPSKTYLSKTLAQYTSKTCSNCGFTITSADYDRVLEKLKKTATGWMTTINGKELKVEGQITYYNRYKRQNVVKDLSVELDRLSEESVNNDISSWTKGRSGEALSLLKKRFSHRPVQEKFVCLNCGFETHADEQAALNIARSWLFLRSQEYKKYQTNKTSTGNTDKRAFVETWQSFYRKKLKEVWKPAV

SEQ ID NO: 47796 - protein, 979 aa, synthetic construct
  REGION 1..979: note = engineered CasX variant
QEIKRINKIRRRLVKDSNTKKAGKTGPMKTLLVRVMTPDLRERLENLRKKPENIPQPISNTSRANLNKLLTDYTEMKKAILHVYWEEFQKDPVGLMSRVAQPASKKIDQNKLKPEMDEKGNLTTAGFACSQCGQPLFVYKLEQVSEKGKAYTNYFGRCNVAEHEKLILLAQLKPEKDSDEAVTYSLGKFGQRALDFYSIHVTKESTHPVKPLAQIAGNRYASAPVGKALSDACMGTIASFLSKYQDIIIEHQKVVKGNQKRLESLRELAGKENLEYPSVTLPPQPHTKEGVDAYNEVIARVRMWVNLNLWQKLKLSRDDAKPLLRLKGFPSFPLVERQANEVDWWDMVCNVKKLINEKKEDGKVFWQNLAGYKRQEALRPYLSSEEDRKKGKKFARYQLGDLLLHLYKKHGEDWGKVYDEAWERIDKKVEGLSKHIKLEEERRSEDAQSKAALTDWLRAKASFVIEGLKEADKDEFCRCELKLQKWYGDLRGKPFAIEAENSILDISGFSKQYNCAFIWQKDGVKKLNLYLIINYFKGGKLRFKKIKPEAFEANRFYTVINKKSGEIVPMEVNFNFDDPNLIILPLAFGKRQGREFIWNDLLSLETGSLKLANGRVIEKTLYNRRTRQDEPALFVALTFERREVLDSSNIKPMNLIGVDRGENIPAVIALTDPEGCPLSRFKDSLGNPTHILRIGESYKEKQRTIQAKKEVEQRRAGGYSRKYASKAKNLADDMVRNTARDLLYYAVTQDAMLIFENLSRGFGRQGKRTFMAERQYTRMEDWLTAKLAYEGLPSKTYLSKTLAQYTSKTCSNCGFTITSADYDRVLEKLKKTATGWMTTINGKELKVEGQITYYNRYKRQNVVKDLSVELDRLSEESVNNDISSWTKGRSGEALSLLKKRFSHRPVQEKFVCLNCGFETHADEQAALNIARSWLFLRSQEYKKYQTNKTSTGNTDKRAFVETWQSFYRKKLKEVWKPAV

SEQ ID NO: 47797 - protein, 979 aa, synthetic construct
  REGION 1..979: note = engineered CasX variant
QEIKRINKIRRRLVKDSNTKKAGKTGPMKTLLVRVMTPDLRERLENLRKKPENIPQPISNTSRANLNKLLTDYTEMKKAILHVYWEEFQKDPVGLMSRVAQPASKKIDQNKLKPEMDEKGNLTTAGFACSQCGQPLFVYKLEQVSEKGKAYTNYFGRCNVAEHEKLILLAQLKPEKDSDEAVTYSLGKFGQRALDFYSIHVTKESTHPVKPLAQIAGNRYASVPVGKALSDACMGTIASFLSKYQDIIIEHQKVVKGNQKRLESLRELAGKENLEYPSVTLPPQPHTKEGVDAYNEVIARVRMWVNLNLWQKLKLSRDDAKPLLRLKGFPSFPLVERQANEVDWWDMVCNVKKLINEKKEDGKVFWQNLAGYKRQEALRPYLSSEEDRKKGKKFARYQLGDLLLHLYKKHGEDWGKVYDEAWERIDKKVEGLSKHIKLEEERRSEDAQSKAALTDWLRAKASFVIEGLKEADKDEFCRCELKLQKWYGDLRGKPFAIEAENSILDISGFSKQYNCAFIWQKDGVKKLNLYLIINYFKGGKLRFKKIKPEAFEANRFYTVINKKSGEIVPMEVNFNFDDPNLIILPLAFGKRQGREFIWNDLLSLETGSLKLANGRVIEKTLYNRRTRQDEPALFVALTFERREVLDSSNIKPMNLIGVDRGENIPAVIALTDPEGCPLSRFKDSLGNPTHILRIGESYKEKQRTIQAKKEVEQRRAGGYSRKYASKAKNLADDMVRNTARDLLYYAVTQDAMLIFENLSRGFGRQGKRTFMAERQYTRMEDWLTAKLAYEGLPSKTYLSKTLAQYTSKTCSNCGFTITSADYDRVLEKLKKTATGWMTTINGKELKVEGQITYYNRYKRQNVVKDLSVELDRLSEESVNNDISSWTKGRSGEALSLLKKRFSHRPVQEKFVCLNCGFETHADEQAALNIARSWLFLRSQEYKKYQTNKTSTGNTDKRAFVETWQSFYRKKLKEVWKPAV

SEQ ID NO: 47798 - protein, 979 aa, synthetic construct
  REGION 1..979: note = engineered CasX variant
QEIKRINKIRRRLVKDSNTKKAGKTGPMKTLLVRVMTPDLRERLENLRKKPENIPQPISNTSRANLNKLLTDYTEMKKAILHVYWEEFQKDPVGLMSRVAQPASKKIDQNKLKPEMDEKGNLTTAGFACSQCGQPLFVYKLEQVSEKGKAYTNYFGRCNVAEHEKLIKLAQLKPEKDSDEAVTYSLGKFGQRALDFYSIHVTKESTHPVKPLAQIAGNRYASGPVGKALSDACMGTIASFLSKYQDIIIEHQKVVKGNQKRLESLRELAGKENLEYPSVTLPPQPHTKEGVDAYNEVIARVRMWVNLNLWQKLKLSRDDAKPLLRLKGFPSFPLVERQANEVDWWDMVCNVKKLINEKKEDGKVFWQNLAGYKRQEALRPYLSSEEDRKKGKKFARYQLGDLLLHLYKKHGEDWGKVYDEAWERIDKKVEGLSKHIKLEEERRSEDAQSKAALTDWLRAKASFVIEGLKEADKDEFCRCELKLQKWYGDLRGKPFAIEAENSILDISGFSKQYNCAFIWQKDGVKKLNLYLIINYFKGGKLRFKKIKPEAFEANRFYTVINKKSGEIVPMEVNFNFDDPNLIILPLAFGKRQGREFIWNDLLSLETGSLKLANGRVIEKTLYNRRTRQDEPALFVALTFERREVLDSSNIKPMNLIGVDRGENIPAVIALTDPEGCPLSRFKDSLGNPTHILRIGESYKEKQRTIQAKKEVEQRRAGGYSRKYASKAKNLADDMVRNTARDLLYYAVTQDAMLIFENLSRGFGRQGKRTFMAERQYTRMEDWLTAKLAYEGLPSKTYLSKTLAQYTSKTCSNCGFTITSADYDRVLEKLKKTATGWMTTINGKELKVEGQITYYNRYKRQNVVKDLSVELDRLSEESVNNDISSWTKGRSGEALSLLKKRFSHRPVQEKFVCLNCGFETHADEQAALNIARSWLFLRSQEYKKYQTNKTSTGNTDKRAFVETWQSFYRKKLKEVWKPAV

SEQ ID NO: 47799 - protein, 978 aa, synthetic construct
  REGION 1..978: note = engineered CasX variant
QEIKRINKIRRRLVKDSNTKKAGKTGPMKTLLVRVMTPDLRERLENLRKKPENIPQPISNTSRANLNKLLTDYTEMKKAILHVYWEEFQKDPVGLMSRVAQPASKKIDQNKLKPEMDEKGNLTTAGFACSQCGQPLFVYKLEQVSEKGKAYTNYFGRCNVAEHEKLILLAQLKPEKDSDEAVTYSLGKFGQRALDFYSIHVTKESTHPVKPLAQIAGNRYASPVGKALSDACMGTIASFLSKYQDIIIEHQKVVKGNQKRLESLRELAGKENLEYPSVTLPPQPHTKEGVDAYNEVIARVRMWVNLNLWQKLKLSRDDAKPLLRLKGFPSFPLVERQANEVDWWDMVCNVKKLINEKKEDGKVFWQNLAGYKRQEALRPYLSSEEDRKKGKKFARYQLGDLLLHLYKKHGEDWGKVYDEAWERIDKKVEGLSKHIKLEEERRSEDAQSKAALTDWLRAKASFVIEGLKEADKDEFCRCELKLQKWYGDLRGKPFAIEAENSILDISGFSKQYNCAFIWQKDGVKKLNLYLIINYFKGGKLRFKKIKPEAFEANRFYTVINKKSGEIVPMEVNFNFDDPNLIILPLAFGKRQGREFIWNDLLSLETGSLKLANGRVIEKTLYNRRTRQDEPALFVALTFERREVLDSSNIKPMNLIGVDRGENIPAVIALTDPEGCPLSRFKDSLGNPTHILRIGESYKEKQRTIQAKKEVEQRRAGGYSRKYASKAKNLADDMVRNTARDLLYYAVTQDAMLIFENLSRGFGRQGKRTFMAERQYTRMEDWLTAKLAYEGLPSKTYLSKTLAQYTSKTCSNCGFTITSADYDRVLEKLKKTATGWMTTINGKELKVEGQITYYNRYKRQNVVKDLSVELDRLSEESVNNDISSWTKGRSGEALSLLKKRFSHRPVQEKFVCLNCGFETHADEQAALNIARSWLFLRSQEYKKYQTNKTSTGNTDKRAFVETWQSFYRKKLKEVWKPAV

SEQ ID NO: 47800 - protein, 979 aa, synthetic construct
  REGION 1..979: note = engineered CasX variant
QEIKRINKIRRRLVKDSNTKKAGKTGPMKTLLVRVMTPDLRERLENLRKKPENIPQPISNTSRANLNKLLTDYTEMKKAILHVYWEEFQKDPVGLMSRVAQPASKKIDQNKLKPEMDEKGNLTTAGFACSQCGQPLFVYKLEQVSEKGKAYTNYFGRCNVAEHEKLILLAQLKPEKDSDEAVTYSLGKFGQRALDFYSIHVTKESTHPVKPLAQIAGNRYASYPVGKALSDACMGTIASFLSKYQDIIIEHQKVVKGNQKRLESLRELAGKENLEYPSVTLPPQPHTKEGVDAYNEVIARVRMWVNLNLWQKLKLSRDDAKPLLRLKGFPSFPLVERQANEVDWWDMVCNVKKLINEKKEDGKVFWQNLAGYKRQEALRPYLSSEEDRKKGKKFARYQLGDLLLHLEKKHPEDWGKVYDEAWERIDKKVEGLSKHIKLEEERRSEDAQSKAALTDWLRAKASFVIEGLKEADKDEFCRCELKLQKWYGDLRGKPFAIEAENSILDISGFSKQYNCAFIWQKDGVKKLNLYLIINYFKGGKLRFKKIKPEAFEANRFYTVINKKSGEIVPMEVNFNFDDPNLIILPLAFGKRQGREFIWNDLLSLETGSLKLANGRVIEKTLYNRRTRQDEPALFVALTFERREVLDSSNIKPMNLIGVDRGENIPAVIALTDPEGCPLSRFKDSLGNPTHILRIGESYKEKQRTIQAKKEVEQRRAGGYSRKYASKAKNLADDMVRNTARDLLYYAVTQDAMLIFENLSRGFGRQGKRTFMAERQYTRMEDWLTAKLAYEGLPSKTYLSKTLAQYTSKTCSNCGFTITSADYDRVLEKLKKTATGWMTTINGKELKVEGQITYYNRYKRQNVVKDLSVELDRLSEESVNNDISSWTKGRSGEALSLLKKRFSHRPVQEKFVCLNCGFETHADEQAALNIARSWLFLRSQEYKKYQTNKTSTGNTDKRAFVETWQSFYRKKLKEVWKPAV

SEQ ID NO: 47801 - protein, 979 aa, synthetic construct
  REGION 1..979: note = engineered CasX variant
QEIKRINKIRRRLVKDSNTKKAGKTGPMKTLLVRVMTPDLRERLENLRKKPENIPQPISNTSRANLNKLLTDYTEMKKAILHVYWEEFQKDPVGLMSRVAQPASKKIDQNKLKPEMDEKGNLTTAGFACSQCGQPLFVYKLEQVSEKGKAYTNYFGRCNVAEHEKLILLAQLKPEKDSDEAVTYSLGKFGQRALDFYSIHVTKESTHPVKPLAQIAGNRYASHPVGKALSDACMGTIASFLSKYQDIIIEHQKVVKGNQKRLESLRELAGKENLEYPSVTLPPQPHTKEGVDAYNEVIARVRMWVNLNLWQKLKLSRDDAKPLLRLKGFPSFPLVERQANEVDWWDMVCNVKKLINEKKEDGKVFWQNLAGYKRQEALRPYLSSEEDRKKGKKFARYQLGDLLLHLEKKHPEDWGKVYDEAWERIDKKVEGLSKHIKLEEERRSEDAQSKAALTDWLRAKASFVIEGLKEADKDEFCRCELKLQKWYGDLRGKPFAIEAENSILDISGFSKQYNCAFIWQKDGVKKLNLYLIINYFKGGKLRFKKIKPEAFEANRFYTVINKKSGEIVPMEVNFNFDDPNLIILPLAFGKRQGREFIWNDLLSLETGSLKLANGRVIEKTLYNRRTRQDEPALFVALTFERREVLDSSNIKPMNLIGVDRGENIPAVIALTDPEGCPLSRFKDSLGNPTHILRIGESYKEKQRTIQAKKEVEQRRAGGYSRKYASKAKNLADDMVRNTARDLLYYAVTQDAMLIFENLSRGFGRQGKRTFMAERQYTRMEDWLTAKLAYEGLPSKTYLSKTLAQYTSKTCSNCGFTITSADYDRVLEKLKKTATGWMTTINGKELKVEGQITYYNRYKRQNVVKDLSVELDRLSEESVNNDISSWTKGRSGEALSLLKKRFSHRPVQEKFVCLNCGFETHADEQAALNIARSWLFLRSQEYKKYQTNKTSTGNTDKRAFVETWQSFYRKKLKEVWKPAV

SEQ ID NO: 47802 - protein, 979 aa, synthetic construct
  REGION 1..979: note = engineered CasX variant
QEIKRINKIRRRLVKDSNTKKAGKTGPMKTLLVRVMTPDLRERLENLRKKPENIPQPISNTSRANLNKLLTDYTEMKKAILHVYWEEFQKDPVGLMSRVAQPASKKIDQNKLKPEMDEKGNLTTAGFACSQCGQPLFVYKLEQVSEKGKAYTNYFGRCNVAEHEKLILLAQLKPEKDSDEAVTYSLGKFGQRALDFYSIHVTKESTHPVKPLAQIAGNRYASSPVGKALSDACMGTIASFLSKYQDIIIEHQKVVKGNQKRLESLRELAGKENLEYPSVTLPPQPHTKEGVDAYNEVIARVRMWVNLNLWQKLKLSRDDAKPLLRLKGFPSFPLVERQANEVDWWDMVCNVKKLINEKKEDGKVFWQNLAGYKRQEALRPYLSSEEDRKKGKKFARYQLGDLLLHLEKKHPEDWGKVYDEAWERIDKKVEGLSKHIKLEEERRSEDAQSKAALTDWLRAKASFVIEGLKEADKDEFCRCELKLQKWYGDLRGKPFAIEAENSILDISGFSKQYNCAFIWQKDGVKKLNLYLIINYFKGGKLRFKKIKPEAFEANRFYTVINKKSGEIVPMEVNFNFDDPNLIILPLAFGKRQGREFIWNDLLSLETGSLKLANGRVIEKTLYNRRTRQDEPALFVALTFERREVLDSSNIKPMNLIGVDRGENIPAVIALTDPEGCPLSRFKDSLGNPTHILRIGESYKEKQRTIQAKKEVEQRRAGGYSRKYASKAKNLADDMVRNTARDLLYYAVTQDAMLIFENLSRGFGRQGKRTFMAERQYTRMEDWLTAKLAYEGLPSKTYLSKTLAQYTSKTCSNCGFTITSADYDRVLEKLKKTATGWMTTINGKELKVEGQITYYNRYKRQNVVKDLSVELDRLSEESVNNDISSWTKGRSGEALSLLKKRFSHRPVQEKFVCLNCGFETHADEQAALNIARSWLFLRSQEYKKYQTNKTSTGNTDKRAFVETWQSFYRKKLKEVWKPAV

SEQ ID NO: 47803 - protein, 979 aa, synthetic construct
  REGION 1..979: note = engineered CasX variant
QEIKRINKIRRRLVKDSNTKKAGKTGPMKTLLVRVMTPDLRERLENLRKKPENIPQPISNTSRANLNKLLTDYTEMKKAILHVYWEEFQKDPVGLMSRVAQPASKKIDQNKLKPEMDEKGNLTTAGFACSQCGQPLFVYKLEQVSEKGKAYTNYFGRCNVAEHEKLILLAQLKPEKDSDEAVTYSLGKFGQRALDFYSIHVTKESTHPVKPLAQIAGNRYASTPVGKALSDACMGTIASFLSKYQDIIIEHQKVVKGNQKRLESLRELAGKENLEYPSVTLPPQPHTKEGVDAYNEVIARVRMWVNLNLWQKLKLSRDDAKPLLRLKGFPSFPLVERQANEVDWWDMVCNVKKLINEKKEDGKVFWQNLAGYKRQEALRPYLSSEEDRKKGKKFARYQLGDLLLHLEKKHPEDWGKVYDEAWERIDKKVEGLSKHIKLEEERRSEDAQSKAALTDWLRAKASFVIEGLKEADKDEFCRCELKLQKWYGDLRGKPFAIEAENSILDISGFSKQYNCAFIWQKDGVKKLNLYLIINYFKGGKLRFKKIKPEAFEANRFYTVINKKSGEIVPMEVNFNFDDPNLIILPLAFGKRQGREFIWNDLLSLETGSLKLANGRVIEKTLYNRRTRQDEPALFVALTFERREVLDSSNIKPMNLIGVDRGENIPAVIALTDPEGCPLSRFKDSLGNPTHILRIGESYKEKQRTIQAKKEVEQRRAGGYSRKYASKAKNLADDMVRNTARDLLYYAVTQDAMLIFENLSRGFGRQGKRTFMAERQYTRMEDWLTAKLAYEGLPSKTYLSKTLAQYTSKTCSNCGFTITSADYDRVLEKLKKTATGWMTTINGKELKVEGQITYYNRYKRQNVVKDLSVELDRLSEESVNNDISSWTKGRSGEALSLLKKRFSHRPVQEKFVCLNCGFETHADEQAALNIARSWLFLRSQEYKKYQTNKTSTGNTDKRAFVETWQSFYRKKLKEVWKPAV

SEQ ID NO: 47804 - protein, 979 aa, synthetic construct
  REGION 1..979: note = engineered CasX variant
QEIKRINKIRRRLVKDSNTKKAGKTGPMKTLLVRVMTPDLRERLENLRKKPENIPQPISNTSRANLNKLLTDYTEMKKAILHVYWEEFQKDPVGLMSRVAQPASKKIDQNKLKPEMDEKGNLTTAGFACSQCGQPLFVYKLEQVSEKGKAYTNYFGRCNVAEHEKLILLAQLKPEKDSDEAVTYSLGKFGQRALDFYSIHVTKESTHPVKPLAQIAGNRYASAPVGKALSDACMGTIASFLSKYQDIIIEHQKVVKGNQKRLESLRELAGKENLEYPSVTLPPQPHTKEGVDAYNEVIARVRMWVNLNLWQKLKLSRDDAKPLLRLKGFPSFPLVERQANEVDWWDMVCNVKKLINEKKEDGKVFWQNLAGYKRQEALRPYLSSEEDRKKGKKFARYQLGDLLLHLEKKHPEDWGKVYDEAWERIDKKVEGLSKHIKLEEERRSEDAQSKAALTDWLRAKASFVIEGLKEADKDEFCRCELKLQKWYGDLRGKPFAIEAENSILDISGFSKQYNCAFIWQKDGVKKLNLYLIINYFKGGKLRFKKIKPEAFEANRFYTVINKKSGEIVPMEVNFNFDDPNLIILPLAFGKRQGREFIWNDLLSLETGSLKLANGRVIEKTLYNRRTRQDEPALFVALTFERREVLDSSNIKPMNLIGVDRGENIPAVIALTDPEGCPLSRFKDSLGNPTHILRIGESYKEKQRTIQAKKEVEQRRAGGYSRKYASKAKNLADDMVRNTARDLLYYAVTQDAMLIFENLSRGFGRQGKRTFMAERQYTRMEDWLTAKLAYEGLPSKTYLSKTLAQYTSKTCSNCGFTITSADYDRVLEKLKKTATGWMTTINGKELKVEGQITYYNRYKRQNVVKDLSVELDRLSEESVNNDISSWTKGRSGEALSLLKKRFSHRPVQEKFVCLNCGFETHADEQAALNIARSWLFLRSQEYKKYQTNKTSTGNTDKRAFVETWQSFYRKKLKEVWKPAV

SEQ ID NO: 47805 - protein, 979 aa, synthetic construct
  REGION 1..979: note = engineered CasX variant
QEIKRINKIRRRLVKDSNTKKAGKTGPMKTLLVRVMTPDLRERLENLRKKPENIPQPISNTSRANLNKLLTDYTEMKKAILHVYWEEFQKDPVGLMSRVAQPASKKIDQNKLKPEMDEKGNLTTAGFACSQCGQPLFVYKLEQVSEKGKAYTNYFGRCNVAEHEKLILLAQLKPEKDSDEAVTYSLGKFGQRALDFYSIHVTKESTHPVKPLAQIAGNRYASVPVGKALSDACMGTIASFLSKYQDIIIEHQKVVKGNQKRLESLRELAGKENLEYPSVTLPPQPHTKEGVDAYNEVIARVRMWVNLNLWQKLKLSRDDAKPLLRLKGFPSFPLVERQANEVDWWDMVCNVKKLINEKKEDGKVFWQNLAGYKRQEALRPYLSSEEDRKKGKKFARYQLGDLLLHLEKKHPEDWGKVYDEAWERIDKKVEGLSKHIKLEEERRSEDAQSKAALTDWLRAKASFVIEGLKEADKDEFCRCELKLQKWYGDLRGKPFAIEAENSILDISGFSKQYNCAFIWQKDGVKKLNLYLIINYFKGGKLRFKKIKPEAFEANRFYTVINKKSGEIVPMEVNFNFDDPNLIILPLAFGKRQGREFIWNDLLSLETGSLKLANGRVIEKTLYNRRTRQDEPALFVALTFERREVLDSSNIKPMNLIGVDRGENIPAVIALTDPEGCPLSRFKDSLGNPTHILRIGESYKEKQRTIQAKKEVEQRRAGGYSRKYASKAKNLADDMVRNTARDLLYYAVTQDAMLIFENLSRGFGRQGKRTFMAERQYTRMEDWLTAKLAYEGLPSKTYLSKTLAQYTSKTCSNCGFTITSADYDRVLEKLKKTATGWMTTINGKELKVEGQITYYNRYKRQNVVKDLSVELDRLSEESVNNDISSWTKGRSGEALSLLKKRFSHRPVQEKFVCLNCGFETHADEQAALNIARSWLFLRSQEYKKYQTNKTSTGNTDKRAFVETWQSFYRKKLKEVWKPAV

SEQ ID NO: 47806 - protein, 979 aa, synthetic construct
  REGION 1..979: note = engineered CasX variant
QEIKRINKIRRRLVKDSNTKKAGKTGPMKTLLVRVMTPDLRERLENLRKKPENIPQPISNTSRANLNKLLTDYTEMKKAILHVYWEEFQKDPVGLMSRVAQPASKKIDQNKLKPEMDEKGNLTTAGFACSQCGQPLFVYKLEQVSEKGKAYTNYFGRCNVAEHEKLIKLAQLKPEKDSDEAVTYSLGKFGQRALDFYSIHVTKESTHPVKPLAQIAGNRYASGPVGKALSDACMGTIASFLSKYQDIIIEHQKVVKGNQKRLESLRELAGKENLEYPSVTLPPQPHTKEGVDAYNEVIARVRMWVNLNLWQKLKLSRDDAKPLLRLKGFPSFPLVERQANEVDWWDMVCNVKKLINEKKEDGKVFWQNLAGYKRQEALRPYLSSEEDRKKGKKFARYQLGDLLLHLEKKHPEDWGKVYDEAWERIDKKVEGLSKHIKLEEERRSEDAQSKAALTDWLRAKASFVIEGLKEADKDEFCRCELKLQKWYGDLRGKPFAIEAENSILDISGFSKQYNCAFIWQKDGVKKLNLYLIINYFKGGKLRFKKIKPEAFEANRFYTVINKKSGEIVPMEVNFNFDDPNLIILPLAFGKRQGREFIWNDLLSLETGSLKLANGRVIEKTLYNRRTRQDEPALFVALTFERREVLDSSNIKPMNLIGVDRGENIPAVIALTDPEGCPLSRFKDSLGNPTHILRIGESYKEKQRTIQAKKEVEQRRAGGYSRKYASKAKNLADDMVRNTARDLLYYAVTQDAMLIFENLSRGFGRQGKRTFMAERQYTRMEDWLTAKLAYEGLPSKTYLSKTLAQYTSKTCSNCGFTITSADYDRVLEKLKKTATGWMTTINGKELKVEGQITYYNRYKRQNVVKDLSVELDRLSEESVNNDISSWTKGRSGEALSLLKKRFSHRPVQEKFVCLNCGFETHADEQAALNIARSWLFLRSQEYKKYQTNKTSTGNTDKRAFVETWQSFYRKKLKEVWKPAV

SEQ ID NO: 47807 - protein, 978 aa, synthetic construct
  REGION 1..978: note = engineered CasX variant
QEIKRINKIRRRLVKDSNTKKAGKTGPMKTLLVRVMTPDLRERLENLRKKPENIPQPISNTSRANLNKLLTDYTEMKKAILHVYWEEFQKDPVGLMSRVAQPASKKIDQNKLKPEMDEKGNLTTAGFACSQCGQPLFVYKLEQVSEKGKAYTNYFGRCNVAEHEKLILLAQLKPEKDSDEAVTYSLGKFGQRALDFYSIHVTKESTHPVKPLAQIAGNRYASPVGKALSDACMGTIASFLSKYQDIIIEHQKVVKGNQKRLESLRELAGKENLEYPSVTLPPQPHTKEGVDAYNEVIARVRMWVNLNLWQKLKLSRDDAKPLLRLKGFPSFPLVERQANEVDWWDMVCNVKKLINEKKEDGKVFWQNLAGYKRQEALRPYLSSEEDRKKGKKFARYQLGDLLLHLEKKHPEDWGKVYDEAWERIDKKVEGLSKHIKLEEERRSEDAQSKAALTDWLRAKASFVIEGLKEADKDEFCRCELKLQKWYGDLRGKPFAIEAENSILDISGFSKQYNCAFIWQKDGVKKLNLYLIINYFKGGKLRFKKIKPEAFEANRFYTVINKKSGEIVPMEVNFNFDDPNLIILPLAFGKRQGREFIWNDLLSLETGSLKLANGRVIEKTLYNRRTRQDEPALFVALTFERREVLDSSNIKPMNLIGVDRGENIPAVIALTDPEGCPLSRFKDSLGNPTHILRIGESYKEKQRTIQAKKEVEQRRAGGYSRKYASKAKNLADDMVRNTARDLLYYAVTQDAMLIFENLSRGFGRQGKRTFMAERQYTRMEDWLTAKLAYEGLPSKTYLSKTLAQYTSKTCSNCGFTITSADYDRVLEKLKKTATGWMTTINGKELKVEGQITYYNRYKRQNVVKDLSVELDRLSEESVNNDISSWTKGRSGEALSLLKKRFSHRPVQEKFVCLNCGFETHADEQAALNIARSWLFLRSQEYKKYQTNKTSTGNTDKRAFVETWQSFYRKKLKEVWKPAV

SEQ ID NO: 47808 - protein, 980 aa, synthetic construct
  REGION 1..980: note = engineered CasX variant
QEIKRINKIRRRLVKDSNTKKAGKTGPMKTLLVRVMTPDLRERLENLRKKPENIPQPISNTSRANLNKLLTDYTEMKKAILHVYWEEFQKDPVGLMSRVAQPASKKIDQNKLKPEMDEKGNLTTAGFACSQCGQPLFVYKLEQVSEKGKAYTNYFGRCNVAEHEKLILLAQLKPEKDSDEAVTYSLGKFGQRALDFYSIHVTKESTHPVKPLAQIAGNRYASYPVGKALSDACMGTIASFLSKYQDIIIEHQKVVKGNQKRLESLRELAGKENLEYPSVTLPPQPHTKEGVDAYNEVIARVRMWVNLNLWQKLKLSRDDAKPLLRLKGFPSFPLVERQANEVDWWDMVCNVKKLINEKKEDGKVFWQNLAGYKRQEALRPYLSSEEDRKKGKKFARYQLGDLLLHLEKKHGERDWGKVYDEAWERIDKKVEGLSKHIKLEEERRSEDAQSKAALTDWLRAKASFVIEGLKEADKDEFCRCELKLQKWYGDLRGKPFAIEAENSILDISGFSKQYNCAFIWQKDGVKKLNLYLIINYFKGGKLRFKKIKPEAFEANRFYTVINKKSGEIVPMEVNFNFDDPNLIILPLAFGKRQGREFIWNDLLSLETGSLKLANGRVIEKTLYNRRTRQDEPALFVALTFERREVLDSSNIKPMNLIGVDRGENIPAVIALTDPEGCPLSRFKDSLGNPTHILRIGESYKEKQRTIQAKKEVEQRRAGGYSRKYASKAKNLADDMVRNTARDLLYYAVTQDAMLIFENLSRGFGRQGKRTFMAERQYTRMEDWLTAKLAYEGLPSKTYLSKTLAQYTSKTCSNCGFTITSADYDRVLEKLKKTATGWMTTINGKELKVEGQITYYNRYKRQNVVKDLSVELDRLSEESVNNDISSWTKGRSGEALSLLKKRFSHRPVQEKFVCLNCGFETHADEQAALNIARSWLFLRSQEYKKYQTNKTSTGNTDKRAFVETWQSFYRKKLKEVWKPAV

SEQ ID NO: 47809 - protein, 980 aa, synthetic construct
  REGION 1..980: note = engineered CasX variant
QEIKRINKIRRRLVKDSNTKKAGKTGPMKTLLVRVMTPDLRERLENLRKKPENIPQPISNTSRANLNKLLTDYTEMKKAILHVYWEEFQKDPVGLMSRVAQPASKKIDQNKLKPEMDEKGNLTTAGFACSQCGQPLFVYKLEQVSEKGKAYTNYFGRCNVAEHEKLILLAQLKPEKDSDEAVTYSLGKFGQRALDFYSIHVTKESTHPVKPLAQIAGNRYASHPVGKALSDACMGTIASFLSKYQDIIIEHQKVVKGNQKRLESLRELAGKENLEYPSVTLPPQPHTKEGVDAYNEVIARVRMWVNLNLWQKLKLSRDDAKPLLRLKGFPSFPLVERQANEVDWWDMVCNVKKLINEKKEDGKVFWQNLAGYKRQEALRPYLSSEEDRKKGKKFARYQLGDLLLHLEKKHGERDWGKVYDEAWERIDKKVEGLSKHIKLEEERRSEDAQSKAALTDWLRAKASFVIEGLKEADKDEFCRCELKLQKWYGDLRGKPFAIEAENSILDISGFSKQYNCAFIWQKDGVKKLNLYLIINYFKGGKLRFKKIKPEAFEANRFYTVINKKSGEIVPMEVNFNFDDPNLIILPLAFGKRQGREFIWNDLLSLETGSLKLANGRVIEKTLYNRRTRQDEPALFVALTFERREVLDSSNIKPMNLIGVDRGENIPAVIALTDPEGCPLSRFKDSLGNPTHILRIGESYKEKQRTIQAKKEVEQRRAGGYSRKYASKAKNLADDMVRNTARDLLYYAVTQDAMLIFENLSRGFGRQGKRTFMAERQYTRMEDWLTAKLAYEGLPSKTYLSKTLAQYTSKTCSNCGFTITSADYDRVLEKLKKTATGWMTTINGKELKVEGQITYYNRYKRQNVVKDLSVELDRLSEESVNNDISSWTKGRSGEALSLLKKRFSHRPVQEKFVCLNCGFETHADEQAALNIARSWLFLRSQEYKKYQTNKTSTGNTDKRAFVETWQSFYRKKLKEVWKPAV

SEQ ID NO: 47810 - protein, 980 aa, synthetic construct
  REGION 1..980: note = engineered CasX variant
QEIKRINKIRRRLVKDSNTKKAGKTGPMKTLLVRVMTPDLRERLENLRKKPENIPQPISNTSRANLNKLLTDYTEMKKAILHVYWEEFQKDPVGLMSRVAQPASKKIDQNKLKPEMDEKGNLTTAGFACSQCGQPLFVYKLEQVSEKGKAYTNYFGRCNVAEHEKLILLAQLKPEKDSDEAVTYSLGKFGQRALDFYSIHVTKESTHPVKPLAQIAGNRYASSPVGKALSDACMGTIASFLSKYQDIIIEHQKVVKGNQKRLESLRELAGKENLEYPSVTLPPQPHTKEGVDAYNEVIARVRMWVNLNLWQKLKLSRDDAKPLLRLKGFPSFPLVERQANEVDWWDMVCNVKKLINEKKEDGKVFWQNLAGYKRQEALRPYLSSEEDRKKGKKFARYQLGDLLLHLEKKHGERDWGKVYDEAWERIDKKVEGLSKHIKLEEERRSEDAQSKAALTDWLRAKASFVIEGLKEADKDEFCRCELKLQKWYGDLRGKPFAIEAENSILDISGFSKQYNCAFIWQKDGVKKLNLYLIINYFKGGKLRFKKIKPEAFEANRFYTVINKKSGEIVPMEVNFNFDDPNLIILPLAFGKRQGREFIWNDLLSLETGSLKLANGRVIEKTLYNRRTRQDEPALFVALTFERREVLDSSNIKPMNLIGVDRGENIPAVIALTDPEGCPLSRFKDSLGNPTHILRIGESYKEKQRTIQAKKEVEQRRAGGYSRKYASKAKNLADDMVRNTARDLLYYAVTQDAMLIFENLSRGFGRQGKRTFMAERQYTRMEDWLTAKLAYEGLPSKTYLSKTLAQYTSKTCSNCGFTITSADYDRVLEKLKKTATGWMTTINGKELKVEGQITYYNRYKRQNVVKDLSVELDRLSEESVNNDISSWTKGRSGEALSLLKKRFSHRPVQEKFVCLNCGFETHADEQAALNIARSWLFLRSQEYKKYQTNKTSTGNTDKRAFVETWQSFYRKKLKEVWKPAV

SEQ ID NO: 47811 - protein, 980 aa, synthetic construct
  REGION 1..980: note = engineered CasX variant
QEIKRINKIRRRLVKDSNTKKAGKTGPMKTLLVRVMTPDLRERLENLRKKPENIPQPISNTSRANLNKLLTDYTEMKKAILHVYWEEFQKDPVGLMSRVAQPASKKIDQNKLKPEMDEKGNLTTAGFACSQCGQPLFVYKLEQVSEKGKAYTNYFGRCNVAEHEKLILLAQLKPEKDSDEAVTYSLGKFGQRALDFYSIHVTKESTHPVKPLAQIAGNRYASTPVGKALSDACMGTIASFLSKYQDIIIEHQKVVKGNQKRLESLRELAGKENLEYPSVTLPPQPHTKEGVDAYNEVIARVRMWVNLNLWQKLKLSRDDAKPLLRLKGFPSFPLVERQANEVDWWDMVCNVKKLINEKKEDGKVFWQNLAGYKRQEALRPYLSSEEDRKKGKKFARYQLGDLLLHLEKKHGERDWGKVYDEAWERIDKKVEGLSKHIKLEEERRSEDAQSKAALTDWLRAKASFVIEGLKEADKDEFCRCELKLQKWYGDLRGKPFAIEAENSILDISGFSKQYNCAFIWQKDGVKKLNLYLIINYFKGGKLRFKKIKPEAFEANRFYTVINKKSGEIVPMEVNFNFDDPNLIILPLAFGKRQGREFIWNDLLSLETGSLKLANGRVIEKTLYNRRTRQDEPALFVALTFERREVLDSSNIKPMNLIGVDRGENIPAVIALTDPEGCPLSRFKDSLGNPTHILRIGESYKEKQRTIQAKKEVEQRRAGGYSRKYASKAKNLADDMVRNTARDLLYYAVTQDAMLIFENLSRGFGRQGKRTFMAERQYTRMEDWLTAKLAYEGLPSKTYLSKTLAQYTSKTCSNCGFTITSADYDRVLEKLKKTATGWMTTINGKELKVEGQITYYNRYKRQNVVKDLSVELDRLSEESVNNDISSWTKGRSGEALSLLKKRFSHRPVQEKFVCLNCGFETHADEQAALNIARSWLFLRSQEYKKYQTNKTSTGNTDKRAFVETWQSFYRKKLKEVWKPAV

SEQ ID NO: 47812 - protein, 980 aa, synthetic construct
  REGION 1..980: note = engineered CasX variant
QEIKRINKIRRRLVKDSNTKKAGKTGPMKTLLVRVMTPDLRERLENLRKKPENIPQPISNTSRANLNKLLTDYTEMKKAILHVYWEEFQKDPVGLMSRVAQPASKKIDQNKLKPEMDEKGNLTTAGFACSQCGQPLFVYKLEQVSEKGKAYTNYFGRCNVAEHEKLILLAQLKPEKDSDEAVTYSLGKFGQRALDFYSIHVTKESTHPVKPLAQIAGNRYASAPVGKALSDACMGTIASFLSKYQDIIIEHQKVVKGNQKRLESLRELAGKENLEYPSVTLPPQPHTKEGVDAYNEVIARVRMWVNLNLWQKLKLSRDDAKPLLRLKGFPSFPLVERQANEVDWWDMVCNVKKLINEKKEDGKVFWQNLAGYKRQEALRPYLSSEEDRKKGKKFARYQLGDLLLHLEKKHGERDWGKVYDEAWERIDKKVEGLSKHIKLEEERRSEDAQSKAALTDWLRAKASFVIEGLKEADKDEFCRCELKLQKWYGDLRGKPFAIEAENSILDISGFSKQYNCAFIWQKDGVKKLNLYLIINYFKGGKLRFKKIKPEAFEANRFYTVINKKSGEIVPMEVNFNFDDPNLIILPLAFGKRQGREFIWNDLLSLETGSLKLANGRVIEKTLYNRRTRQDEPALFVALTFERREVLDSSNIKPMNLIGVDRGENIPAVIALTDPEGCPLSRFKDSLGNPTHILRIGESYKEKQRTIQAKKEVEQRRAGGYSRKYASKAKNLADDMVRNTARDLLYYAVTQDAMLIFENLSRGFGRQGKRTFMAERQYTRMEDWLTAKLAYEGLPSKTYLSKTLAQYTSKTCSNCGFTITSADYDRVLEKLKKTATGWMTTINGKELKVEGQITYYNRYKRQNVVKDLSVELDRLSEESVNNDISSWTKGRSGEALSLLKKRFSHRPVQEKFVCLNCGFETHADEQAALNIARSWLFLRSQEYKKYQTNKTSTGNTDKRAFVETWQSFYRKKLKEVWKPAV

SEQ ID NO: 47813 - protein, 980 aa, synthetic construct
  REGION 1..980: note = engineered CasX variant
QEIKRINKIRRRLVKDSNTKKAGKTGPMKTLLVRVMTPDLRERLENLRKKPENIPQPISNTSRANLNKLLTDYTEMKKAILHVYWEEFQKDPVGLMSRVAQPASKKIDQNKLKPEMDEKGNLTTAGFACSQCGQPLFVYKLEQVSEKGKAYTNYFGRCNVAEHEKLILLAQLKPEKDSDEAVTYSLGKFGQRALDFYSIHVTKESTHPVKPLAQIAGNRYASVPVGKALSDACMGTIASFLSKYQDIIIEHQKVVKGNQKRLESLRELAGKENLEYPSVTLPPQPHTKEGVDAYNEVIARVRMWVNLNLWQKLKLSRDDAKPLLRLKGFPSFPLVERQANEVDWWDMVCNVKKLINEKKEDGKVFWQNLAGYKRQEALRPYLSSEEDRKKGKKFARYQLGDLLLHLEKKHGERDWGKVYDEAWERIDKKVEGLSKHIKLEEERRSEDAQSKAALTDWLRAKASFVIEGLKEADKDEFCRCELKLQKWYGDLRGKPFAIEAENSILDISGFSKQYNCAFIWQKDGVKKLNLYLIINYFKGGKLRFKKIKPEAFEANRFYTVINKKSGEIVPMEVNFNFDDPNLIILPLAFGKRQGREFIWNDLLSLETGSLKLANGRVIEKTLYNRRTRQDEPALFVALTFERREVLDSSNIKPMNLIGVDRGENIPAVIALTDPEGCPLSRFKDSLGNPTHILRIGESYKEKQRTIQAKKEVEQRRAGGYSRKYASKAKNLADDMVRNTARDLLYYAVTQDAMLIFENLSRGFGRQGKRTFMAERQYTRMEDWLTAKLAYEGLPSKTYLSKTLAQYTSKTCSNCGFTITSADYDRVLEKLKKTATGWMTTINGKELKVEGQITYYNRYKRQNVVKDLSVELDRLSEESVNNDISSWTKGRSGEALSLLKKRFSHRPVQEKFVCLNCGFETHADEQAALNIARSWLFLRSQEYKKYQTNKTSTGNTDKRAFVETWQSFYRKKLKEVWKPAV

SEQ ID NO: 47814 - protein, 980 aa, synthetic construct
  REGION 1..980: note = engineered CasX variant
QEIKRINKIRRRLVKDSNTKKAGKTGPMKTLLVRVMTPDLRERLENLRKKPENIPQPISNTSRANLNKLLTDYTEMKKAILHVYWEEFQKDPVGLMSRVAQPASKKIDQNKLKPEMDEKGNLTTAGFACSQCGQPLFVYKLEQVSEKGKAYTNYFGRCNVAEHEKLIKLAQLKPEKDSDEAVTYSLGKFGQRALDFYSIHVTKESTHPVKPLAQIAGNRYASGPVGKALSDACMGTIASFLSKYQDIIIEHQKVVKGNQKRLESLRELAGKENLEYPSVTLPPQPHTKEGVDAYNEVIARVRMWVNLNLWQKLKLSRDDAKPLLRLKGFPSFPLVERQANEVDWWDMVCNVKKLINEKKEDGKVFWQNLAGYKRQEALRPYLSSEEDRKKGKKFARYQLGDLLLHLEKKHGERDWGKVYDEAWERIDKKVEGLSKHIKLEEERRSEDAQSKAALTDWLRAKASFVIEGLKEADKDEFCRCELKLQKWYGDLRGKPFAIEAENSILDISGFSKQYNCAFIWQKDGVKKLNLYLIINYFKGGKLRFKKIKPEAFEANRFYTVINKKSGEIVPMEVNFNFDDPNLIILPLAFGKRQGREFIWNDLLSLETGSLKLANGRVIEKTLYNRRTRQDEPALFVALTFERREVLDSSNIKPMNLIGVDRGENIPAVIALTDPEGCPLSRFKDSLGNPTHILRIGESYKEKQRTIQAKKEVEQRRAGGYSRKYASKAKNLADDMVRNTARDLLYYAVTQDAMLIFENLSRGFGRQGKRTFMAERQYTRMEDWLTAKLAYEGLPSKTYLSKTLAQYTSKTCSNCGFTITSADYDRVLEKLKKTATGWMTTINGKELKVEGQITYYNRYKRQNVVKDLSVELDRLSEESVNNDISSWTKGRSGEALSLLKKRFSHRPVQEKFVCLNCGFETHADEQAALNIARSWLFLRSQEYKKYQTNKTSTGNTDKRAFVETWQSFYRKKLKEVWKPAV

SEQ ID NO: 47815 - protein, 979 aa, synthetic construct
  REGION 1..979: note = engineered CasX variant
QEIKRINKIRRRLVKDSNTKKAGKTGPMKTLLVRVMTPDLRERLENLRKKPENIPQPISNTSRANLNKLLTDYTEMKKAILHVYWEEFQKDPVGLMSRVAQPASKKIDQNKLKPEMDEKGNLTTAGFACSQCGQPLFVYKLEQVSEKGKAYTNYFGRCNVAEHEKLILLAQLKPEKDSDEAVTYSLGKFGQRALDFYSIHVTKESTHPVKPLAQIAGNRYASPVGKALSDACMGTIASFLSKYQDIIIEHQKVVKGNQKRLESLRELAGKENLEYPSVTLPPQPHTKEGVDAYNEVIARVRMWVNLNLWQKLKLSRDDAKPLLRLKGFPSFPLVERQANEVDWWDMVCNVKKLINEKKEDGKVFWQNLAGYKRQEALRPYLSSEEDRKKGKKFARYQLGDLLLHLEKKHGERDWGKVYDEAWERIDKKVEGLSKHIKLEEERRSEDAQSKAALTDWLRAKASFVIEGLKEADKDEFCRCELKLQKWYGDLRGKPFAIEAENSILDISGFSKQYNCAFIWQKDGVKKLNLYLIINYFKGGKLRFKKIKPEAFEANRFYTVINKKSGEIVPMEVNFNFDDPNLIILPLAFGKRQGREFIWNDLLSLETGSLKLANGRVIEKTLYNRRTRQDEPALFVALTFERREVLDSSNIKPMNLIGVDRGENIPAVIALTDPEGCPLSRFKDSLGNPTHILRIGESYKEKQRTIQAKKEVEQRRAGGYSRKYASKAKNLADDMVRNTARDLLYYAVTQDAMLIFENLSRGFGRQGKRTFMAERQYTRMEDWLTAKLAYEGLPSKTYLSKTLAQYTSKTCSNCGFTITSADYDRVLEKLKKTATGWMTTINGKELKVEGQITYYNRYKRQNVVKDLSVELDRLSEESVNNDISSWTKGRSGEALSLLKKRFSHRPVQEKFVCLNCGFETHADEQAALNIARSWLFLRSQEYKKYQTNKTSTGNTDKRAFVETWQSFYRKKLKEVWKPAV

SEQ ID NO: 47816 - protein, 980 aa, synthetic construct
  REGION 1..980: note = engineered CasX variant
QEIKRINKIRRRLVKDSNTKKAGKTGPMKTLLVRVMTPDLRERLENLRKKPENIPQPISNTSRANLNKLLTDYTEMKKAILHVYWEEFQKDPVGLMSRVAQPASKKIDQNKLKPEMDEKGNLTTAGFACSQCGQPLFVYKLEQVSEKGKAYTNYFGRCNVAEHEKLILLAQLKPEKDSDEAVTYSLGKFGQRALDFYSIHVTKESTHPVKPLAQIAGNRYASYPVGKALSDACMGTIASFLSKYQDIIIEHQKVVKGNQKRLESLRELAGKENLEYPSVTLPPQPHTKEGVDAYNEVIARVRMWVNLNLWQKLKLSRDDAKPLLRLKGFPSFPLVERQANEVDWWDMVCNVKKLINEKKEDGKVFWQNLAGYKRQEALRPYLSSEEDRKKGKKFARYQLGDLLLHLEKKHGEYDWGKVYDEAWERIDKKVEGLSKHIKLEEERRSEDAQSKAALTDWLRAKASFVIEGLKEADKDEFCRCELKLQKWYGDLRGKPFAIEAENSILDISGFSKQYNCAFIWQKDGVKKLNLYLIINYFKGGKLRFKKIKPEAFEANRFYTVINKKSGEIVPMEVNFNFDDPNLIILPLAFGKRQGREFIWNDLLSLETGSLKLANGRVIEKTLYNRRTRQDEPALFVALTFERREVLDSSNIKPMNLIGVDRGENIPAVIALTDPEGCPLSRFKDSLGNPTHILRIGESYKEKQRTIQAKKEVEQRRAGGYSRKYASKAKNLADDMVRNTARDLLYYAVTQDAMLIFENLSRGFGRQGKRTFMAERQYTRMEDWLTAKLAYEGLPSKTYLSKTLAQYTSKTCSNCGFTITSADYDRVLEKLKKTATGWMTTINGKELKVEGQITYYNRYKRQNVVKDLSVELDRLSEESVNNDISSWTKGRSGEALSLLKKRFSHRPVQEKFVCLNCGFETHADEQAALNIARSWLFLRSQEYKKYQTNKTSTGNTDKRAFVETWQSFYRKKLKEVWKPAV

SEQ ID NO: 47817 - protein, 980 aa, synthetic construct
  REGION 1..980: note = engineered CasX variant
QEIKRINKIRRRLVKDSNTKKAGKTGPMKTLLVRVMTPDLRERLENLRKKPENIPQPISNTSRANLNKLLTDYTEMKKAILHVYWEEFQKDPVGLMSRVAQPASKKIDQNKLKPEMDEKGNLTTAGFACSQCGQPLFVYKLEQVSEKGKAYTNYFGRCNVAEHEKLILLAQLKPEKDSDEAVTYSLGKFGQRALDFYSIHVTKESTHPVKPLAQIAGNRYASHPVGKALSDACMGTIASFLSKYQDIIIEHQKVVKGNQKRLESLRELAGKENLEYPSVTLPPQPHTKEGVDAYNEVIARVRMWVNLNLWQKLKLSRDDAKPLLRLKGFPSFPLVERQANEVDWWDMVCNVKKLINEKKEDGKVFWQNLAGYKRQEALRPYLSSEEDRKKGKKFARYQLGDLLLHLEKKHGEYDWGKVYDEAWERIDKKVEGLSKHIKLEEERRSEDAQSKAALTDWLRAKASFVIEGLKEADKDEFCRCELKLQKWYGDLRGKPFAIEAENSILDISGFSKQYNCAFIWQKDGVKKLNLYLIINYFKGGKLRFKKIKPEAFEANRFYTVINKKSGEIVPMEVNFNFDDPNLIILPLAFGKRQGREFIWNDLLSLETGSLKLANGRVIEKTLYNRRTRQDEPALFVALTFERREVLDSSNIKPMNLIGVDRGENIPAVIALTDPEGCPLSRFKDSLGNPTHILRIGESYKEKQRTIQAKKEVEQRRAGGYSRKYASKAKNLADDMVRNTARDLLYYAVTQDAMLIFENLSRGFGRQGKRTFMAERQYTRMEDWLTAKLAYEGLPSKTYLSKTLAQYTSKTCSNCGFTITSADYDRVLEKLKKTATGWMTTINGKELKVEGQITYYNRYKRQNVVKDLSVELDRLSEESVNNDISSWTKGRSGEALSLLKKRFSHRPVQEKFVCLNCGFETHADEQAALNIARSWLFLRSQEYKKYQTNKTSTGNTDKRAFVETWQSFYRKKLKEVWKPAV

SEQ ID NO: 47818 - protein, 980 aa, synthetic construct
  REGION 1..980: note = engineered CasX variant
QEIKRINKIRRRLVKDSNTKKAGKTGPMKTLLVRVMTPDLRERLENLRKKPENIPQPISNTSRANLNKLLTDYTEMKKAILHVYWEEFQKDPVGLMSRVAQPASKKIDQNKLKPEMDEKGNLTTAGFACSQCGQPLFVYKLEQVSEKGKAYTNYFGRCNVAEHEKLILLAQLKPEKDSDEAVTYSLGKFGQRALDFYSIHVTKESTHPVKPLAQIAGNRYASSPVGKALSDACMGTIASFLSKYQDIIIEHQKVVKGNQKRLESLRELAGKENLEYPSVTLPPQPHTKEGVDAYNEVIARVRMWVNLNLWQKLKLSRDDAKPLLRLKGFPSFPLVERQANEVDWWDMVCNVKKLINEKKEDGKVFWQNLAGYKRQEALRPYLSSEEDRKKGKKFARYQLGDLLLHLEKKHGEYDWGKVYDEAWERIDKKVEGLSKHIKLEEERRSEDAQSKAALTDWLRAKASFVIEGLKEADKDEFCRCELKLQKWYGDLRGKPFAIEAENSILDISGFSKQYNCAFIWQKDGVKKLNLYLIINYFKGGKLRFKKIKPEAFEANRFYTVINKKSGEIVPMEVNFNFDDPNLIILPLAFGKRQGREFIWNDLLSLETGSLKLANGRVIEKTLYNRRTRQDEPALFVALTFERREVLDSSNIKPMNLIGVDRGENIPAVIALTDPEGCPLSRFKDSLGNPTHILRIGESYKEKQRTIQAKKEVEQRRAGGYSRKYASKAKNLADDMVRNTARDLLYYAVTQDAMLIFENLSRGFGRQGKRTFMAERQYTRMEDWLTAKLAYEGLPSKTYLSKTLAQYTSKTCSNCGFTITSADYDRVLEKLKKTATGWMTTINGKELKVEGQITYYNRYKRQNVVKDLSVELDRLSEESVNNDISSWTKGRSGEALSLLKKRFSHRPVQEKFVCLNCGFETHADEQAALNIARSWLFLRSQEYKKYQTNKTSTGNTDKRAFVETWQSFYRKKLKEVWKPAV

SEQ ID NO: 47819 - protein, 980 aa, synthetic construct
  REGION 1..980: note = engineered CasX variant
QEIKRINKIRRRLVKDSNTKKAGKTGPMKTLLVRVMTPDLRERLENLRKKPENIPQPISNTSRANLNKLLTDYTEMKKAILHVYWEEFQKDPVGLMSRVAQPASKKIDQNKLKPEMDEKGNLTTAGFACSQCGQPLFVYKLEQVSEKGKAYTNYFGRCNVAEHEKLILLAQLKPEKDSDEAVTYSLGKFGQRALDFYSIHVTKESTHPVKPLAQIAGNRYASTPVGKALSDACMGTIASFLSKYQDIIIEHQKVVKGNQKRLESLRELAGKENLEYPSVTLPPQPHTKEGVDAYNEVIARVRMWVNLNLWQKLKLSRDDAKPLLRLKGFPSFPLVERQANEVDWWDMVCNVKKLINEKKEDGKVFWQNLAGYKRQEALRPYLSSEEDRKKGKKFARYQLGDLLLHLEKKHGEYDWGKVYDEAWERIDKKVEGLSKHIKLEEERRSEDAQSKAALTDWLRAKASFVIEGLKEADKDEFCRCELKLQKWYGDLRGKPFAIEAENSILDISGFSKQYNCAFIWQKDGVKKLNLYLIINYFKGGKLRFKKIKPEAFEANRFYTVINKKSGEIVPMEVNFNFDDPNLIILPLAFGKRQGREFIWNDLLSLETGSLKLANGRVIEKTLYNRRTRQDEPALFVALTFERREVLDSSNIKPMNLIGVDRGENIPAVIALTDPEGCPLSRFKDSLGNPTHILRIGESYKEKQRTIQAKKEVEQRRAGGYSRKYASKAKNLADDMVRNTARDLLYYAVTQDAMLIFENLSRGFGRQGKRTFMAERQYTRMEDWLTAKLAYEGLPSKTYLSKTLAQYTSKTCSNCGFTITSADYDRVLEKLKKTATGWMTTINGKELKVEGQITYYNRYKRQNVVKDLSVELDRLSEESVNNDISSWTKGRSGEALSLLKKRFSHRPVQEKFVCLNCGFETHADEQAALNIARSWLFLRSQEYKKYQTNKTSTGNTDKRAFVETWQSFYRKKLKEVWKPAV

SEQ ID NO: 47820 - protein, 980 aa, synthetic construct
  REGION 1..980: note = engineered CasX variant
QEIKRINKIRRRLVKDSNTKKAGKTGPMKTLLVRVMTPDLRERLENLRKKPENIPQPISNTSRANLNKLLTDYTEMKKAILHVYWEEFQKDPVGLMSRVAQPASKKIDQNKLKPEMDEKGNLTTAGFACSQCGQPLFVYKLEQVSEKGKAYTNYFGRCNVAEHEKLILLAQLKPEKDSDEAVTYSLGKFGQRALDFYSIHVTKESTHPVKPLAQIAGNRYASAPVGKALSDACMGTIASFLSKYQDIIIEHQKVVKGNQKRLESLRELAGKENLEYPSVTLPPQPHTKEGVDAYNEVIARVRMWVNLNLWQKLKLSRDDAKPLLRLKGFPSFPLVERQANEVDWWDMVCNVKKLINEKKEDGKVFWQNLAGYKRQEALRPYLSSEEDRKKGKKFARYQLGDLLLHLEKKHGEYDWGKVYDEAWERIDKKVEGLSKHIKLEEERRSEDAQSKAALTDWLRAKASFVIEGLKEADKDEFCRCELKLQKWYGDLRGKPFAIEAENSILDISGFSKQYNCAFIWQKDGVKKLNLYLIINYFKGGKLRFKKIKPEAFEANRFYTVINKKSGEIVPMEVNFNFDDPNLIILPLAFGKRQGREFIWNDLLSLETGSLKLANGRVIEKTLYNRRTRQDEPALFVALTFERREVLDSSNIKPMNLIGVDRGENIPAVIALTDPEGCPLSRFKDSLGNPTHILRIGESYKEKQRTIQAKKEVEQRRAGGYSRKYASKAKNLADDMVRNTARDLLYYAVTQDAMLIFENLSRGFGRQGKRTFMAERQYTRMEDWLTAKLAYEGLPSKTYLSKTLAQYTSKTCSNCGFTITSADYDRVLEKLKKTATGWMTTINGKELKVEGQITYYNRYKRQNVVKDLSVELDRLSEESVNNDISSWTKGRSGEALSLLKKRFSHRPVQEKFVCLNCGFETHADEQAALNIARSWLFLRSQEYKKYQTNKTSTGNTDKRAFVETWQSFYRKKLKEVWKPAV

SEQ ID NO: 47821 - protein, 980 aa, synthetic construct
  REGION 1..980: note = engineered CasX variant
QEIKRINKIRRRLVKDSNTKKAGKTGPMKTLLVRVMTPDLRERLENLRKKPENIPQPISNTSRANLNKLLTDYTEMKKAILHVYWEEFQKDPVGLMSRVAQPASKKIDQNKLKPEMDEKGNLTTAGFACSQCGQPLFVYKLEQVSEKGKAYTNYFGRCNVAEHEKLILLAQLKPEKDSDEAVTYSLGKFGQRALDFYSIHVTKESTHPVKPLAQIAGNRYASVPVGKALSDACMGTIASFLSKYQDIIIEHQKVVKGNQKRLESLRELAGKENLEYPSVTLPPQPHTKEGVDAYNEVIARVRMWVNLNLWQKLKLSRDDAKPLLRLKGFPSFPLVERQANEVDWWDMVCNVKKLINEKKEDGKVFWQNLAGYKRQEALRPYLSSEEDRKKGKKFARYQLGDLLLHLEKKHGEYDWGKVYDEAWERIDKKVEGLSKHIKLEEERRSEDAQSKAALTDWLRAKASFVIEGLKEADKDEFCRCELKLQKWYGDLRGKPFAIEAENSILDISGFSKQYNCAFIWQKDGVKKLNLYLIINYFKGGKLRFKKIKPEAFEANRFYTVINKKSGEIVPMEVNFNFDDPNLIILPLAFGKRQGREFIWNDLLSLETGSLKLANGRVIEKTLYNRRTRQDEPALFVALTFERREVLDSSNIKPMNLIGVDRGENIPAVIALTDPEGCPLSRFKDSLGNPTHILRIGESYKEKQRTIQAKKEVEQRRAGGYSRKYASKAKNLADDMVRNTARDLLYYAVTQDAMLIFENLSRGFGRQGKRTFMAERQYTRMEDWLTAKLAYEGLPSKTYLSKTLAQYTSKTCSNCGFTITSADYDRVLEKLKKTATGWMTTINGKELKVEGQITYYNRYKRQNVVKDLSVELDRLSEESVNNDISSWTKGRSGEALSLLKKRFSHRPVQEKFVCLNCGFETHADEQAALNIARSWLFLRSQEYKKYQTNKTSTGNTDKRAFVETWQSFYRKKLKEVWKPAV

SEQ ID NO: 47822 - protein, 980 aa, synthetic construct
  REGION 1..980: note = engineered CasX variant
QEIKRINKIRRRLVKDSNTKKAGKTGPMKTLLVRVMTPDLRERLENLRKKPENIPQPISNTSRANLNKLLTDYTEMKKAILHVYWEEFQKDPVGLMSRVAQPASKKIDQNKLKPEMDEKGNLTTAGFACSQCGQPLFVYKLEQVSEKGKAYTNYFGRCNVAEHEKLIKLAQLKPEKDSDEAVTYSLGKFGQRALDFYSIHVTKESTHPVKPLAQIAGNRYASGPVGKALSDACMGTIASFLSKYQDIIIEHQKVVKGNQKRLESLRELAGKENLEYPSVTLPPQPHTKEGVDAYNEVIARVRMWVNLNLWQKLKLSRDDAKPLLRLKGFPSFPLVERQANEVDWWDMVCNVKKLINEKKEDGKVFWQNLAGYKRQEALRPYLSSEEDRKKGKKFARYQLGDLLLHLEKKHGEYDWGKVYDEAWERIDKKVEGLSKHIKLEEERRSEDAQSKAALTDWLRAKASFVIEGLKEADKDEFCRCELKLQKWYGDLRGKPFAIEAENSILDISGFSKQYNCAFIWQKDGVKKLNLYLIINYFKGGKLRFKKIKPEAFEANRFYTVINKKSGEIVPMEVNFNFDDPNLIILPLAFGKRQGREFIWNDLLSLETGSLKLANGRVIEKTLYNRRTRQDEPALFVALTFERREVLDSSNIKPMNLIGVDRGENIPAVIALTDPEGCPLSRFKDSLGNPTHILRIGESYKEKQRTIQAKKEVEQRRAGGYSRKYASKAKNLADDMVRNTARDLLYYAVTQDAMLIFENLSRGFGRQGKRTFMAERQYTRMEDWLTAKLAYEGLPSKTYLSKTLAQYTSKTCSNCGFTITSADYDRVLEKLKKTATGWMTTINGKELKVEGQITYYNRYKRQNVVKDLSVELDRLSEESVNNDISSWTKGRSGEALSLLKKRFSHRPVQEKFVCLNCGFETHADEQAALNIARSWLFLRSQEYKKYQTNKTSTGNTDKRAFVETWQSFYRKKLKEVWKPAV

SEQ ID NO: 47823 - protein, 979 aa, synthetic construct
  REGION 1..979: note = engineered CasX variant
QEIKRINKIRRRLVKDSNTKKAGKTGPMKTLLVRVMTPDLRERLENLRKKPENIPQPISNTSRANLNKLLTDYTEMKKAILHVYWEEFQKDPVGLMSRVAQPASKKIDQNKLKPEMDEKGNLTTAGFACSQCGQPLFVYKLEQVSEKGKAYTNYFGRCNVAEHEKLILLAQLKPEKDSDEAVTYSLGKFGQRALDFYSIHVTKESTHPVKPLAQIAGNRYASPVGKALSDACMGTIASFLSKYQDIIIEHQKVVKGNQKRLESLRELAGKENLEYPSVTLPPQPHTKEGVDAYNEVIARVRMWVNLNLWQKLKLSRDDAKPLLRLKGFPSFPLVERQANEVDWWDMVCNVKKLINEKKEDGKVFWQNLAGYKRQEALRPYLSSEEDRKKGKKFARYQLGDLLLHLEKKHGEYDWGKVYDEAWERIDKKVEGLSKHIKLEEERRSEDAQSKAALTDWLRAKASFVIEGLKEADKDEFCRCELKLQKWYGDLRGKPFAIEAENSILDISGFSKQYNCAFIWQKDGVKKLNLYLIINYFKGGKLRFKKIKPEAFEANRFYTVINKKSGEIVPMEVNFNFDDPNLIILPLAFGKRQGREFIWNDLLSLETGSLKLANGRVIEKTLYNRRTRQDEPALFVALTFERREVLDSSNIKPMNLIGVDRGENIPAVIALTDPEGCPLSRFKDSLGNPTHILRIGESYKEKQRTIQAKKEVEQRRAGGYSRKYASKAKNLADDMVRNTARDLLYYAVTQDAMLIFENLSRGFGRQGKRTFMAERQYTRMEDWLTAKLAYEGLPSKTYLSKTLAQYTSKTCSNCGFTITSADYDRVLEKLKKTATGWMTTINGKELKVEGQITYYNRYKRQNVVKDLSVELDRLSEESVNNDISSWTKGRSGEALSLLKKRFSHRPVQEKFVCLNCGFETHADEQAALNIARSWLFLRSQEYKKYQTNKTSTGNTDKRAFVETWQSFYRKKLKEVWKPAV

SEQ ID NO: 47824 - protein, 979 aa, synthetic construct
  REGION 1..979: note = engineered CasX variant
QEIKRINKIRRRLVKDSNTKKAGKTGPMKTLLVRVMTPDLRERLENLRKKPENIPQPISNTSRANLNKLLTDYTEMKKAILHVYWEEFQKDPVGLMSRVAQPASKKIDQNKLKPEMDEKGNLTTAGFACSQCGQPLFVYKLEQVSEKGKAYTNYFGRCNVAEHEKLILLAQLKPEKDSDEAVTYSLGKFGQRALDFYSIHVTKESTHPVKPLAQIAGNRYASYPVGKALSDACMGTIASFLSKYQDIIIEHQKVVKGNQKRLESLRELAGKENLEYPSVTLPPQPHTKEGVDAYNEVIARVRMWVNLNLWQKLKLSRDDAKPLLRLKGFPSFPLVERQANEVDWWDMVCNVKKLINEKKEDGKVFWQNLAGYKRQEALRPYLSSEEDRKKGKKFARYQLGDLLLHLEKKHGEDWGDVYDEAWERIDKKVEGLSKHIKLEEERRSEDAQSKAALTDWLRAKASFVIEGLKEADKDEFCRCELKLQKWYGDLRGKPFAIEAENSILDISGFSKQYNCAFIWQKDGVKKLNLYLIINYFKGGKLRFKKIKPEAFEANRFYTVINKKSGEIVPMEVNFNFDDPNLIILPLAFGKRQGREFIWNDLLSLETGSLKLANGRVIEKTLYNRRTRQDEPALFVALTFERREVLDSSNIKPMNLIGVDRGENIPAVIALTDPEGCPLSRFKDSLGNPTHILRIGESYKEKQRTIQAKKEVEQRRAGGYSRKYASKAKNLADDMVRNTARDLLYYAVTQDAMLIFENLSRGFGRQGKRTFMAERQYTRMEDWLTAKLAYEGLPSKTYLSKTLAQYTSKTCSNCGFTITSADYDRVLEKLKKTATGWMTTINGKELKVEGQITYYNRYKRQNVVKDLSVELDRLSEESVNNDISSWTKGRSGEALSLLKKRFSHRPVQEKFVCLNCGFETHADEQAALNIARSWLFLRSQEYKKYQTNKTSTGNTDKRAFVETWQSFYRKKLKEVWKPAV

SEQ ID NO: 47825 - protein, 979 aa, synthetic construct
  REGION 1..979: note = engineered CasX variant
QEIKRINKIRRRLVKDSNTKKAGKTGPMKTLLVRVMTPDLRERLENLRKKPENIPQPISNTSRANLNKLLTDYTEMKKAILHVYWEEFQKDPVGLMSRVAQPASKKIDQNKLKPEMDEKGNLTTAGFACSQCGQPLFVYKLEQVSEKGKAYTNYFGRCNVAEHEKLILLAQLKPEKDSDEAVTYSLGKFGQRALDFYSIHVTKESTHPVKPLAQIAGNRYASHPVGKALSDACMGTIASFLSKYQDIIIEHQKVVKGNQKRLESLRELAGKENLEYPSVTLPPQPHTKEGVDAYNEVIARVRMWVNLNLWQKLKLSRDDAKPLLRLKGFPSFPLVERQANEVDWWDMVCNVKKLINEKKEDGKVFWQNLAGYKRQEALRPYLSSEEDRKKGKKFARYQLGDLLLHLEKKHGEDWGDVYDEAWERIDKKVEGLSKHIKLEEERRSEDAQSKAALTDWLRAKASFVIEGLKEADKDEFCRCELKLQKWYGDLRGKPFAIEAENSILDISGFSKQYNCAFIWQKDGVKKLNLYLIINYFKGGKLRFKKIKPEAFEANRFYTVINKKSGEIVPMEVNFNFDDPNLIILPLAFGKRQGREFIWNDLLSLETGSLKLANGRVIEKTLYNRRTRQDEPALFVALTFERREVLDSSNIKPMNLIGVDRGENIPAVIALTDPEGCPLSRFKDSLGNPTHILRIGESYKEKQRTIQAKKEVEQRRAGGYSRKYASKAKNLADDMVRNTARDLLYYAVTQDAMLIFENLSRGFGRQGKRTFMAERQYTRMEDWLTAKLAYEGLPSKTYLSKTLAQYTSKTCSNCGFTITSADYDRVLEKLKKTATGWMTTINGKELKVEGQITYYNRYKRQNVVKDLSVELDRLSEESVNNDISSWTKGRSGEALSLLKKRFSHRPVQEKFVCLNCGFETHADEQAALNIARSWLFLRSQEYKKYQTNKTSTGNTDKRAFVETWQSFYRKKLKEVWKPAV

SEQ ID NO: 47826 - protein, 979 aa, synthetic construct
  REGION 1..979: note = engineered CasX variant
QEIKRINKIRRRLVKDSNTKKAGKTGPMKTLLVRVMTPDLRERLENLRKKPENIPQPISNTSRANLNKLLTDYTEMKKAILHVYWEEFQKDPVGLMSRVAQPASKKIDQNKLKPEMDEKGNLTTAGFACSQCGQPLFVYKLEQVSEKGKAYTNYFGRCNVAEHEKLILLAQLKPEKDSDEAVTYSLGKFGQRALDFYSIHVTKESTHPVKPLAQIAGNRYASSPVGKALSDACMGTIASFLSKYQDIIIEHQKVVKGNQKRLESLRELAGKENLEYPSVTLPPQPHTKEGVDAYNEVIARVRMWVNLNLWQKLKLSRDDAKPLLRLKGFPSFPLVERQANEVDWWDMVCNVKKLINEKKEDGKVFWQNLAGYKRQEALRPYLSSEEDRKKGKKFARYQLGDLLLHLEKKHGEDWGDVYDEAWERIDKKVEGLSKHIKLEEERRSEDAQSKAALTDWLRAKASFVIEGLKEADKDEFCRCELKLQKWYGDLRGKPFAIEAENSILDISGFSKQYNCAFIWQKDGVKKLNLYLIINYFKGGKLRFKKIKPEAFEANRFYTVINKKSGEIVPMEVNFNFDDPNLIILPLAFGKRQGREFIWNDLLSLETGSLKLANGRVIEKTLYNRRTRQDEPALFVALTFERREVLDSSNIKPMNLIGVDRGENIPAVIALTDPEGCPLSRFKDSLGNPTHILRIGESYKEKQRTIQAKKEVEQRRAGGYSRKYASKAKNLADDMVRNTARDLLYYAVTQDAMLIFENLSRGFGRQGKRTFMAERQYTRMEDWLTAKLAYEGLPSKTYLSKTLAQYTSKTCSNCGFTITSADYDRVLEKLKKTATGWMTTINGKELKVEGQITYYNRYKRQNVVKDLSVELDRLSEESVNNDISSWTKGRSGEALSLLKKRFSHRPVQEKFVCLNCGFETHADEQAALNIARSWLFLRSQEYKKYQTNKTSTGNTDKRAFVETWQSFYRKKLKEVWKPAV

SEQ ID NO: 47827 - protein, 979 aa, synthetic construct
  REGION 1..979: note = engineered CasX variant
QEIKRINKIRRRLVKDSNTKKAGKTGPMKTLLVRVMTPDLRERLENLRKKPENIPQPISNTSRANLNKLLTDYTEMKKAILHVYWEEFQKDPVGLMSRVAQPASKKIDQNKLKPEMDEKGNLTTAGFACSQCGQPLFVYKLEQVSEKGKAYTNYFGRCNVAEHEKLILLAQLKPEKDSDEAVTYSLGKFGQRALDFYSIHVTKESTHPVKPLAQIAGNRYASTPVGKALSDACMGTIASFLSKYQDIIIEHQKVVKGNQKRLESLRELAGKENLEYPSVTLPPQPHTKEGVDAYNEVIARVRMWVNLNLWQKLKLSRDDAKPLLRLKGFPSFPLVERQANEVDWWDMVCNVKKLINEKKEDGKVFWQNLAGYKRQEALRPYLSSEEDRKKGKKFARYQLGDLLLHLEKKHGEDWGDVYDEAWERIDKKVEGLSKHIKLEEERRSEDAQSKAALTDWLRAKASFVIEGLKEADKDEFCRCELKLQKWYGDLRGKPFAIEAENSILDISGFSKQYNCAFIWQKDGVKKLNLYLIINYFKGGKLRFKKIKPEAFEANRFYTVINKKSGEIVPMEVNFNFDDPNLIILPLAFGKRQGREFIWNDLLSLETGSLKLANGRVIEKTLYNRRTRQDEPALFVALTFERREVLDSSNIKPMNLIGVDRGENIPAVIALTDPEGCPLSRFKDSLGNPTHILRIGESYKEKQRTIQAKKEVEQRRAGGYSRKYASKAKNLADDMVRNTARDLLYYAVTQDAMLIFENLSRGFGRQGKRTFMAERQYTRMEDWLTAKLAYEGLPSKTYLSKTLAQYTSKTCSNCGFTITSADYDRVLEKLKKTATGWMTTINGKELKVEGQITYYNRYKRQNVVKDLSVELDRLSEESVNNDISSWTKGRSGEALSLLKKRFSHRPVQEKFVCLNCGFETHADEQAALNIARSWLFLRSQEYKKYQTNKTSTGNTDKRAFVETWQSFYRKKLKEVWKPAV

SEQ ID NO: 47828 - protein, 979 aa, synthetic construct
  REGION 1..979: note = engineered CasX variant
QEIKRINKIRRRLVKDSNTKKAGKTGPMKTLLVRVMTPDLRERLENLRKKPENIPQPISNTSRANLNKLLTDYTEMKKAILHVYWEEFQKDPVGLMSRVAQPASKKIDQNKLKPEMDEKGNLTTAGFACSQCGQPLFVYKLEQVSEKGKAYTNYFGRCNVAEHEKLILLAQLKPEKDSDEAVTYSLGKFGQRALDFYSIHVTKESTHPVKPLAQIAGNRYASAPVGKALSDACMGTIASFLSKYQDIIIEHQKVVKGNQKRLESLRELAGKENLEYPSVTLPPQPHTKEGVDAYNEVIARVRMWVNLNLWQKLKLSRDDAKPLLRLKGFPSFPLVERQANEVDWWDMVCNVKKLINEKKEDGKVFWQNLAGYKRQEALRPYLSSEEDRKKGKKFARYQLGDLLLHLEKKHGEDWGDVYDEAWERIDKKVEGLSKHIKLEEERRSEDAQSKAALTDWLRAKASFVIEGLKEADKDEFCRCELKLQKWYGDLRGKPFAIEAENSILDISGFSKQYNCAFIWQKDGVKKLNLYLIINYFKGGKLRFKKIKPEAFEANRFYTVINKKSGEIVPMEVNFNFDDPNLIILPLAFGKRQGREFIWNDLLSLETGSLKLANGRVIEKTLYNRRTRQDEPALFVALTFERREVLDSSNIKPMNLIGVDRGENIPAVIALTDPEGCPLSRFKDSLGNPTHILRIGESYKEKQRTIQAKKEVEQRRAGGYSRKYASKAKNLADDMVRNTARDLLYYAVTQDAMLIFENLSRGFGRQGKRTFMAERQYTRMEDWLTAKLAYEGLPSKTYLSKTLAQYTSKTCSNCGFTITSADYDRVLEKLKKTATGWMTTINGKELKVEGQITYYNRYKRQNVVKDLSVELDRLSEESVNNDISSWTKGRSGEALSLLKKRFSHRPVQEKFVCLNCGFETHADEQAALNIARSWLFLRSQEYKKYQTNKTSTGNTDKRAFVETWQSFYRKKLKEVWKPAV

SEQ ID NO: 47829 - protein, 979 aa, synthetic construct
  REGION 1..979: note = engineered CasX variant
QEIKRINKIRRRLVKDSNTKKAGKTGPMKTLLVRVMTPDLRERLENLRKKPENIPQPISNTSRANLNKLLTDYTEMKKAILHVYWEEFQKDPVGLMSRVAQPASKKIDQNKLKPEMDEKGNLTTAGFACSQCGQPLFVYKLEQVSEKGKAYTNYFGRCNVAEHEKLILLAQLKPEKDSDEAVTYSLGKFGQRALDFYSIHVTKESTHPVKPLAQIAGNRYASVPVGKALSDACMGTIASFLSKYQDIIIEHQKVVKGNQKRLESLRELAGKENLEYPSVTLPPQPHTKEGVDAYNEVIARVRMWVNLNLWQKLKLSRDDAKPLLRLKGFPSFPLVERQANEVDWWDMVCNVKKLINEKKEDGKVFWQNLAGYKRQEALRPYLSSEEDRKKGKKFARYQLGDLLLHLEKKHGEDWGDVYDEAWERIDKKVEGLSKHIKLEEERRSEDAQSKAALTDWLRAKASFVIEGLKEADKDEFCRCELKLQKWYGDLRGKPFAIEAENSILDISGFSKQYNCAFIWQKDGVKKLNLYLIINYFKGGKLRFKKIKPEAFEANRFYTVINKKSGEIVPMEVNFNFDDPNLIILPLAFGKRQGREFIWNDLLSLETGSLKLANGRVIEKTLYNRRTRQDEPALFVALTFERREVLDSSNIKPMNLIGVDRGENIPAVIALTDPEGCPLSRFKDSLGNPTHILRIGESYKEKQRTIQAKKEVEQRRAGGYSRKYASKAKNLADDMVRNTARDLLYYAVTQDAMLIFENLSRGFGRQGKRTFMAERQYTRMEDWLTAKLAYEGLPSKTYLSKTLAQYTSKTCSNCGFTITSADYDRVLEKLKKTATGWMTTINGKELKVEGQITYYNRYKRQNVVKDLSVELDRLSEESVNNDISSWTKGRSGEALSLLKKRFSHRPVQEKFVCLNCGFETHADEQAALNIARSWLFLRSQEYKKYQTNKTSTGNTDKRAFVETWQSFYRKKLKEVWKPAV

SEQ ID NO: 47830 - protein, 979 aa, synthetic construct
  REGION 1..979: note = engineered CasX variant
QEIKRINKIRRRLVKDSNTKKAGKTGPMKTLLVRVMTPDLRERLENLRKKPENIPQPISNTSRANLNKLLTDYTEMKKAILHVYWEEFQKDPVGLMSRVAQPASKKIDQNKLKPEMDEKGNLTTAGFACSQCGQPLFVYKLEQVSEKGKAYTNYFGRCNVAEHEKLIKLAQLKPEKDSDEAVTYSLGKFGQRALDFYSIHVTKESTHPVKPLAQIAGNRYASGPVGKALSDACMGTIASFLSKYQDIIIEHQKVVKGNQKRLESLRELAGKENLEYPSVTLPPQPHTKEGVDAYNEVIARVRMWVNLNLWQKLKLSRDDAKPLLRLKGFPSFPLVERQANEVDWWDMVCNVKKLINEKKEDGKVFWQNLAGYKRQEALRPYLSSEEDRKKGKKFARYQLGDLLLHLEKKHGEDWGDVYDEAWERIDKKVEGLSKHIKLEEERRSEDAQSKAALTDWLRAKASFVIEGLKEADKDEFCRCELKLQKWYGDLRGKPFAIEAENSILDISGFSKQYNCAFIWQKDGVKKLNLYLIINYFKGGKLRFKKIKPEAFEANRFYTVINKKSGEIVPMEVNFNFDDPNLIILPLAFGKRQGREFIWNDLLSLETGSLKLANGRVIEKTLYNRRTRQDEPALFVALTFERREVLDSSNIKPMNLIGVDRGENIPAVIALTDPEGCPLSRFKDSLGNPTHILRIGESYKEKQRTIQAKKEVEQRRAGGYSRKYASKAKNLADDMVRNTARDLLYYAVTQDAMLIFENLSRGFGRQGKRTFMAERQYTRMEDWLTAKLAYEGLPSKTYLSKTLAQYTSKTCSNCGFTITSADYDRVLEKLKKTATGWMTTINGKELKVEGQITYYNRYKRQNVVKDLSVELDRLSEESVNNDISSWTKGRSGEALSLLKKRFSHRPVQEKFVCLNCGFETHADEQAALNIARSWLFLRSQEYKKYQTNKTSTGNTDKRAFVETWQSFYRKKLKEVWKPAV

SEQ ID NO: 47831 - protein, 978 aa, synthetic construct
  REGION 1..978: note = engineered CasX variant
QEIKRINKIRRRLVKDSNTKKAGKTGPMKTLLVRVMTPDLRERLENLRKKPENIPQPISNTSRANLNKLLTDYTEMKKAILHVYWEEFQKDPVGLMSRVAQPASKKIDQNKLKPEMDEKGNLTTAGFACSQCGQPLFVYKLEQVSEKGKAYTNYFGRCNVAEHEKLILLAQLKPEKDSDEAVTYSLGKFGQRALDFYSIHVTKESTHPVKPLAQIAGNRYASPVGKALSDACMGTIASFLSKYQDIIIEHQKVVKGNQKRLESLRELAGKENLEYPSVTLPPQPHTKEGVDAYNEVIARVRMWVNLNLWQKLKLSRDDAKPLLRLKGFPSFPLVERQANEVDWWDMVCNVKKLINEKKEDGKVFWQNLAGYKRQEALRPYLSSEEDRKKGKKFARYQLGDLLLHLEKKHGEDWGDVYDEAWERIDKKVEGLSKHIKLEEERRSEDAQSKAALTDWLRAKASFVIEGLKEADKDEFCRCELKLQKWYGDLRGKPFAIEAENSILDISGFSKQYNCAFIWQKDGVKKLNLYLIINYFKGGKLRFKKIKPEAFEANRFYTVINKKSGEIVPMEVNFNFDDPNLIILPLAFGKRQGREFIWNDLLSLETGSLKLANGRVIEKTLYNRRTRQDEPALFVALTFERREVLDSSNIKPMNLIGVDRGENIPAVIALTDPEGCPLSRFKDSLGNPTHILRIGESYKEKQRTIQAKKEVEQRRAGGYSRKYASKAKNLADDMVRNTARDLLYYAVTQDAMLIFENLSRGFGRQGKRTFMAERQYTRMEDWLTAKLAYEGLPSKTYLSKTLAQYTSKTCSNCGFTITSADYDRVLEKLKKTATGWMTTINGKELKVEGQITYYNRYKRQNVVKDLSVELDRLSEESVNNDISSWTKGRSGEALSLLKKRFSHRPVQEKFVCLNCGFETHADEQAALNIARSWLFLRSQEYKKYQTNKTSTGNTDKRAFVETWQSFYRKKLKEVWKPAV

SEQ ID NO: 47832 - protein, 979 aa, synthetic construct
  REGION 1..979: note = engineered CasX variant
QEIKRINKIRRRLVKDSNTKKAGKTGPMKTLLVRVMTPDLRERLENLRKKPENIPQPISNTSRANLNKLLTDYTEMKKAILHVYWEEFQKDPVGLMSRVAQPASKKIDQNKLKPEMDEKGNLTTAGFACSQCGQPLFVYKLEQVSEKGKAYTNYFGRCNVAEHEKLILLAQLKPEKDSDEAVTYSLGKFGQRALDFYSIHVTKESTHPVKPLAQIAGNRYASYPVGKALSDACMGTIASFLSKYQDIIIEHQKVVKGNQKRLESLRELAGKENLEYPSVTLPPQPHTKEGVDAYNEVIARVRMWVNLNLWQKLKLSRDDAKPLLRLKGFPSFPLVERQANEVDWWDMVCNVKKLINEKKEDGKVFWQNLAGYKRQEALRPYLSSEEDRKKGKKFARYQLGDLLLHLEKKHGEDWGKVYGEAWERIDKKVEGLSKHIKLEEERRSEDAQSKAALTDWLRAKASFVIEGLKEADKDEFCRCELKLQKWYGDLRGKPFAIEAENSILDISGFSKQYNCAFIWQKDGVKKLNLYLIINYFKGGKLRFKKIKPEAFEANRFYTVINKKSGEIVPMEVNFNFDDPNLIILPLAFGKRQGREFIWNDLLSLETGSLKLANGRVIEKTLYNRRTRQDEPALFVALTFERREVLDSSNIKPMNLIGVDRGENIPAVIALTDPEGCPLSRFKDSLGNPTHILRIGESYKEKQRTIQAKKEVEQRRAGGYSRKYASKAKNLADDMVRNTARDLLYYAVTQDAMLIFENLSRGFGRQGKRTFMAERQYTRMEDWLTAKLAYEGLPSKTYLSKTLAQYTSKTCSNCGFTITSADYDRVLEKLKKTATGWMTTINGKELKVEGQITYYNRYKRQNVVKDLSVELDRLSEESVNNDISSWTKGRSGEALSLLKKRFSHRPVQEKFVCLNCGFETHADEQAALNIARSWLFLRSQEYKKYQTNKTSTGNTDKRAFVETWQSFYRKKLKEVWKPAV

SEQ ID NO: 47833 - protein, 979 aa, synthetic construct
  REGION 1..979: note = engineered CasX variant
QEIKRINKIRRRLVKDSNTKKAGKTGPMKTLLVRVMTPDLRERLENLRKKPENIPQPISNTSRANLNKLLTDYTEMKKAILHVYWEEFQKDPVGLMSRVAQPASKKIDQNKLKPEMDEKGNLTTAGFACSQCGQPLFVYKLEQVSEKGKAYTNYFGRCNVAEHEKLILLAQLKPEKDSDEAVTYSLGKFGQRALDFYSIHVTKESTHPVKPLAQIAGNRYASHPVGKALSDACMGTIASFLSKYQDIIIEHQKVVKGNQKRLESLRELAGKENLEYPSVTLPPQPHTKEGVDAYNEVIARVRMWVNLNLWQKLKLSRDDAKPLLRLKGFPSFPLVERQANEVDWWDMVCNVKKLINEKKEDGKVFWQNLAGYKRQEALRPYLSSEEDRKKGKKFARYQLGDLLLHLEKKHGEDWGKVYGEAWERIDKKVEGLSKHIKLEEERRSEDAQSKAALTDWLRAKASFVIEGLKEADKDEFCRCELKLQKWYGDLRGKPFAIEAENSILDISGFSKQYNCAFIWQKDGVKKLNLYLIINYFKGGKLRFKKIKPEAFEANRFYTVINKKSGEIVPMEVNFNFDDPNLIILPLAFGKRQGREFIWNDLLSLETGSLKLANGRVIEKTLYNRRTRQDEPALFVALTFERREVLDSSNIKPMNLIGVDRGENIPAVIALTDPEGCPLSRFKDSLGNPTHILRIGESYKEKQRTIQAKKEVEQRRAGGYSRKYASKAKNLADDMVRNTARDLLYYAVTQDAMLIFENLSRGFGRQGKRTFMAERQYTRMEDWLTAKLAYEGLPSKTYLSKTLAQYTSKTCSNCGFTITSADYDRVLEKLKKTATGWMTTINGKELKVEGQITYYNRYKRQNVVKDLSVELDRLSEESVNNDISSWTKGRSGEALSLLKKRFSHRPVQEKFVCLNCGFETHADEQAALNIARSWLFLRSQEYKKYQTNKTSTGNTDKRAFVETWQSFYRKKLKEVWKPAV

SEQ ID NO: 47834 - protein, 979 aa, synthetic construct
  REGION 1..979: note = engineered CasX variant
QEIKRINKIRRRLVKDSNTKKAGKTGPMKTLLVRVMTPDLRERLENLRKKPENIPQPISNTSRANLNKLLTDYTEMKKAILHVYWEEFQKDPVGLMSRVAQPASKKIDQNKLKPEMDEKGNLTTAGFACSQCGQPLFVYKLEQVSEKGKAYTNYFGRCNVAEHEKLILLAQLKPEKDSDEAVTYSLGKFGQRALDFYSIHVTKESTHPVKPLAQIAGNRYASSPVGKALSDACMGTIASFLSKYQDIIIEHQKVVKGNQKRLESLRELAGKENLEYPSVTLPPQPHTKEGVDAYNEVIARVRMWVNLNLWQKLKLSRDDAKPLLRLKGFPSFPLVERQANEVDWWDMVCNVKKLINEKKEDGKVFWQNLAGYKRQEALRPYLSSEEDRKKGKKFARYQLGDLLLHLEKKHGEDWGKVYGEAWERIDKKVEGLSKHIKLEEERRSEDAQSKAALTDWLRAKASFVIEGLKEADKDEFCRCELKLQKWYGDLRGKPFAIEAENSILDISGFSKQYNCAFIWQKDGVKKLNLYLIINYFKGGKLRFKKIKPEAFEANRFYTVINKKSGEIVPMEVNFNFDDPNLIILPLAFGKRQGREFIWNDLLSLETGSLKLANGRVIEKTLYNRRTRQDEPALFVALTFERREVLDSSNIKPMNLIGVDRGENIPAVIALTDPEGCPLSRFKDSLGNPTHILRIGESYKEKQRTIQAKKEVEQRRAGGYSRKYASKAKNLADDMVRNTARDLLYYAVTQDAMLIFENLSRGFGRQGKRTFMAERQYTRMEDWLTAKLAYEGLPSKTYLSKTLAQYTSKTCSNCGFTITSADYDRVLEKLKKTATGWMTTINGKELKVEGQITYYNRYKRQNVVKDLSVELDRLSEESVNNDISSWTKGRSGEALSLLKKRFSHRPVQEKFVCLNCGFETHADEQAALNIARSWLFLRSQEYKKYQTNKTSTGNTDKRAFVETWQSFYRKKLKEVWKPAV

SEQ ID NO: 47835 - protein, 979 aa, synthetic construct
  REGION 1..979: note = engineered CasX variant
QEIKRINKIRRRLVKDSNTKKAGKTGPMKTLLVRVMTPDLRERLENLRKKPENIPQPISNTSRANLNKLLTDYTEMKKAILHVYWEEFQKDPVGLMSRVAQPASKKIDQNKLKPEMDEKGNLTTAGFACSQCGQPLFVYKLEQVSEKGKAYTNYFGRCNVAEHEKLILLAQLKPEKDSDEAVTYSLGKFGQRALDFYSIHVTKESTHPVKPLAQIAGNRYASTPVGKALSDACMGTIASFLSKYQDIIIEHQKVVKGNQKRLESLRELAGKENLEYPSVTLPPQPHTKEGVDAYNEVIARVRMWVNLNLWQKLKLSRDDAKPLLRLKGFPSFPLVERQANEVDWWDMVCNVKKLINEKKEDGKVFWQNLAGYKRQEALRPYLSSEEDRKKGKKFARYQLGDLLLHLEKKHGEDWGKVYGEAWERIDKKVEGLSKHIKLEEERRSEDAQSKAALTDWLRAKASFVIEGLKEADKDEFCRCELKLQKWYGDLRGKPFAIEAENSILDISGFSKQYNCAFIWQKDGVKKLNLYLIINYFKGGKLRFKKIKPEAFEANRFYTVINKKSGEIVPMEVNFNFDDPNLIILPLAFGKRQGREFIWNDLLSLETGSLKLANGRVIEKTLYNRRTRQDEPALFVALTFERREVLDSSNIKPMNLIGVDRGENIPAVIALTDPEGCPLSRFKDSLGNPTHILRIGESYKEKQRTIQAKKEVEQRRAGGYSRKYASKAKNLADDMVRNTARDLLYYAVTQDAMLIFENLSRGFGRQGKRTFMAERQYTRMEDWLTAKLAYEGLPSKTYLSKTLAQYTSKTCSNCGFTITSADYDRVLEKLKKTATGWMTTINGKELKVEGQITYYNRYKRQNVVKDLSVELDRLSEESVNNDISSWTKGRSGEALSLLKKRFSHRPVQEKFVCLNCGFETHADEQAALNIARSWLFLRSQEYKKYQTNKTSTGNTDKRAFVETWQSFYRKKLKEVWKPAV

SEQ ID NO: 47836 - protein, 979 aa, synthetic construct
  REGION 1..979: note = engineered CasX variant
QEIKRINKIRRRLVKDSNTKKAGKTGPMKTLLVRVMTPDLRERLENLRKKPENIPQPISNTSRANLNKLLTDYTEMKKAILHVYWEEFQKDPVGLMSRVAQPASKKIDQNKLKPEMDEKGNLTTAGFACSQCGQPLFVYKLEQVSEKGKAYTNYFGRCNVAEHEKLILLAQLKPEKDSDEAVTYSLGKFGQRALDFYSIHVTKESTHPVKPLAQIAGNRYASAPVGKALSDACMGTIASFLSKYQDIIIEHQKVVKGNQKRLESLRELAGKENLEYPSVTLPPQPHTKEGVDAYNEVIARVRMWVNLNLWQKLKLSRDDAKPLLRLKGFPSFPLVERQANEVDWWDMVCNVKKLINEKKEDGKVFWQNLAGYKRQEALRPYLSSEEDRKKGKKFARYQLGDLLLHLEKKHGEDWGKVYGEAWERIDKKVEGLSKHIKLEEERRSEDAQSKAALTDWLRAKASFVIEGLKEADKDEFCRCELKLQKWYGDLRGKPFAIEAENSILDISGFSKQYNCAFIWQKDGVKKLNLYLIINYFKGGKLRFKKIKPEAFEANRFYTVINKKSGEIVPMEVNFNFDDPNLIILPLAFGKRQGREFIWNDLLSLETGSLKLANGRVIEKTLYNRRTRQDEPALFVALTFERREVLDSSNIKPMNLIGVDRGENIPAVIALTDPEGCPLSRFKDSLGNPTHILRIGESYKEKQRTIQAKKEVEQRRAGGYSRKYASKAKNLADDMVRNTARDLLYYAVTQDAMLIFENLSRGFGRQGKRTFMAERQYTRMEDWLTAKLAYEGLPSKTYLSKTLAQYTSKTCSNCGFTITSADYDRVLEKLKKTATGWMTTINGKELKVEGQITYYNRYKRQNVVKDLSVELDRLSEESVNNDISSWTKGRSGEALSLLKKRFSHRPVQEKFVCLNCGFETHADEQAALNIARSWLFLRSQEYKKYQTNKTSTGNTDKRAFVETWQSFYRKKLKEVWKPAV

SEQ ID NO: 47837 - protein, 979 aa, synthetic construct
  REGION 1..979: note = engineered CasX variant
QEIKRINKIRRRLVKDSNTKKAGKTGPMKTLLVRVMTPDLRERLENLRKKPENIPQPISNTSRANLNKLLTDYTEMKKAILHVYWEEFQKDPVGLMSRVAQPASKKIDQNKLKPEMDEKGNLTTAGFACSQCGQPLFVYKLEQVSEKGKAYTNYFGRCNVAEHEKLILLAQLKPEKDSDEAVTYSLGKFGQRALDFYSIHVTKESTHPVKPLAQIAGNRYASVPVGKALSDACMGTIASFLSKYQDIIIEHQKVVKGNQKRLESLRELAGKENLEYPSVTLPPQPHTKEGVDAYNEVIARVRMWVNLNLWQKLKLSRDDAKPLLRLKGFPSFPLVERQANEVDWWDMVCNVKKLINEKKEDGKVFWQNLAGYKRQEALRPYLSSEEDRKKGKKFARYQLGDLLLHLEKKHGEDWGKVYGEAWERIDKKVEGLSKHIKLEEERRSEDAQSKAALTDWLRAKASFVIEGLKEADKDEFCRCELKLQKWYGDLRGKPFAIEAENSILDISGFSKQYNCAFIWQKDGVKKLNLYLIINYFKGGKLRFKKIKPEAFEANRFYTVINKKSGEIVPMEVNFNFDDPNLIILPLAFGKRQGREFIWNDLLSLETGSLKLANGRVIEKTLYNRRTRQDEPALFVALTFERREVLDSSNIKPMNLIGVDRGENIPAVIALTDPEGCPLSRFKDSLGNPTHILRIGESYKEKQRTIQAKKEVEQRRAGGYSRKYASKAKNLADDMVRNTARDLLYYAVTQDAMLIFENLSRGFGRQGKRTFMAERQYTRMEDWLTAKLAYEGLPSKTYLSKTLAQYTSKTCSNCGFTITSADYDRVLEKLKKTATGWMTTINGKELKVEGQITYYNRYKRQNVVKDLSVELDRLSEESVNNDISSWTKGRSGEALSLLKKRFSHRPVQEKFVCLNCGFETHADEQAALNIARSWLFLRSQEYKKYQTNKTSTGNTDKRAFVETWQSFYRKKLKEVWKPAV

SEQ ID NO: 47838 - protein, 979 aa, synthetic construct
  REGION 1..979: note = engineered CasX variant
QEIKRINKIRRRLVKDSNTKKAGKTGPMKTLLVRVMTPDLRERLENLRKKPENIPQPISNTSRANLNKLLTDYTEMKKAILHVYWEEFQKDPVGLMSRVAQPASKKIDQNKLKPEMDEKGNLTTAGFACSQCGQPLFVYKLEQVSEKGKAYTNYFGRCNVAEHEKLIKLAQLKPEKDSDEAVTYSLGKFGQRALDFYSIHVTKESTHPVKPLAQIAGNRYASGPVGKALSDACMGTIASFLSKYQDIIIEHQKVVKGNQKRLESLRELAGKENLEYPSVTLPPQPHTKEGVDAYNEVIARVRMWVNLNLWQKLKLSRDDAKPLLRLKGFPSFPLVERQANEVDWWDMVCNVKKLINEKKEDGKVFWQNLAGYKRQEALRPYLSSEEDRKKGKKFARYQLGDLLLHLEKKHGEDWGKVYGEAWERIDKKVEGLSKHIKLEEERRSEDAQSKAALTDWLRAKASFVIEGLKEADKDEFCRCELKLQKWYGDLRGKPFAIEAENSILDISGFSKQYNCAFIWQKDGVKKLNLYLIINYFKGGKLRFKKIKPEAFEANRFYTVINKKSGEIVPMEVNFNFDDPNLIILPLAFGKRQGREFIWNDLLSLETGSLKLANGRVIEKTLYNRRTRQDEPALFVALTFERREVLDSSNIKPMNLIGVDRGENIPAVIALTDPEGCPLSRFKDSLGNPTHILRIGESYKEKQRTIQAKKEVEQRRAGGYSRKYASKAKNLADDMVRNTARDLLYYAVTQDAMLIFENLSRGFGRQGKRTFMAERQYTRMEDWLTAKLAYEGLPSKTYLSKTLAQYTSKTCSNCGFTITSADYDRVLEKLKKTATGWMTTINGKELKVEGQITYYNRYKRQNVVKDLSVELDRLSEESVNNDISSWTKGRSGEALSLLKKRFSHRPVQEKFVCLNCGFETHADEQAALNIARSWLFLRSQEYKKYQTNKTSTGNTDKRAFVETWQSFYRKKLKEVWKPAV

SEQ ID NO: 47839 - protein, 978 aa, synthetic construct
  REGION 1..978: note = engineered CasX variant
QEIKRINKIRRRLVKDSNTKKAGKTGPMKTLLVRVMTPDLRERLENLRKKPENIPQPISNTSRANLNKLLTDYTEMKKAILHVYWEEFQKDPVGLMSRVAQPASKKIDQNKLKPEMDEKGNLTTAGFACSQCGQPLFVYKLEQVSEKGKAYTNYFGRCNVAEHEKLILLAQLKPEKDSDEAVTYSLGKFGQRALDFYSIHVTKESTHPVKPLAQIAGNRYASPVGKALSDACMGTIASFLSKYQDIIIEHQKVVKGNQKRLESLRELAGKENLEYPSVTLPPQPHTKEGVDAYNEVIARVRMWVNLNLWQKLKLSRDDAKPLLRLKGFPSFPLVERQANEVDWWDMVCNVKKLINEKKEDGKVFWQNLAGYKRQEALRPYLSSEEDRKKGKKFARYQLGDLLLHLEKKHGEDWGKVYGEAWERIDKKVEGLSKHIKLEEERRSEDAQSKAALTDWLRAKASFVIEGLKEADKDEFCRCELKLQKWYGDLRGKPFAIEAENSILDISGFSKQYNCAFIWQKDGVKKLNLYLIINYFKGGKLRFKKIKPEAFEANRFYTVINKKSGEIVPMEVNFNFDDPNLIILPLAFGKRQGREFIWNDLLSLETGSLKLANGRVIEKTLYNRRTRQDEPALFVALTFERREVLDSSNIKPMNLIGVDRGENIPAVIALTDPEGCPLSRFKDSLGNPTHILRIGESYKEKQRTIQAKKEVEQRRAGGYSRKYASKAKNLADDMVRNTARDLLYYAVTQDAMLIFENLSRGFGRQGKRTFMAERQYTRMEDWLTAKLAYEGLPSKTYLSKTLAQYTSKTCSNCGFTITSADYDRVLEKLKKTATGWMTTINGKELKVEGQITYYNRYKRQNVVKDLSVELDRLSEESVNNDISSWTKGRSGEALSLLKKRFSHRPVQEKFVCLNCGFETHADEQAALNIARSWLFLRSQEYKKYQTNKTSTGNTDKRAFVETWQSFYRKKLKEVWKPAV

SEQ ID NO: 47840 - protein, 979 aa, synthetic construct
  REGION 1..979: note = engineered CasX variant
QEIKRINKIRRRLVKDSNTKKAGKTGPMKTLLVRVMTPDLRERLENLRKKPENIPQPISNTSRANLNKLLTDYTEMKKAILHVYWEEFQKDPVGLMSRVAQPASKKIDQNKLKPEMDEKGNLTTAGFACSQCGQPLFVYKLEQVSEKGKAYTNYFGRCNVAEHEKLILLAQLKPEKDSDEAVTYSLGKFGQRALDFYSIHVTKESTHPVKPLAQIAGNRYASYPVGKALSDACMGTIASFLSKYQDIIIEHQKVVKGNQKRLESLRELAGKENLEYPSVTLPPQPHTKEGVDAYNEVIARVRMWVNLNLWQKLKLSRDDAKPLLRLKGFPSFPLVERQANEVDWWDMVCNVKKLINEKKEDGKVFWQNLAGYKRQEALRPYLSSEEDRKKGKKFARYQLGDLLLHLEKKHGEDWGKVYDEAWERIDKKVEGLSKHIKLEEERRSEDAQSKAALTDWLRAKASFVIEGKKEADKDEFCRCELKLQKWYGDLRGKPFAIEAENSILDISGFSKQYNCAFIWQKDGVKKLNLYLIINYFKGGKLRFKKIKPEAFEANRFYTVINKKSGEIVPMEVNFNFDDPNLIILPLAFGKRQGREFIWNDLLSLETGSLKLANGRVIEKTLYNRRTRQDEPALFVALTFERREVLDSSNIKPMNLIGVDRGENIPAVIALTDPEGCPLSRFKDSLGNPTHILRIGESYKEKQRTIQAKKEVEQRRAGGYSRKYASKAKNLADDMVRNTARDLLYYAVTQDAMLIFENLSRGFGRQGKRTFMAERQYTRMEDWLTAKLAYEGLPSKTYLSKTLAQYTSKTCSNCGFTITSADYDRVLEKLKKTATGWMTTINGKELKVEGQITYYNRYKRQNVVKDLSVELDRLSEESVNNDISSWTKGRSGEALSLLKKRFSHRPVQEKFVCLNCGFETHADEQAALNIARSWLFLRSQEYKKYQTNKTSTGNTDKRAFVETWQSFYRKKLKEVWKPAV

SEQ ID NO: 47841 - protein, 979 aa, synthetic construct
  REGION 1..979: note = engineered CasX variant
QEIKRINKIRRRLVKDSNTKKAGKTGPMKTLLVRVMTPDLRERLENLRKKPENIPQPISNTSRANLNKLLTDYTEMKKAILHVYWEEFQKDPVGLMSRVAQPASKKIDQNKLKPEMDEKGNLTTAGFACSQCGQPLFVYKLEQVSEKGKAYTNYFGRCNVAEHEKLILLAQLKPEKDSDEAVTYSLGKFGQRALDFYSIHVTKESTHPVKPLAQIAGNRYASHPVGKALSDACMGTIASFLSKYQDIIIEHQKVVKGNQKRLESLRELAGKENLEYPSVTLPPQPHTKEGVDAYNEVIARVRMWVNLNLWQKLKLSRDDAKPLLRLKGFPSFPLVERQANEVDWWDMVCNVKKLINEKKEDGKVFWQNLAGYKRQEALRPYLSSEEDRKKGKKFARYQLGDLLLHLEKKHGEDWGKVYDEAWERIDKKVEGLSKHIKLEEERRSEDAQSKAALTDWLRAKASFVIEGKKEADKDEFCRCELKLQKWYGDLRGKPFAIEAENSILDISGFSKQYNCAFIWQKDGVKKLNLYLIINYFKGGKLRFKKIKPEAFEANRFYTVINKKSGEIVPMEVNFNFDDPNLIILPLAFGKRQGREFIWNDLLSLETGSLKLANGRVIEKTLYNRRTRQDEPALFVALTFERREVLDSSNIKPMNLIGVDRGENIPAVIALTDPEGCPLSRFKDSLGNPTHILRIGESYKEKQRTIQAKKEVEQRRAGGYSRKYASKAKNLADDMVRNTARDLLYYAVTQDAMLIFENLSRGFGRQGKRTFMAERQYTRMEDWLTAKLAYEGLPSKTYLSKTLAQYTSKTCSNCGFTITSADYDRVLEKLKKTATGWMTTINGKELKVEGQITYYNRYKRQNVVKDLSVELDRLSEESVNNDISSWTKGRSGEALSLLKKRFSHRPVQEKFVCLNCGFETHADEQAALNIARSWLFLRSQEYKKYQTNKTSTGNTDKRAFVETWQSFYRKKLKEVWKPAV

SEQ ID NO: 47842 - protein, 979 aa, synthetic construct
  REGION 1..979: note = engineered CasX variant
QEIKRINKIRRRLVKDSNTKKAGKTGPMKTLLVRVMTPDLRERLENLRKKPENIPQPISNTSRANLNKLLTDYTEMKKAILHVYWEEFQKDPVGLMSRVAQPASKKIDQNKLKPEMDEKGNLTTAGFACSQCGQPLFVYKLEQVSEKGKAYTNYFGRCNVAEHEKLILLAQLKPEKDSDEAVTYSLGKFGQRALDFYSIHVTKESTHPVKPLAQIAGNRYASSPVGKALSDACMGTIASFLSKYQDIIIEHQKVVKGNQKRLESLRELAGKENLEYPSVTLPPQPHTKEGVDAYNEVIARVRMWVNLNLWQKLKLSRDDAKPLLRLKGFPSFPLVERQANEVDWWDMVCNVKKLINEKKEDGKVFWQNLAGYKRQEALRPYLSSEEDRKKGKKFARYQLGDLLLHLEKKHGEDWGKVYDEAWERIDKKVEGLSKHIKLEEERRSEDAQSKAALTDWLRAKASFVIEGKKEADKDEFCRCELKLQKWYGDLRGKPFAIEAENSILDISGFSKQYNCAFIWQKDGVKKLNLYLIINYFKGGKLRFKKIKPEAFEANRFYTVINKKSGEIVPMEVNFNFDDPNLIILPLAFGKRQGREFIWNDLLSLETGSLKLANGRVIEKTLYNRRTRQDEPALFVALTFERREVLDSSNIKPMNLIGVDRGENIPAVIALTDPEGCPLSRFKDSLGNPTHILRIGESYKEKQRTIQAKKEVEQRRAGGYSRKYASKAKNLADDMVRNTARDLLYYAVTQDAMLIFENLSRGFGRQGKRTFMAERQYTRMEDWLTAKLAYEGLPSKTYLSKTLAQYTSKTCSNCGFTITSADYDRVLEKLKKTATGWMTTINGKELKVEGQITYYNRYKRQNVVKDLSVELDRLSEESVNNDISSWTKGRSGEALSLLKKRFSHRPVQEKFVCLNCGFETHADEQAALNIARSWLFLRSQEYKKYQTNKTSTGNTDKRAFVETWQSFYRKKLKEVWKPAV

SEQ ID NO: 47843 - protein, 979 aa, synthetic construct
  REGION 1..979: note = engineered CasX variant
QEIKRINKIRRRLVKDSNTKKAGKTGPMKTLLVRVMTPDLRERLENLRKKPENIPQPISNTSRANLNKLLTDYTEMKKAILHVYWEEFQKDPVGLMSRVAQPASKKIDQNKLKPEMDEKGNLTTAGFACSQCGQPLFVYKLEQVSEKGKAYTNYFGRCNVAEHEKLILLAQLKPEKDSDEAVTYSLGKFGQRALDFYSIHVTKESTHPVKPLAQIAGNRYASTPVGKALSDACMGTIASFLSKYQDIIIEHQKVVKGNQKRLESLRELAGKENLEYPSVTLPPQPHTKEGVDAYNEVIARVRMWVNLNLWQKLKLSRDDAKPLLRLKGFPSFPLVERQANEVDWWDMVCNVKKLINEKKEDGKVFWQNLAGYKRQEALRPYLSSEEDRKKGKKFARYQLGDLLLHLEKKHGEDWGKVYDEAWERIDKKVEGLSKHIKLEEERRSEDAQSKAALTDWLRAKASFVIEGKKEADKDEFCRCELKLQKWYGDLRGKPFAIEAENSILDISGFSKQYNCAFIWQKDGVKKLNLYLIINYFKGGKLRFKKIKPEAFEANRFYTVINKKSGEIVPMEVNFNFDDPNLIILPLAFGKRQGREFIWNDLLSLETGSLKLANGRVIEKTLYNRRTRQDEPALFVALTFERREVLDSSNIKPMNLIGVDRGENIPAVIALTDPEGCPLSRFKDSLGNPTHILRIGESYKEKQRTIQAKKEVEQRRAGGYSRKYASKAKNLADDMVRNTARDLLYYAVTQDAMLIFENLSRGFGRQGKRTFMAERQYTRMEDWLTAKLAYEGLPSKTYLSKTLAQYTSKTCSNCGFTITSADYDRVLEKLKKTATGWMTTINGKELKVEGQITYYNRYKRQNVVKDLSVELDRLSEESVNNDISSWTKGRSGEALSLLKKRFSHRPVQEKFVCLNCGFETHADEQAALNIARSWLFLRSQEYKKYQTNKTSTGNTDKRAFVETWQSFYRKKLKEVWKPAV

SEQ ID NO: 47844 - protein, 979 aa, synthetic construct
  REGION 1..979: note = engineered CasX variant
QEIKRINKIRRRLVKDSNTKKAGKTGPMKTLLVRVMTPDLRERLENLRKKPENIPQPISNTSRANLNKLLTDYTEMKKAILHVYWEEFQKDPVGLMSRVAQPASKKIDQNKLKPEMDEKGNLTTAGFACSQCGQPLFVYKLEQVSEKGKAYTNYFGRCNVAEHEKLILLAQLKPEKDSDEAVTYSLGKFGQRALDFYSIHVTKESTHPVKPLAQIAGNRYASAPVGKALSDACMGTIASFLSKYQDIIIEHQKVVKGNQKRLESLRELAGKENLEYPSVTLPPQPHTKEGVDAYNEVIARVRMWVNLNLWQKLKLSRDDAKPLLRLKGFPSFPLVERQANEVDWWDMVCNVKKLINEKKEDGKVFWQNLAGYKRQEALRPYLSSEEDRKKGKKFARYQLGDLLLHLEKKHGEDWGKVYDEAWERIDKKVEGLSKHIKLEEERRSEDAQSKAALTDWLRAKASFVIEGKKEADKDEFCRCELKLQKWYGDLRGKPFAIEAENSILDISGFSKQYNCAFIWQKDGVKKLNLYLIINYFKGGKLRFKKIKPEAFEANRFYTVINKKSGEIVPMEVNFNFDDPNLIILPLAFGKRQGREFIWNDLLSLETGSLKLANGRVIEKTLYNRRTRQDEPALFVALTFERREVLDSSNIKPMNLIGVDRGENIPAVIALTDPEGCPLSRFKDSLGNPTHILRIGESYKEKQRTIQAKKEVEQRRAGGYSRKYASKAKNLADDMVRNTARDLLYYAVTQDAMLIFENLSRGFGRQGKRTFMAERQYTRMEDWLTAKLAYEGLPSKTYLSKTLAQYTSKTCSNCGFTITSADYDRVLEKLKKTATGWMTTINGKELKVEGQITYYNRYKRQNVVKDLSVELDRLSEESVNNDISSWTKGRSGEALSLLKKRFSHRPVQEKFVCLNCGFETHADEQAALNIARSWLFLRSQEYKKYQTNKTSTGNTDKRAFVETWQSFYRKKLKEVWKPAV

SEQ ID NO: 47845 - protein, 979 aa, synthetic construct
  REGION 1..979: note = engineered CasX variant
QEIKRINKIRRRLVKDSNTKKAGKTGPMKTLLVRVMTPDLRERLENLRKKPENIPQPISNTSRANLNKLLTDYTEMKKAILHVYWEEFQKDPVGLMSRVAQPASKKIDQNKLKPEMDEKGNLTTAGFACSQCGQPLFVYKLEQVSEKGKAYTNYFGRCNVAEHEKLILLAQLKPEKDSDEAVTYSLGKFGQRALDFYSIHVTKESTHPVKPLAQIAGNRYASVPVGKALSDACMGTIASFLSKYQDIIIEHQKVVKGNQKRLESLRELAGKENLEYPSVTLPPQPHTKEGVDAYNEVIARVRMWVNLNLWQKLKLSRDDAKPLLRLKGFPSFPLVERQANEVDWWDMVCNVKKLINEKKEDGKVFWQNLAGYKRQEALRPYLSSEEDRKKGKKFARYQLGDLLLHLEKKHGEDWGKVYDEAWERIDKKVEGLSKHIKLEEERRSEDAQSKAALTDWLRAKASFVIEGKKEADKDEFCRCELKLQKWYGDLRGKPFAIEAENSILDISGFSKQYNCAFIWQKDGVKKLNLYLIINYFKGGKLRFKKIKPEAFEANRFYTVINKKSGEIVPMEVNFNFDDPNLIILPLAFGKRQGREFIWNDLLSLETGSLKLANGRVIEKTLYNRRTRQDEPALFVALTFERREVLDSSNIKPMNLIGVDRGENIPAVIALTDPEGCPLSRFKDSLGNPTHILRIGESYKEKQRTIQAKKEVEQRRAGGYSRKYASKAKNLADDMVRNTARDLLYYAVTQDAMLIFENLSRGFGRQGKRTFMAERQYTRMEDWLTAKLAYEGLPSKTYLSKTLAQYTSKTCSNCGFTITSADYDRVLEKLKKTATGWMTTINGKELKVEGQITYYNRYKRQNVVKDLSVELDRLSEESVNNDISSWTKGRSGEALSLLKKRFSHRPVQEKFVCLNCGFETHADEQAALNIARSWLFLRSQEYKKYQTNKTSTGNTDKRAFVETWQSFYRKKLKEVWKPAV

SEQ ID NO: 47846 - protein, 979 aa, synthetic construct
  REGION 1..979: note = engineered CasX variant
QEIKRINKIRRRLVKDSNTKKAGKTGPMKTLLVRVMTPDLRERLENLRKKPENIPQPISNTSRANLNKLLTDYTEMKKAILHVYWEEFQKDPVGLMSRVAQPASKKIDQNKLKPEMDEKGNLTTAGFACSQCGQPLFVYKLEQVSEKGKAYTNYFGRCNVAEHEKLIKLAQLKPEKDSDEAVTYSLGKFGQRALDFYSIHVTKESTHPVKPLAQIAGNRYASGPVGKALSDACMGTIASFLSKYQDIIIEHQKVVKGNQKRLESLRELAGKENLEYPSVTLPPQPHTKEGVDAYNEVIARVRMWVNLNLWQKLKLSRDDAKPLLRLKGFPSFPLVERQANEVDWWDMVCNVKKLINEKKEDGKVFWQNLAGYKRQEALRPYLSSEEDRKKGKKFARYQLGDLLLHLEKKHGEDWGKVYDEAWERIDKKVEGLSKHIKLEEERRSEDAQSKAALTDWLRAKASFVIEGKKEADKDEFCRCELKLQKWYGDLRGKPFAIEAENSILDISGFSKQYNCAFIWQKDGVKKLNLYLIINYFKGGKLRFKKIKPEAFEANRFYTVINKKSGEIVPMEVNFNFDDPNLIILPLAFGKRQGREFIWNDLLSLETGSLKLANGRVIEKTLYNRRTRQDEPALFVALTFERREVLDSSNIKPMNLIGVDRGENIPAVIALTDPEGCPLSRFKDSLGNPTHILRIGESYKEKQRTIQAKKEVEQRRAGGYSRKYASKAKNLADDMVRNTARDLLYYAVTQDAMLIFENLSRGFGRQGKRTFMAERQYTRMEDWLTAKLAYEGLPSKTYLSKTLAQYTSKTCSNCGFTITSADYDRVLEKLKKTATGWMTTINGKELKVEGQITYYNRYKRQNVVKDLSVELDRLSEESVNNDISSWTKGRSGEALSLLKKRFSHRPVQEKFVCLNCGFETHADEQAALNIARSWLFLRSQEYKKYQTNKTSTGNTDKRAFVETWQSFYRKKLKEVWKPAV

SEQ ID NO: 47847 - protein, 978 aa, synthetic construct
  REGION 1..978: note = engineered CasX variant
QEIKRINKIRRRLVKDSNTKKAGKTGPMKTLLVRVMTPDLRERLENLRKKPENIPQPISNTSRANLNKLLTDYTEMKKAILHVYWEEFQKDPVGLMSRVAQPASKKIDQNKLKPEMDEKGNLTTAGFACSQCGQPLFVYKLEQVSEKGKAYTNYFGRCNVAEHEKLILLAQLKPEKDSDEAVTYSLGKFGQRALDFYSIHVTKESTHPVKPLAQIAGNRYASPVGKALSDACMGTIASFLSKYQDIIIEHQKVVKGNQKRLESLRELAGKENLEYPSVTLPPQPHTKEGVDAYNEVIARVRMWVNLNLWQKLKLSRDDAKPLLRLKGFPSFPLVERQANEVDWWDMVCNVKKLINEKKEDGKVFWQNLAGYKRQEALRPYLSSEEDRKKGKKFARYQLGDLLLHLEKKHGEDWGKVYDEAWERIDKKVEGLSKHIKLEEERRSEDAQSKAALTDWLRAKASFVIEGKKEADKDEFCRCELKLQKWYGDLRGKPFAIEAENSILDISGFSKQYNCAFIWQKDGVKKLNLYLIINYFKGGKLRFKKIKPEAFEANRFYTVINKKSGEIVPMEVNFNFDDPNLIILPLAFGKRQGREFIWNDLLSLETGSLKLANGRVIEKTLYNRRTRQDEPALFVALTFERREVLDSSNIKPMNLIGVDRGENIPAVIALTDPEGCPLSRFKDSLGNPTHILRIGESYKEKQRTIQAKKEVEQRRAGGYSRKYASKAKNLADDMVRNTARDLLYYAVTQDAMLIFENLSRGFGRQGKRTFMAERQYTRMEDWLTAKLAYEGLPSKTYLSKTLAQYTSKTCSNCGFTITSADYDRVLEKLKKTATGWMTTINGKELKVEGQITYYNRYKRQNVVKDLSVELDRLSEESVNNDISSWTKGRSGEALSLLKKRFSHRPVQEKFVCLNCGFETHADEQAALNIARSWLFLRSQEYKKYQTNKTSTGNTDKRAFVETWQSFYRKKLKEVWKPAV

SEQ ID NO: 47848 - protein, 979 aa, synthetic construct
  REGION 1..979: note = engineered CasX variant
QEIKRINKIRRRLVKDSNTKKAGKTGPMKTLLVRVMTPDLRERLENLRKKPENIPQPISNTSRANLNKLLTDYTEMKKAILHVYWEEFQKDPVGLMSRVAQPASKKIDQNKLKPEMDEKGNLTTAGFACSQCGQPLFVYKLEQVSEKGKAYTNYFGRCNVAEHEKLILLAQLKPEKDSDEAVTYSLGKFGQRALDFYSIHVTKESTHPVKPLAQIAGNRYASYPVGKALSDACMGTIASFLSKYQDIIIEHQKVVKGNQKRLESLRELAGKENLEYPSVTLPPQPHTKEGVDAYNEVIARVRMWVNLNLWQKLKLSRDDAKPLLRLKGFPSFPLVERQANEVDWWDMVCNVKKLINEKKEDGKVFWQNLAGYKRQEALRPYLSSEEDRKKGKKFARYQLGDLLLHLEKKHGEDWGKVYDEAWERIDKKVEGLSKHIKLEEERRSEDAQSKAALTDWLRAKASFVIEGSKEADKDEFCRCELKLQKWYGDLRGKPFAIEAENSILDISGFSKQYNCAFIWQKDGVKKLNLYLIINYFKGGKLRFKKIKPEAFEANRFYTVINKKSGEIVPMEVNFNFDDPNLIILPLAFGKRQGREFIWNDLLSLETGSLKLANGRVIEKTLYNRRTRQDEPALFVALTFERREVLDSSNIKPMNLIGVDRGENIPAVIALTDPEGCPLSRFKDSLGNPTHILRIGESYKEKQRTIQAKKEVEQRRAGGYSRKYASKAKNLADDMVRNTARDLLYYAVTQDAMLIFENLSRGFGRQGKRTFMAERQYTRMEDWLTAKLAYEGLPSKTYLSKTLAQYTSKTCSNCGFTITSADYDRVLEKLKKTATGWMTTINGKELKVEGQITYYNRYKRQNVVKDLSVELDRLSEESVNNDISSWTKGRSGEALSLLKKRFSHRPVQEKFVCLNCGFETHADEQAALNIARSWLFLRSQEYKKYQTNKTSTGNTDKRAFVETWQSFYRKKLKEVWKPAV

SEQ ID NO: 47849 - protein, 979 aa, synthetic construct
  REGION 1..979: note = engineered CasX variant
QEIKRINKIRRRLVKDSNTKKAGKTGPMKTLLVRVMTPDLRERLENLRKKPENIPQPISNTSRANLNKLLTDYTEMKKAILHVYWEEFQKDPVGLMSRVAQPASKKIDQNKLKPEMDEKGNLTTAGFACSQCGQPLFVYKLEQVSEKGKAYTNYFGRCNVAEHEKLILLAQLKPEKDSDEAVTYSLGKFGQRALDFYSIHVTKESTHPVKPLAQIAGNRYASHPVGKALSDACMGTIASFLSKYQDIIIEHQKVVKGNQKRLESLRELAGKENLEYPSVTLPPQPHTKEGVDAYNEVIARVRMWVNLNLWQKLKLSRDDAKPLLRLKGFPSFPLVERQANEVDWWDMVCNVKKLINEKKEDGKVFWQNLAGYKRQEALRPYLSSEEDRKKGKKFARYQLGDLLLHLEKKHGEDWGKVYDEAWERIDKKVEGLSKHIKLEEERRSEDAQSKAALTDWLRAKASFVIEGSKEADKDEFCRCELKLQKWYGDLRGKPFAIEAENSILDISGFSKQYNCAFIWQKDGVKKLNLYLIINYFKGGKLRFKKIKPEAFEANRFYTVINKKSGEIVPMEVNFNFDDPNLIILPLAFGKRQGREFIWNDLLSLETGSLKLANGRVIEKTLYNRRTRQDEPALFVALTFERREVLDSSNIKPMNLIGVDRGENIPAVIALTDPEGCPLSRFKDSLGNPTHILRIGESYKEKQRTIQAKKEVEQRRAGGYSRKYASKAKNLADDMVRNTARDLLYYAVTQDAMLIFENLSRGFGRQGKRTFMAERQYTRMEDWLTAKLAYEGLPSKTYLSKTLAQYTSKTCSNCGFTITSADYDRVLEKLKKTATGWMTTINGKELKVEGQITYYNRYKRQNVVKDLSVELDRLSEESVNNDISSWTKGRSGEALSLLKKRFSHRPVQEKFVCLNCGFETHADEQAALNIARSWLFLRSQEYKKYQTNKTSTGNTDKRAFVETWQSFYRKKLKEVWKPAV

SEQ ID NO: 47850 - protein, 979 aa, synthetic construct
  REGION 1..979: note = engineered CasX variant
QEIKRINKIRRRLVKDSNTKKAGKTGPMKTLLVRVMTPDLRERLENLRKKPENIPQPISNTSRANLNKLLTDYTEMKKAILHVYWEEFQKDPVGLMSRVAQPASKKIDQNKLKPEMDEKGNLTTAGFACSQCGQPLFVYKLEQVSEKGKAYTNYFGRCNVAEHEKLILLAQLKPEKDSDEAVTYSLGKFGQRALDFYSIHVTKESTHPVKPLAQIAGNRYASSPVGKALSDACMGTIASFLSKYQDIIIEHQKVVKGNQKRLESLRELAGKENLEYPSVTLPPQPHTKEGVDAYNEVIARVRMWVNLNLWQKLKLSRDDAKPLLRLKGFPSFPLVERQANEVDWWDMVCNVKKLINEKKEDGKVFWQNLAGYKRQEALRPYLSSEEDRKKGKKFARYQLGDLLLHLEKKHGEDWGKVYDEAWERIDKKVEGLSKHIKLEEERRSEDAQSKAALTDWLRAKASFVIEGSKEADKDEFCRCELKLQKWYGDLRGKPFAIEAENSILDISGFSKQYNCAFIWQKDGVKKLNLYLIINYFKGGKLRFKKIKPEAFEANRFYTVINKKSGEIVPMEVNFNFDDPNLIILPLAFGKRQGREFIWNDLLSLETGSLKLANGRVIEKTLYNRRTRQDEPALFVALTFERREVLDSSNIKPMNLIGVDRGENIPAVIALTDPEGCPLSRFKDSLGNPTHILRIGESYKEKQRTIQAKKEVEQRRAGGYSRKYASKAKNLADDMVRNTARDLLYYAVTQDAMLIFENLSRGFGRQGKRTFMAERQYTRMEDWLTAKLAYEGLPSKTYLSKTLAQYTSKTCSNCGFTITSADYDRVLEKLKKTATGWMTTINGKELKVEGQITYYNRYKRQNVVKDLSVELDRLSEESVNNDISSWTKGRSGEALSLLKKRFSHRPVQEKFVCLNCGFETHADEQAALNIARSWLFLRSQEYKKYQTNKTSTGNTDKRAFVETWQSFYRKKLKEVWKPAV

SEQ ID NO: 47851 - protein, 979 aa, synthetic construct
  REGION 1..979: note = engineered CasX variant
QEIKRINKIRRRLVKDSNTKKAGKTGPMKTLLVRVMTPDLRERLENLRKKPENIPQPISNTSRANLNKLLTDYTEMKKAILHVYWEEFQKDPVGLMSRVAQPASKKIDQNKLKPEMDEKGNLTTAGFACSQCGQPLFVYKLEQVSEKGKAYTNYFGRCNVAEHEKLILLAQLKPEKDSDEAVTYSLGKFGQRALDFYSIHVTKESTHPVKPLAQIAGNRYASTPVGKALSDACMGTIASFLSKYQDIIIEHQKVVKGNQKRLESLRELAGKENLEYPSVTLPPQPHTKEGVDAYNEVIARVRMWVNLNLWQKLKLSRDDAKPLLRLKGFPSFPLVERQANEVDWWDMVCNVKKLINEKKEDGKVFWQNLAGYKRQEALRPYLSSEEDRKKGKKFARYQLGDLLLHLEKKHGEDWGKVYDEAWERIDKKVEGLSKHIKLEEERRSEDAQSKAALTDWLRAKASFVIEGSKEADKDEFCRCELKLQKWYGDLRGKPFAIEAENSILDISGFSKQYNCAFIWQKDGVKKLNLYLIINYFKGGKLRFKKIKPEAFEANRFYTVINKKSGEIVPMEVNFNFDDPNLIILPLAFGKRQGREFIWNDLLSLETGSLKLANGRVIEKTLYNRRTRQDEPALFVALTFERREVLDSSNIKPMNLIGVDRGENIPAVIALTDPEGCPLSRFKDSLGNPTHILRIGESYKEKQRTIQAKKEVEQRRAGGYSRKYASKAKNLADDMVRNTARDLLYYAVTQDAMLIFENLSRGFGRQGKRTFMAERQYTRMEDWLTAKLAYEGLPSKTYLSKTLAQYTSKTCSNCGFTITSADYDRVLEKLKKTATGWMTTINGKELKVEGQITYYNRYKRQNVVKDLSVELDRLSEESVNNDISSWTKGRSGEALSLLKKRFSHRPVQEKFVCLNCGFETHADEQAALNIARSWLFLRSQEYKKYQTNKTSTGNTDKRAFVETWQSFYRKKLKEVWKPAV

SEQ ID NO: 47852 - protein, 979 aa, synthetic construct
  REGION 1..979: note = engineered CasX variant
QEIKRINKIRRRLVKDSNTKKAGKTGPMKTLLVRVMTPDLRERLENLRKKPENIPQPISNTSRANLNKLLTDYTEMKKAILHVYWEEFQKDPVGLMSRVAQPASKKIDQNKLKPEMDEKGNLTTAGFACSQCGQPLFVYKLEQVSEKGKAYTNYFGRCNVAEHEKLILLAQLKPEKDSDEAVTYSLGKFGQRALDFYSIHVTKESTHPVKPLAQIAGNRYASAPVGKALSDACMGTIASFLSKYQDIIIEHQKVVKGNQKRLESLRELAGKENLEYPSVTLPPQPHTKEGVDAYNEVIARVRMWVNLNLWQKLKLSRDDAKPLLRLKGFPSFPLVERQANEVDWWDMVCNVKKLINEKKEDGKVFWQNLAGYKRQEALRPYLSSEEDRKKGKKFARYQLGDLLLHLEKKHGEDWGKVYDEAWERIDKKVEGLSKHIKLEEERRSEDAQSKAALTDWLRAKASFVIEGSKEADKDEFCRCELKLQKWYGDLRGKPFAIEAENSILDISGFSKQYNCAFIWQKDGVKKLNLYLIINYFKGGKLRFKKIKPEAFEANRFYTVINKKSGEIVPMEVNFNFDDPNLIILPLAFGKRQGREFIWNDLLSLETGSLKLANGRVIEKTLYNRRTRQDEPALFVALTFERREVLDSSNIKPMNLIGVDRGENIPAVIALTDPEGCPLSRFKDSLGNPTHILRIGESYKEKQRTIQAKKEVEQRRAGGYSRKYASKAKNLADDMVRNTARDLLYYAVTQDAMLIFENLSRGFGRQGKRTFMAERQYTRMEDWLTAKLAYEGLPSKTYLSKTLAQYTSKTCSNCGFTITSADYDRVLEKLKKTATGWMTTINGKELKVEGQITYYNRYKRQNVVKDLSVELDRLSEESVNNDISSWTKGRSGEALSLLKKRFSHRPVQEKFVCLNCGFETHADEQAALNIARSWLFLRSQEYKKYQTNKTSTGNTDKRAFVETWQSFYRKKLKEVWKPAV

SEQ ID NO: 47853 - protein, 979 aa, synthetic construct
  REGION 1..979: note = engineered CasX variant
QEIKRINKIRRRLVKDSNTKKAGKTGPMKTLLVRVMTPDLRERLENLRKKPENIPQPISNTSRANLNKLLTDYTEMKKAILHVYWEEFQKDPVGLMSRVAQPASKKIDQNKLKPEMDEKGNLTTAGFACSQCGQPLFVYKLEQVSEKGKAYTNYFGRCNVAEHEKLILLAQLKPEKDSDEAVTYSLGKFGQRALDFYSIHVTKESTHPVKPLAQIAGNRYASVPVGKALSDACMGTIASFLSKYQDIIIEHQKVVKGNQKRLESLRELAGKENLEYPSVTLPPQPHTKEGVDAYNEVIARVRMWVNLNLWQKLKLSRDDAKPLLRLKGFPSFPLVERQANEVDWWDMVCNVKKLINEKKEDGKVFWQNLAGYKRQEALRPYLSSEEDRKKGKKFARYQLGDLLLHLEKKHGEDWGKVYDEAWERIDKKVEGLSKHIKLEEERRSEDAQSKAALTDWLRAKASFVIEGSKEADKDEFCRCELKLQKWYGDLRGKPFAIEAENSILDISGFSKQYNCAFIWQKDGVKKLNLYLIINYFKGGKLRFKKIKPEAFEANRFYTVINKKSGEIVPMEVNFNFDDPNLIILPLAFGKRQGREFIWNDLLSLETGSLKLANGRVIEKTLYNRRTRQDEPALFVALTFERREVLDSSNIKPMNLIGVDRGENIPAVIALTDPEGCPLSRFKDSLGNPTHILRIGESYKEKQRTIQAKKEVEQRRAGGYSRKYASKAKNLADDMVRNTARDLLYYAVTQDAMLIFENLSRGFGRQGKRTFMAERQYTRMEDWLTAKLAYEGLPSKTYLSKTLAQYTSKTCSNCGFTITSADYDRVLEKLKKTATGWMTTINGKELKVEGQITYYNRYKRQNVVKDLSVELDRLSEESVNNDISSWTKGRSGEALSLLKKRFSHRPVQEKFVCLNCGFETHADEQAALNIARSWLFLRSQEYKKYQTNKTSTGNTDKRAFVETWQSFYRKKLKEVWKPAV

SEQ ID NO: 47854 - protein, 979 aa, synthetic construct
  REGION 1..979: note = engineered CasX variant
QEIKRINKIRRRLVKDSNTKKAGKTGPMKTLLVRVMTPDLRERLENLRKKPENIPQPISNTSRANLNKLLTDYTEMKKAILHVYWEEFQKDPVGLMSRVAQPASKKIDQNKLKPEMDEKGNLTTAGFACSQCGQPLFVYKLEQVSEKGKAYTNYFGRCNVAEHEKLIKLAQLKPEKDSDEAVTYSLGKFGQRALDFYSIHVTKESTHPVKPLAQIAGNRYASGPVGKALSDACMGTIASFLSKYQDIIIEHQKVVKGNQKRLESLRELAGKENLEYPSVTLPPQPHTKEGVDAYNEVIARVRMWVNLNLWQKLKLSRDDAKPLLRLKGFPSFPLVERQANEVDWWDMVCNVKKLINEKKEDGKVFWQNLAGYKRQEALRPYLSSEEDRKKGKKFARYQLGDLLLHLEKKHGEDWGKVYDEAWERIDKKVEGLSKHIKLEEERRSEDAQSKAALTDWLRAKASFVIEGSKEADKDEFCRCELKLQKWYGDLRGKPFAIEAENSILDISGFSKQYNCAFIWQKDGVKKLNLYLIINYFKGGKLRFKKIKPEAFEANRFYTVINKKSGEIVPMEVNFNFDDPNLIILPLAFGKRQGREFIWNDLLSLETGSLKLANGRVIEKTLYNRRTRQDEPALFVALTFERREVLDSSNIKPMNLIGVDRGENIPAVIALTDPEGCPLSRFKDSLGNPTHILRIGESYKEKQRTIQAKKEVEQRRAGGYSRKYASKAKNLADDMVRNTARDLLYYAVTQDAMLIFENLSRGFGRQGKRTFMAERQYTRMEDWLTAKLAYEGLPSKTYLSKTLAQYTSKTCSNCGFTITSADYDRVLEKLKKTATGWMTTINGKELKVEGQITYYNRYKRQNVVKDLSVELDRLSEESVNNDISSWTKGRSGEALSLLKKRFSHRPVQEKFVCLNCGFETHADEQAALNIARSWLFLRSQEYKKYQTNKTSTGNTDKRAFVETWQSFYRKKLKEVWKPAV

SEQ ID NO: 47855 - protein, 978 aa, synthetic construct
  REGION 1..978: note = engineered CasX variant
QEIKRINKIRRRLVKDSNTKKAGKTGPMKTLLVRVMTPDLRERLENLRKKPENIPQPISNTSRANLNKLLTDYTEMKKAILHVYWEEFQKDPVGLMSRVAQPASKKIDQNKLKPEMDEKGNLTTAGFACSQCGQPLFVYKLEQVSEKGKAYTNYFGRCNVAEHEKLILLAQLKPEKDSDEAVTYSLGKFGQRALDFYSIHVTKESTHPVKPLAQIAGNRYASPVGKALSDACMGTIASFLSKYQDIIIEHQKVVKGNQKRLESLRELAGKENLEYPSVTLPPQPHTKEGVDAYNEVIARVRMWVNLNLWQKLKLSRDDAKPLLRLKGFPSFPLVERQANEVDWWDMVCNVKKLINEKKEDGKVFWQNLAGYKRQEALRPYLSSEEDRKKGKKFARYQLGDLLLHLEKKHGEDWGKVYDEAWERIDKKVEGLSKHIKLEEERRSEDAQSKAALTDWLRAKASFVIEGSKEADKDEFCRCELKLQKWYGDLRGKPFAIEAENSILDISGFSKQYNCAFIWQKDGVKKLNLYLIINYFKGGKLRFKKIKPEAFEANRFYTVINKKSGEIVPMEVNFNFDDPNLIILPLAFGKRQGREFIWNDLLSLETGSLKLANGRVIEKTLYNRRTRQDEPALFVALTFERREVLDSSNIKPMNLIGVDRGENIPAVIALTDPEGCPLSRFKDSLGNPTHILRIGESYKEKQRTIQAKKEVEQRRAGGYSRKYASKAKNLADDMVRNTARDLLYYAVTQDAMLIFENLSRGFGRQGKRTFMAERQYTRMEDWLTAKLAYEGLPSKTYLSKTLAQYTSKTCSNCGFTITSADYDRVLEKLKKTATGWMTTINGKELKVEGQITYYNRYKRQNVVKDLSVELDRLSEESVNNDISSWTKGRSGEALSLLKKRFSHRPVQEKFVCLNCGFETHADEQAALNIARSWLFLRSQEYKKYQTNKTSTGNTDKRAFVETWQSFYRKKLKEVWKPAV

SEQ ID NO: 47856 - protein, 980 aa, synthetic construct
  REGION 1..980: note = engineered CasX variant
QEIKRINKIRRRLVKDSNTKKAGKTGPMKTLLVRVMTPDLRERLENLRKKPENIPQPISNTSRANLNKLLTDYTEMKKAILHVYWEEFQKDPVGLMSRVAQPASKKIDQNKLKPEMDEKGNLTTAGFACSQCGQPLFVYKLEQVSEKGKAYTNYFGRCNVAEHEKLILLAQLKPEKDSDEAVTYSLGKFGQRALDFYSIHVTKESTHPVKPLAQIAGNRYASYPVGKALSDACMGTIASFLSKYQDIIIEHQKVVKGNQKRLESLRELAGKENLEYPSVTLPPQPHTKEGVDAYNEVIARVRMWVNLNLWQKLKLSRDDAKPLLRLKGFPSFPLVERQANEVDWWDMVCNVKKLINEKKEDGKVFWQNLAGYKRQEALRPYLSSEEDRKKGKKFARYQLGDLLLHLEKKHGEDWGKVYDEAWERIDKKVEGLSKHIKLEEERRSEDAQSKAALTDWLRAKASFVIEGLKEADDKDEFCRCELKLQKWYGDLRGKPFAIEAENSILDISGFSKQYNCAFIWQKDGVKKLNLYLIINYFKGGKLRFKKIKPEAFEANRFYTVINKKSGEIVPMEVNFNFDDPNLIILPLAFGKRQGREFIWNDLLSLETGSLKLANGRVIEKTLYNRRTRQDEPALFVALTFERREVLDSSNIKPMNLIGVDRGENIPAVIALTDPEGCPLSRFKDSLGNPTHILRIGESYKEKQRTIQAKKEVEQRRAGGYSRKYASKAKNLADDMVRNTARDLLYYAVTQDAMLIFENLSRGFGRQGKRTFMAERQYTRMEDWLTAKLAYEGLPSKTYLSKTLAQYTSKTCSNCGFTITSADYDRVLEKLKKTATGWMTTINGKELKVEGQITYYNRYKRQNVVKDLSVELDRLSEESVNNDISSWTKGRSGEALSLLKKRFSHRPVQEKFVCLNCGFETHADEQAALNIARSWLFLRSQEYKKYQTNKTSTGNTDKRAFVETWQSFYRKKLKEVWKPAV

SEQ ID NO: 47857 - protein, 980 aa, synthetic construct
  REGION 1..980: note = engineered CasX variant
QEIKRINKIRRRLVKDSNTKKAGKTGPMKTLLVRVMTPDLRERLENLRKKPENIPQPISNTSRANLNKLLTDYTEMKKAILHVYWEEFQKDPVGLMSRVAQPASKKIDQNKLKPEMDEKGNLTTAGFACSQCGQPLFVYKLEQVSEKGKAYTNYFGRCNVAEHEKLILLAQLKPEKDSDEAVTYSLGKFGQRALDFYSIHVTKESTHPVKPLAQIAGNRYASHPVGKALSDACMGTIASFLSKYQDIIIEHQKVVKGNQKRLESLRELAGKENLEYPSVTLPPQPHTKEGVDAYNEVIARVRMWVNLNLWQKLKLSRDDAKPLLRLKGFPSFPLVERQANEVDWWDMVCNVKKLINEKKEDGKVFWQNLAGYKRQEALRPYLSSEEDRKKGKKFARYQLGDLLLHLEKKHGEDWGKVYDEAWERIDKKVEGLSKHIKLEEERRSEDAQSKAALTDWLRAKASFVIEGLKEADDKDEFCRCELKLQKWYGDLRGKPFAIEAENSILDISGFSKQYNCAFIWQKDGVKKLNLYLIINYFKGGKLRFKKIKPEAFEANRFYTVINKKSGEIVPMEVNFNFDDPNLIILPLAFGKRQGREFIWNDLLSLETGSLKLANGRVIEKTLYNRRTRQDEPALFVALTFERREVLDSSNIKPMNLIGVDRGENIPAVIALTDPEGCPLSRFKDSLGNPTHILRIGESYKEKQRTIQAKKEVEQRRAGGYSRKYASKAKNLADDMVRNTARDLLYYAVTQDAMLIFENLSRGFGRQGKRTFMAERQYTRMEDWLTAKLAYEGLPSKTYLSKTLAQYTSKTCSNCGFTITSADYDRVLEKLKKTATGWMTTINGKELKVEGQITYYNRYKRQNVVKDLSVELDRLSEESVNNDISSWTKGRSGEALSLLKKRFSHRPVQEKFVCLNCGFETHADEQAALNIARSWLFLRSQEYKKYQTNKTSTGNTDKRAFVETWQSFYRKKLKEVWKPAV

SEQ ID NO: 47858 - protein, 980 aa, synthetic construct
  REGION 1..980: note = engineered CasX variant
QEIKRINKIRRRLVKDSNTKKAGKTGPMKTLLVRVMTPDLRERLENLRKKPENIPQPISNTSRANLNKLLTDYTEMKKAILHVYWEEFQKDPVGLMSRVAQPASKKIDQNKLKPEMDEKGNLTTAGFACSQCGQPLFVYKLEQVSEKGKAYTNYFGRCNVAEHEKLILLAQLKPEKDSDEAVTYSLGKFGQRALDFYSIHVTKESTHPVKPLAQIAGNRYASSPVGKALSDACMGTIASFLSKYQDIIIEHQKVVKGNQKRLESLRELAGKENLEYPSVTLPPQPHTKEGVDAYNEVIARVRMWVNLNLWQKLKLSRDDAKPLLRLKGFPSFPLVERQANEVDWWDMVCNVKKLINEKKEDGKVFWQNLAGYKRQEALRPYLSSEEDRKKGKKFARYQLGDLLLHLEKKHGEDWGKVYDEAWERIDKKVEGLSKHIKLEEERRSEDAQSKAALTDWLRAKASFVIEGLKEADDKDEFCRCELKLQKWYGDLRGKPFAIEAENSILDISGFSKQYNCAFIWQKDGVKKLNLYLIINYFKGGKLRFKKIKPEAFEANRFYTVINKKSGEIVPMEVNFNFDDPNLIILPLAFGKRQGREFIWNDLLSLETGSLKLANGRVIEKTLYNRRTRQDEPALFVALTFERREVLDSSNIKPMNLIGVDRGENIPAVIALTDPEGCPLSRFKDSLGNPTHILRIGESYKEKQRTIQAKKEVEQRRAGGYSRKYASKAKNLADDMVRNTARDLLYYAVTQDAMLIFENLSRGFGRQGKRTFMAERQYTRMEDWLTAKLAYEGLPSKTYLSKTLAQYTSKTCSNCGFTITSADYDRVLEKLKKTATGWMTTINGKELKVEGQITYYNRYKRQNVVKDLSVELDRLSEESVNNDISSWTKGRSGEALSLLKKRFSHRPVQEKFVCLNCGFETHADEQAALNIARSWLFLRSQEYKKYQTNKTSTGNTDKRAFVETWQSFYRKKLKEVWKPAV

SEQ ID NO: 47859 - protein, 980 aa, synthetic construct
  REGION 1..980: note = engineered CasX variant
QEIKRINKIRRRLVKDSNTKKAGKTGPMKTLLVRVMTPDLRERLENLRKKPENIPQPISNTSRANLNKLLTDYTEMKKAILHVYWEEFQKDPVGLMSRVAQPASKKIDQNKLKPEMDEKGNLTTAGFACSQCGQPLFVYKLEQVSEKGKAYTNYFGRCNVAEHEKLILLAQLKPEKDSDEAVTYSLGKFGQRALDFYSIHVTKESTHPVKPLAQIAGNRYASTPVGKALSDACMGTIASFLSKYQDIIIEHQKVVKGNQKRLESLRELAGKENLEYPSVTLPPQPHTKEGVDAYNEVIARVRMWVNLNLWQKLKLSRDDAKPLLRLKGFPSFPLVERQANEVDWWDMVCNVKKLINEKKEDGKVFWQNLAGYKRQEALRPYLSSEEDRKKGKKFARYQLGDLLLHLEKKHGEDWGKVYDEAWERIDKKVEGLSKHIKLEEERRSEDAQSKAALTDWLRAKASFVIEGLKEADDKDEFCRCELKLQKWYGDLRGKPFAIEAENSILDISGFSKQYNCAFIWQKDGVKKLNLYLIINYFKGGKLRFKKIKPEAFEANRFYTVINKKSGEIVPMEVNFNFDDPNLIILPLAFGKRQGREFIWNDLLSLETGSLKLANGRVIEKTLYNRRTRQDEPALFVALTFERREVLDSSNIKPMNLIGVDRGENIPAVIALTDPEGCPLSRFKDSLGNPTHILRIGESYKEKQRTIQAKKEVEQRRAGGYSRKYASKAKNLADDMVRNTARDLLYYAVTQDAMLIFENLSRGFGRQGKRTFMAERQYTRMEDWLTAKLAYEGLPSKTYLSKTLAQYTSKTCSNCGFTITSADYDRVLEKLKKTATGWMTTINGKELKVEGQITYYNRYKRQNVVKDLSVELDRLSEESVNNDISSWTKGRSGEALSLLKKRFSHRPVQEKFVCLNCGFETHADEQAALNIARSWLFLRSQEYKKYQTNKTSTGNTDKRAFVETWQSFYRKKLKEVWKPAV

SEQ ID NO: 47860 - protein, 980 aa, synthetic construct
  REGION 1..980: note = engineered CasX variant
QEIKRINKIRRRLVKDSNTKKAGKTGPMKTLLVRVMTPDLRERLENLRKKPENIPQPISNTSRANLNKLLTDYTEMKKAILHVYWEEFQKDPVGLMSRVAQPASKKIDQNKLKPEMDEKGNLTTAGFACSQCGQPLFVYKLEQVSEKGKAYTNYFGRCNVAEHEKLILLAQLKPEKDSDEAVTYSLGKFGQRALDFYSIHVTKESTHPVKPLAQIAGNRYASAPVGKALSDACMGTIASFLSKYQDIIIEHQKVVKGNQKRLESLRELAGKENLEYPSVTLPPQPHTKEGVDAYNEVIARVRMWVNLNLWQKLKLSRDDAKPLLRLKGFPSFPLVERQANEVDWWDMVCNVKKLINEKKEDGKVFWQNLAGYKRQEALRPYLSSEEDRKKGKKFARYQLGDLLLHLEKKHGEDWGKVYDEAWERIDKKVEGLSKHIKLEEERRSEDAQSKAALTDWLRAKASFVIEGLKEADDKDEFCRCELKLQKWYGDLRGKPFAIEAENSILDISGFSKQYNCAFIWQKDGVKKLNLYLIINYFKGGKLRFKKIKPEAFEANRFYTVINKKSGEIVPMEVNFNFDDPNLIILPLAFGKRQGREFIWNDLLSLETGSLKLANGRVIEKTLYNRRTRQDEPALFVALTFERREVLDSSNIKPMNLIGVDRGENIPAVIALTDPEGCPLSRFKDSLGNPTHILRIGESYKEKQRTIQAKKEVEQRRAGGYSRKYASKAKNLADDMVRNTARDLLYYAVTQDAMLIFENLSRGFGRQGKRTFMAERQYTRMEDWLTAKLAYEGLPSKTYLSKTLAQYTSKTCSNCGFTITSADYDRVLEKLKKTATGWMTTINGKELKVEGQITYYNRYKRQNVVKDLSVELDRLSEESVNNDISSWTKGRSGEALSLLKKRFSHRPVQEKFVCLNCGFETHADEQAALNIARSWLFLRSQEYKKYQTNKTSTGNTDKRAFVETWQSFYRKKLKEVWKPAV

SEQ ID NO: 47861 - protein, 980 aa, synthetic construct
  REGION 1..980: note = engineered CasX variant
QEIKRINKIRRRLVKDSNTKKAGKTGPMKTLLVRVMTPDLRERLENLRKKPENIPQPISNTSRANLNKLLTDYTEMKKAILHVYWEEFQKDPVGLMSRVAQPASKKIDQNKLKPEMDEKGNLTTAGFACSQCGQPLFVYKLEQVSEKGKAYTNYFGRCNVAEHEKLILLAQLKPEKDSDEAVTYSLGKFGQRALDFYSIHVTKESTHPVKPLAQIAGNRYASVPVGKALSDACMGTIASFLSKYQDIIIEHQKVVKGNQKRLESLRELAGKENLEYPSVTLPPQPHTKEGVDAYNEVIARVRMWVNLNLWQKLKLSRDDAKPLLRLKGFPSFPLVERQANEVDWWDMVCNVKKLINEKKEDGKVFWQNLAGYKRQEALRPYLSSEEDRKKGKKFARYQLGDLLLHLEKKHGEDWGKVYDEAWERIDKKVEGLSKHIKLEEERRSEDAQSKAALTDWLRAKASFVIEGLKEADDKDEFCRCELKLQKWYGDLRGKPFAIEAENSILDISGFSKQYNCAFIWQKDGVKKLNLYLIINYFKGGKLRFKKIKPEAFEANRFYTVINKKSGEIVPMEVNFNFDDPNLIILPLAFGKRQGREFIWNDLLSLETGSLKLANGRVIEKTLYNRRTRQDEPALFVALTFERREVLDSSNIKPMNLIGVDRGENIPAVIALTDPEGCPLSRFKDSLGNPTHILRIGESYKEKQRTIQAKKEVEQRRAGGYSRKYASKAKNLADDMVRNTARDLLYYAVTQDAMLIFENLSRGFGRQGKRTFMAERQYTRMEDWLTAKLAYEGLPSKTYLSKTLAQYTSKTCSNCGFTITSADYDRVLEKLKKTATGWMTTINGKELKVEGQITYYNRYKRQNVVKDLSVELDRLSEESVNNDISSWTKGRSGEALSLLKKRFSHRPVQEKFVCLNCGFETHADEQAALNIARSWLFLRSQEYKKYQTNKTSTGNTDKRAFVETWQSFYRKKLKEVWKPAV

SEQ ID NO: 47862 - protein, 980 aa, synthetic construct
  REGION 1..980: note = engineered CasX variant
QEIKRINKIRRRLVKDSNTKKAGKTGPMKTLLVRVMTPDLRERLENLRKKPENIPQPISNTSRANLNKLLTDYTEMKKAILHVYWEEFQKDPVGLMSRVAQPASKKIDQNKLKPEMDEKGNLTTAGFACSQCGQPLFVYKLEQVSEKGKAYTNYFGRCNVAEHEKLIKLAQLKPEKDSDEAVTYSLGKFGQRALDFYSIHVTKESTHPVKPLAQIAGNRYASGPVGKALSDACMGTIASFLSKYQDIIIEHQKVVKGNQKRLESLRELAGKENLEYPSVTLPPQPHTKEGVDAYNEVIARVRMWVNLNLWQKLKLSRDDAKPLLRLKGFPSFPLVERQANEVDWWDMVCNVKKLINEKKEDGKVFWQNLAGYKRQEALRPYLSSEEDRKKGKKFARYQLGDLLLHLEKKHGEDWGKVYDEAWERIDKKVEGLSKHIKLEEERRSEDAQSKAALTDWLRAKASFVIEGLKEADDKDEFCRCELKLQKWYGDLRGKPFAIEAENSILDISGFSKQYNCAFIWQKDGVKKLNLYLIINYFKGGKLRFKKIKPEAFEANRFYTVINKKSGEIVPMEVNFNFDDPNLIILPLAFGKRQGREFIWNDLLSLETGSLKLANGRVIEKTLYNRRTRQDEPALFVALTFERREVLDSSNIKPMNLIGVDRGENIPAVIALTDPEGCPLSRFKDSLGNPTHILRIGESYKEKQRTIQAKKEVEQRRAGGYSRKYASKAKNLADDMVRNTARDLLYYAVTQDAMLIFENLSRGFGRQGKRTFMAERQYTRMEDWLTAKLAYEGLPSKTYLSKTLAQYTSKTCSNCGFTITSADYDRVLEKLKKTATGWMTTINGKELKVEGQITYYNRYKRQNVVKDLSVELDRLSEESVNNDISSWTKGRSGEALSLLKKRFSHRPVQEKFVCLNCGFETHADEQAALNIARSWLFLRSQEYKKYQTNKTSTGNTDKRAFVETWQSFYRKKLKEVWKPAV

SEQ ID NO: 47863 - protein, 979 aa, synthetic construct
  REGION 1..979: note = engineered CasX variant
QEIKRINKIRRRLVKDSNTKKAGKTGPMKTLLVRVMTPDLRERLENLRKKPENIPQPISNTSRANLNKLLTDYTEMKKAILHVYWEEFQKDPVGLMSRVAQPASKKIDQNKLKPEMDEKGNLTTAGFACSQCGQPLFVYKLEQVSEKGKAYTNYFGRCNVAEHEKLILLAQLKPEKDSDEAVTYSLGKFGQRALDFYSIHVTKESTHPVKPLAQIAGNRYASPVGKALSDACMGTIASFLSKYQDIIIEHQKVVKGNQKRLESLRELAGKENLEYPSVTLPPQPHTKEGVDAYNEVIARVRMWVNLNLWQKLKLSRDDAKPLLRLKGFPSFPLVERQANEVDWWDMVCNVKKLINEKKEDGKVFWQNLAGYKRQEALRPYLSSEEDRKKGKKFARYQLGDLLLHLEKKHGEDWGKVYDEAWERIDKKVEGLSKHIKLEEERRSEDAQSKAALTDWLRAKASFVIEGLKEADDKDEFCRCELKLQKWYGDLRGKPFAIEAENSILDISGFSKQYNCAFIWQKDGVKKLNLYLIINYFKGGKLRFKKIKPEAFEANRFYTVINKKSGEIVPMEVNFNFDDPNLIILPLAFGKRQGREFIWNDLLSLETGSLKLANGRVIEKTLYNRRTRQDEPALFVALTFERREVLDSSNIKPMNLIGVDRGENIPAVIALTDPEGCPLSRFKDSLGNPTHILRIGESYKEKQRTIQAKKEVEQRRAGGYSRKYASKAKNLADDMVRNTARDLLYYAVTQDAMLIFENLSRGFGRQGKRTFMAERQYTRMEDWLTAKLAYEGLPSKTYLSKTLAQYTSKTCSNCGFTITSADYDRVLEKLKKTATGWMTTINGKELKVEGQITYYNRYKRQNVVKDLSVELDRLSEESVNNDISSWTKGRSGEALSLLKKRFSHRPVQEKFVCLNCGFETHADEQAALNIARSWLFLRSQEYKKYQTNKTSTGNTDKRAFVETWQSFYRKKLKEVWKPAV

SEQ ID NO: 47864 - protein, 980 aa, synthetic construct
  REGION 1..980: note = engineered CasX variant
QEIKRINKIRRRLVKDSNTKKAGKTGPMKTLLVRVMTPDLRERLENLRKKPENIPQPISNTSRANLNKLLTDYTEMKKAILHVYWEEFQKDPVGLMSRVAQPASKKIDQNKLKPEMDEKGNLTTAGFACSQCGQPLFVYKLEQVSEKGKAYTNYFGRCNVAEHEKLILLAQLKPEKDSDEAVTYSLGKFGQRALDFYSIHVTKESTHPVKPLAQIAGNRYASYPVGKALSDACMGTIASFLSKYQDIIIEHQKVVKGNQKRLESLRELAGKENLEYPSVTLPPQPHTKEGVDAYNEVIARVRMWVNLNLWQKLKLSRDDAKPLLRLKGFPSFPLVERQANEVDWWDMVCNVKKLINEKKEDGKVFWQNLAGYKRQEALRPYLSSEEDRKKGKKFARYQLGDLLLHLEKKHGEDWGKVYDEAWERIDKKVEGLSKHIKLEEERRSEDAQSKAALTDWLRAKASFVIEGLKEADKDEFCRCELKLQKWYGDLRGKPFAIEAENSILDISGFSKQYNCAFIWQKDGVKKLNLYLIINYFKGGKLRFKKIKPEAFEANRFYTVINKKSGEIVPMEVNFNFDDPNLIILPLAFGKRQGREFIWNDLLSLETGSLKLANGRVIEKTLYNRRTRQDEPALFVALTFERREVLDSSNIKPMNLIGVDRGENIPAVIALTDPEGCPLSRFKDSLGNPTHILRIGESYKEKQRTIQAKKEVEQRRAGGYSRKYASKAKNLADDMVRNTARDLLYYAVTQDAMLIFENLSRGFGRQGKRTFMAERQYTRMEDWLTAKLAYEGLPSKTYLSKTLAQYTSKTCSNCGFTITSADYDRVLEKLKKTATGWMTTINGKELKVEGQITYYNRYKRQNVVKDLSVELDRLSEESVNNDISSWTKGRSGNEALSLLKKRFSHRPVQEKFVCLNCGFETHADEQAALNIARSWLFLRSQEYKKYQTNKTSTGNTDKRAFVETWQSFYRKKLKEVWKPAV

SEQ ID NO: 47865 - protein, 980 aa, synthetic construct
  REGION 1..980: note = engineered CasX variant
QEIKRINKIRRRLVKDSNTKKAGKTGPMKTLLVRVMTPDLRERLENLRKKPENIPQPISNTSRANLNKLLTDYTEMKKAILHVYWEEFQKDPVGLMSRVAQPASKKIDQNKLKPEMDEKGNLTTAGFACSQCGQPLFVYKLEQVSEKGKAYTNYFGRCNVAEHEKLILLAQLKPEKDSDEAVTYSLGKFGQRALDFYSIHVTKESTHPVKPLAQIAGNRYASHPVGKALSDACMGTIASFLSKYQDIIIEHQKVVKGNQKRLESLRELAGKENLEYPSVTLPPQPHTKEGVDAYNEVIARVRMWVNLNLWQKLKLSRDDAKPLLRLKGFPSFPLVERQANEVDWWDMVCNVKKLINEKKEDGKVFWQNLAGYKRQEALRPYLSSEEDRKKGKKFARYQLGDLLLHLEKKHGEDWGKVYDEAWERIDKKVEGLSKHIKLEEERRSEDAQSKAALTDWLRAKASFVIEGLKEADKDEFCRCELKLQKWYGDLRGKPFAIEAENSILDISGFSKQYNCAFIWQKDGVKKLNLYLIINYFKGGKLRFKKIKPEAFEANRFYTVINKKSGEIVPMEVNFNFDDPNLIILPLAFGKRQGREFIWNDLLSLETGSLKLANGRVIEKTLYNRRTRQDEPALFVALTFERREVLDSSNIKPMNLIGVDRGENIPAVIALTDPEGCPLSRFKDSLGNPTHILRIGESYKEKQRTIQAKKEVEQRRAGGYSRKYASKAKNLADDMVRNTARDLLYYAVTQDAMLIFENLSRGFGRQGKRTFMAERQYTRMEDWLTAKLAYEGLPSKTYLSKTLAQYTSKTCSNCGFTITSADYDRVLEKLKKTATGWMTTINGKELKVEGQITYYNRYKRQNVVKDLSVELDRLSEESVNNDISSWTKGRSGNEALSLLKKRFSHRPVQEKFVCLNCGFETHADEQAALNIARSWLFLRSQEYKKYQTNKTSTGNTDKRAFVETWQSFYRKKLKEVWKPAV

SEQ ID NO: 47866 - protein, 980 aa, synthetic construct
  REGION 1..980: note = engineered CasX variant
QEIKRINKIRRRLVKDSNTKKAGKTGPMKTLLVRVMTPDLRERLENLRKKPENIPQPISNTSRANLNKLLTDYTEMKKAILHVYWEEFQKDPVGLMSRVAQPASKKIDQNKLKPEMDEKGNLTTAGFACSQCGQPLFVYKLEQVSEKGKAYTNYFGRCNVAEHEKLILLAQLKPEKDSDEAVTYSLGKFGQRALDFYSIHVTKESTHPVKPLAQIAGNRYASSPVGKALSDACMGTIASFLSKYQDIIIEHQKVVKGNQKRLESLRELAGKENLEYPSVTLPPQPHTKEGVDAYNEVIARVRMWVNLNLWQKLKLSRDDAKPLLRLKGFPSFPLVERQANEVDWWDMVCNVKKLINEKKEDGKVFWQNLAGYKRQEALRPYLSSEEDRKKGKKFARYQLGDLLLHLEKKHGEDWGKVYDEAWERIDKKVEGLSKHIKLEEERRSEDAQSKAALTDWLRAKASFVIEGLKEADKDEFCRCELKLQKWYGDLRGKPFAIEAENSILDISGFSKQYNCAFIWQKDGVKKLNLYLIINYFKGGKLRFKKIKPEAFEANRFYTVINKKSGEIVPMEVNFNFDDPNLIILPLAFGKRQGREFIWNDLLSLETGSLKLANGRVIEKTLYNRRTRQDEPALFVALTFERREVLDSSNIKPMNLIGVDRGENIPAVIALTDPEGCPLSRFKDSLGNPTHILRIGESYKEKQRTIQAKKEVEQRRAGGYSRKYASKAKNLADDMVRNTARDLLYYAVTQDAMLIFENLSRGFGRQGKRTFMAERQYTRMEDWLTAKLAYEGLPSKTYLSKTLAQYTSKTCSNCGFTITSADYDRVLEKLKKTATGWMTTINGKELKVEGQITYYNRYKRQNVVKDLSVELDRLSEESVNNDISSWTKGRSGNEALSLLKKRFSHRPVQEKFVCLNCGFETHADEQAALNIARSWLFLRSQEYKKYQTNKTSTGNTDKRAFVETWQSFYRKKLKEVWKPAV

SEQ ID NO: 47867 - protein, 980 aa, synthetic construct
  REGION 1..980: note = engineered CasX variant
QEIKRINKIRRRLVKDSNTKKAGKTGPMKTLLVRVMTPDLRERLENLRKKPENIPQPISNTSRANLNKLLTDYTEMKKAILHVYWEEFQKDPVGLMSRVAQPASKKIDQNKLKPEMDEKGNLTTAGFACSQCGQPLFVYKLEQVSEKGKAYTNYFGRCNVAEHEKLILLAQLKPEKDSDEAVTYSLGKFGQRALDFYSIHVTKESTHPVKPLAQIAGNRYASTPVGKALSDACMGTIASFLSKYQDIIIEHQKVVKGNQKRLESLRELAGKENLEYPSVTLPPQPHTKEGVDAYNEVIARVRMWVNLNLWQKLKLSRDDAKPLLRLKGFPSFPLVERQANEVDWWDMVCNVKKLINEKKEDGKVFWQNLAGYKRQEALRPYLSSEEDRKKGKKFARYQLGDLLLHLEKKHGEDWGKVYDEAWERIDKKVEGLSKHIKLEEERRSEDAQSKAALTDWLRAKASFVIEGLKEADKDEFCRCELKLQKWYGDLRGKPFAIEAENSILDISGFSKQYNCAFIWQKDGVKKLNLYLIINYFKGGKLRFKKIKPEAFEANRFYTVINKKSGEIVPMEVNFNFDDPNLIILPLAFGKRQGREFIWNDLLSLETGSLKLANGRVIEKTLYNRRTRQDEPALFVALTFERREVLDSSNIKPMNLIGVDRGENIPAVIALTDPEGCPLSRFKDSLGNPTHILRIGESYKEKQRTIQAKKEVEQRRAGGYSRKYASKAKNLADDMVRNTARDLLYYAVTQDAMLIFENLSRGFGRQGKRTFMAERQYTRMEDWLTAKLAYEGLPSKTYLSKTLAQYTSKTCSNCGFTITSADYDRVLEKLKKTATGWMTTINGKELKVEGQITYYNRYKRQNVVKDLSVELDRLSEESVNNDISSWTKGRSGNEALSLLKKRFSHRPVQEKFVCLNCGFETHADEQAALNIARSWLFLRSQEYKKYQTNKTSTGNTDKRAFVETWQSFYRKKLKEVWKPAV

SEQ ID NO: 47868 - protein, 980 aa, synthetic construct
  REGION 1..980: note = engineered CasX variant
QEIKRINKIRRRLVKDSNTKKAGKTGPMKTLLVRVMTPDLRERLENLRKKPENIPQPISNTSRANLNKLLTDYTEMKKAILHVYWEEFQKDPVGLMSRVAQPASKKIDQNKLKPEMDEKGNLTTAGFACSQCGQPLFVYKLEQVSEKGKAYTNYFGRCNVAEHEKLILLAQLKPEKDSDEAVTYSLGKFGQRALDFYSIHVTKESTHPVKPLAQIAGNRYASAPVGKALSDACMGTIASFLSKYQDIIIEHQKVVKGNQKRLESLRELAGKENLEYPSVTLPPQPHTKEGVDAYNEVIARVRMWVNLNLWQKLKLSRDDAKPLLRLKGFPSFPLVERQANEVDWWDMVCNVKKLINEKKEDGKVFWQNLAGYKRQEALRPYLSSEEDRKKGKKFARYQLGDLLLHLEKKHGEDWGKVYDEAWERIDKKVEGLSKHIKLEEERRSEDAQSKAALTDWLRAKASFVIEGLKEADKDEFCRCELKLQKWYGDLRGKPFAIEAENSILDISGFSKQYNCAFIWQKDGVKKLNLYLIINYFKGGKLRFKKIKPEAFEANRFYTVINKKSGEIVPMEVNFNFDDPNLIILPLAFGKRQGREFIWNDLLSLETGSLKLANGRVIEKTLYNRRTRQDEPALFVALTFERREVLDSSNIKPMNLIGVDRGENIPAVIALTDPEGCPLSRFKDSLGNPTHILRIGESYKEKQRTIQAKKEVEQRRAGGYSRKYASKAKNLADDMVRNTARDLLYYAVTQDAMLIFENLSRGFGRQGKRTFMAERQYTRMEDWLTAKLAYEGLPSKTYLSKTLAQYTSKTCSNCGFTITSADYDRVLEKLKKTATGWMTTINGKELKVEGQITYYNRYKRQNVVKDLSVELDRLSEESVNNDISSWTKGRSGNEALSLLKKRFSHRPVQEKFVCLNCGFETHADEQAALNIARSWLFLRSQEYKKYQTNKTSTGNTDKRAFVETWQSFYRKKLKEVWKPAV

SEQ ID NO: 47869 - protein, 980 aa, synthetic construct
  REGION 1..980: note = engineered CasX variant
QEIKRINKIRRRLVKDSNTKKAGKTGPMKTLLVRVMTPDLRERLENLRKKPENIPQPISNTSRANLNKLLTDYTEMKKAILHVYWEEFQKDPVGLMSRVAQPASKKIDQNKLKPEMDEKGNLTTAGFACSQCGQPLFVYKLEQVSEKGKAYTNYFGRCNVAEHEKLILLAQLKPEKDSDEAVTYSLGKFGQRALDFYSIHVTKESTHPVKPLAQIAGNRYASVPVGKALSDACMGTIASFLSKYQDIIIEHQKVVKGNQKRLESLRELAGKENLEYPSVTLPPQPHTKEGVDAYNEVIARVRMWVNLNLWQKLKLSRDDAKPLLRLKGFPSFPLVERQANEVDWWDMVCNVKKLINEKKEDGKVFWQNLAGYKRQEALRPYLSSEEDRKKGKKFARYQLGDLLLHLEKKHGEDWGKVYDEAWERIDKKVEGLSKHIKLEEERRSEDAQSKAALTDWLRAKASFVIEGLKEADKDEFCRCELKLQKWYGDLRGKPFAIEAENSILDISGFSKQYNCAFIWQKDGVKKLNLYLIINYFKGGKLRFKKIKPEAFEANRFYTVINKKSGEIVPMEVNFNFDDPNLIILPLAFGKRQGREFIWNDLLSLETGSLKLANGRVIEKTLYNRRTRQDEPALFVALTFERREVLDSSNIKPMNLIGVDRGENIPAVIALTDPEGCPLSRFKDSLGNPTHILRIGESYKEKQRTIQAKKEVEQRRAGGYSRKYASKAKNLADDMVRNTARDLLYYAVTQDAMLIFENLSRGFGRQGKRTFMAERQYTRMEDWLTAKLAYEGLPSKTYLSKTLAQYTSKTCSNCGFTITSADYDRVLEKLKKTATGWMTTINGKELKVEGQITYYNRYKRQNVVKDLSVELDRLSEESVNNDISSWTKGRSGNEALSLLKKRFSHRPVQEKFVCLNCGFETHADEQAALNIARSWLFLRSQEYKKYQTNKTSTGNTDKRAFVETWQSFYRKKLKEVWKPAV

SEQ ID NO: 47870 - protein, 980 aa, synthetic construct
  REGION 1..980: note = engineered CasX variant
QEIKRINKIRRRLVKDSNTKKAGKTGPMKTLLVRVMTPDLRERLENLRKKPENIPQPISNTSRANLNKLLTDYTEMKKAILHVYWEEFQKDPVGLMSRVAQPASKKIDQNKLKPEMDEKGNLTTAGFACSQCGQPLFVYKLEQVSEKGKAYTNYFGRCNVAEHEKLIKLAQLKPEKDSDEAVTYSLGKFGQRALDFYSIHVTKESTHPVKPLAQIAGNRYASGPVGKALSDACMGTIASFLSKYQDIIIEHQKVVKGNQKRLESLRELAGKENLEYPSVTLPPQPHTKEGVDAYNEVIARVRMWVNLNLWQKLKLSRDDAKPLLRLKGFPSFPLVERQANEVDWWDMVCNVKKLINEKKEDGKVFWQNLAGYKRQEALRPYLSSEEDRKKGKKFARYQLGDLLLHLEKKHGEDWGKVYDEAWERIDKKVEGLSKHIKLEEERRSEDAQSKAALTDWLRAKASFVIEGLKEADKDEFCRCELKLQKWYGDLRGKPFAIEAENSILDISGFSKQYNCAFIWQKDGVKKLNLYLIINYFKGGKLRFKKIKPEAFEANRFYTVINKKSGEIVPMEVNFNFDDPNLIILPLAFGKRQGREFIWNDLLSLETGSLKLANGRVIEKTLYNRRTRQDEPALFVALTFERREVLDSSNIKPMNLIGVDRGENIPAVIALTDPEGCPLSRFKDSLGNPTHILRIGESYKEKQRTIQAKKEVEQRRAGGYSRKYASKAKNLADDMVRNTARDLLYYAVTQDAMLIFENLSRGFGRQGKRTFMAERQYTRMEDWLTAKLAYEGLPSKTYLSKTLAQYTSKTCSNCGFTITSADYDRVLEKLKKTATGWMTTINGKELKVEGQITYYNRYKRQNVVKDLSVELDRLSEESVNNDISSWTKGRSGNEALSLLKKRFSHRPVQEKFVCLNCGFETHADEQAALNIARSWLFLRSQEYKKYQTNKTSTGNTDKRAFVETWQSFYRKKLKEVWKPAV

SEQ ID NO: 47871 - protein, 979 aa, synthetic construct
  REGION 1..979: note = engineered CasX variant
QEIKRINKIRRRLVKDSNTKKAGKTGPMKTLLVRVMTPDLRERLENLRKKPENIPQPISNTSRANLNKLLTDYTEMKKAILHVYWEEFQKDPVGLMSRVAQPASKKIDQNKLKPEMDEKGNLTTAGFACSQCGQPLFVYKLEQVSEKGKAYTNYFGRCNVAEHEKLILLAQLKPEKDSDEAVTYSLGKFGQRALDFYSIHVTKESTHPVKPLAQIAGNRYASPVGKALSDACMGTIASFLSKYQDIIIEHQKVVKGNQKRLESLRELAGKENLEYPSVTLPPQPHTKEGVDAYNEVIARVRMWVNLNLWQKLKLSRDDAKPLLRLKGFPSFPLVERQANEVDWWDMVCNVKKLINEKKEDGKVFWQNLAGYKRQEALRPYLSSEEDRKKGKKFARYQLGDLLLHLEKKHGEDWGKVYDEAWERIDKKVEGLSKHIKLEEERRSEDAQSKAALTDWLRAKASFVIEGLKEADKDEFCRCELKLQKWYGDLRGKPFAIEAENSILDISGFSKQYNCAFIWQKDGVKKLNLYLIINYFKGGKLRFKKIKPEAFEANRFYTVINKKSGEIVPMEVNFNFDDPNLIILPLAFGKRQGREFIWNDLLSLETGSLKLANGRVIEKTLYNRRTRQDEPALFVALTFERREVLDSSNIKPMNLIGVDRGENIPAVIALTDPEGCPLSRFKDSLGNPTHILRIGESYKEKQRTIQAKKEVEQRRAGGYSRKYASKAKNLADDMVRNTARDLLYYAVTQDAMLIFENLSRGFGRQGKRTFMAERQYTRMEDWLTAKLAYEGLPSKTYLSKTLAQYTSKTCSNCGFTITSADYDRVLEKLKKTATGWMTTINGKELKVEGQITYYNRYKRQNVVKDLSVELDRLSEESVNNDISSWTKGRSGNEALSLLKKRFSHRPVQEKFVCLNCGFETHADEQAALNIARSWLFLRSQEYKKYQTNKTSTGNTDKRAFVETWQSFYRKKLKEVWKPAV

SEQ ID NO: 47872 - protein, 979 aa, synthetic construct
  REGION 1..979: note = engineered CasX variant
QEIKRINKIRRRLVKDSNTKKAGKTGPMKTLLVRVMTPDLRERLENLRKKPENIPQPISNTSRANLNKLLTDYTEMKKAILHVYWEEFQKDPVGLMSRVAQPASKKIDQNKLKPEMDEKGNLTTAGFACSQCGQPLFVYKLEQVSEKGKAYTNYFGRCNVAEHEKLILLAQLKPEKDSDEAVTYSLGKFGQRALDFYSIHVTKESTHPVKPLAQIAGNRYASYPVGKALSDACMGTIASFLSKYQDIIIEHQKVVKGNQKRLESLRELAGKENLEYPSVTLPPQPHTKEGVDAYNEVIARVRMWVNLNLWQKLKLSRDDAKPLLRLKGFPSFPLVERQANEVDWWDMVCNVKKLINEKKEDGKVFWQNLAGYKRQEALRPYLSSEEDRQKGKKFARYQLGDLLLHLEKKHGEDWGKVYDEAWERIDKKVEGLSKHIKLEEERRSEDAQSKAALTDWLRAKASFVIEGLKEADKDEFCRCELKLQKWYGDLRGKPFAIEAENSILDISGFSKQYNCAFIWQKDGVKKLNLYLIINYFKGGKLRFKKIKPEAFEANRFYTVINKKSGEIVPMEVNFNFDDPNLIILPLAFGKRQGREFIWNDLLSLETGSLKLANGRVIEKTLYNRRTRQDEPALFVALTFERREVLDSSNIKPMNLIGVDRGENIPAVIALTDPEGCPLSRFKDSLGNPTHILRIGESYKEKQRTIQAKKEVEQRRAGGYSRKYASKAKNLADDMVRNTARDLLYYAVTQDAMLIFENLSRGFGRQGKRTFMAERQYTRMEDWLTAKLAYEGLPSKTYLSKTLAQYTSKTCSNCGFTITSADYDRVLEKLKKTATGWMTTINGKELKVEGQITYYNRYKRQNVVKDLSVELDRLSEESVNNDISSWTKGRSGEALSLLKKRFSHRPVQEKFVCLNCGFETHADEQAALNIARSWLFLRSQEYKKYQTNKTSTGNTDKRAFVETWQSFYRKKLKEVWKPAV

SEQ ID NO: 47873 - protein, 979 aa, synthetic construct
  REGION 1..979: note = engineered CasX variant
QEIKRINKIRRRLVKDSNTKKAGKTGPMKTLLVRVMTPDLRERLENLRKKPENIPQPISNTSRANLNKLLTDYTEMKKAILHVYWEEFQKDPVGLMSRVAQPASKKIDQNKLKPEMDEKGNLTTAGFACSQCGQPLFVYKLEQVSEKGKAYTNYFGRCNVAEHEKLILLAQLKPEKDSDEAVTYSLGKFGQRALDFYSIHVTKESTHPVKPLAQIAGNRYASHPVGKALSDACMGTIASFLSKYQDIIIEHQKVVKGNQKRLESLRELAGKENLEYPSVTLPPQPHTKEGVDAYNEVIARVRMWVNLNLWQKLKLSRDDAKPLLRLKGFPSFPLVERQANEVDWWDMVCNVKKLINEKKEDGKVFWQNLAGYKRQEALRPYLSSEEDRQKGKKFARYQLGDLLLHLEKKHGEDWGKVYDEAWERIDKKVEGLSKHIKLEEERRSEDAQSKAALTDWLRAKASFVIEGLKEADKDEFCRCELKLQKWYGDLRGKPFAIEAENSILDISGFSKQYNCAFIWQKDGVKKLNLYLIINYFKGGKLRFKKIKPEAFEANRFYTVINKKSGEIVPMEVNFNFDDPNLIILPLAFGKRQGREFIWNDLLSLETGSLKLANGRVIEKTLYNRRTRQDEPALFVALTFERREVLDSSNIKPMNLIGVDRGENIPAVIALTDPEGCPLSRFKDSLGNPTHILRIGESYKEKQRTIQAKKEVEQRRAGGYSRKYASKAKNLADDMVRNTARDLLYYAVTQDAMLIFENLSRGFGRQGKRTFMAERQYTRMEDWLTAKLAYEGLPSKTYLSKTLAQYTSKTCSNCGFTITSADYDRVLEKLKKTATGWMTTINGKELKVEGQITYYNRYKRQNVVKDLSVELDRLSEESVNNDISSWTKGRSGEALSLLKKRFSHRPVQEKFVCLNCGFETHADEQAALNIARSWLFLRSQEYKKYQTNKTSTGNTDKRAFVETWQSFYRKKLKEVWKPAV

SEQ ID NO: 47874 - protein, 979 aa, synthetic construct
  REGION 1..979: note = engineered CasX variant
QEIKRINKIRRRLVKDSNTKKAGKTGPMKTLLVRVMTPDLRERLENLRKKPENIPQPISNTSRANLNKLLTDYTEMKKAILHVYWEEFQKDPVGLMSRVAQPASKKIDQNKLKPEMDEKGNLTTAGFACSQCGQPLFVYKLEQVSEKGKAYTNYFGRCNVAEHEKLILLAQLKPEKDSDEAVTYSLGKFGQRALDFYSIHVTKESTHPVKPLAQIAGNRYASSPVGKALSDACMGTIASFLSKYQDIIIEHQKVVKGNQKRLESLRELAGKENLEYPSVTLPPQPHTKEGVDAYNEVIARVRMWVNLNLWQKLKLSRDDAKPLLRLKGFPSFPLVERQANEVDWWDMVCNVKKLINEKKEDGKVFWQNLAGYKRQEALRPYLSSEEDRQKGKKFARYQLGDLLLHLEKKHGEDWGKVYDEAWERIDKKVEGLSKHIKLEEERRSEDAQSKAALTDWLRAKASFVIEGLKEADKDEFCRCELKLQKWYGDLRGKPFAIEAENSILDISGFSKQYNCAFIWQKDGVKKLNLYLIINYFKGGKLRFKKIKPEAFEANRFYTVINKKSGEIVPMEVNFNFDDPNLIILPLAFGKRQGREFIWNDLLSLETGSLKLANGRVIEKTLYNRRTRQDEPALFVALTFERREVLDSSNIKPMNLIGVDRGENIPAVIALTDPEGCPLSRFKDSLGNPTHILRIGESYKEKQRTIQAKKEVEQRRAGGYSRKYASKAKNLADDMVRNTARDLLYYAVTQDAMLIFENLSRGFGRQGKRTFMAERQYTRMEDWLTAKLAYEGLPSKTYLSKTLAQYTSKTCSNCGFTITSADYDRVLEKLKKTATGWMTTINGKELKVEGQITYYNRYKRQNVVKDLSVELDRLSEESVNNDISSWTKGRSGEALSLLKKRFSHRPVQEKFVCLNCGFETHADEQAALNIARSWLFLRSQEYKKYQTNKTSTGNTDKRAFVETWQSFYRKKLKEVWKPAV

SEQ ID NO: 47875 - protein, 979 aa, synthetic construct
  REGION 1..979: note = engineered CasX variant
QEIKRINKIRRRLVKDSNTKKAGKTGPMKTLLVRVMTPDLRERLENLRKKPENIPQPISNTSRANLNKLLTDYTEMKKAILHVYWEEFQKDPVGLMSRVAQPASKKIDQNKLKPEMDEKGNLTTAGFACSQCGQPLFVYKLEQVSEKGKAYTNYFGRCNVAEHEKLILLAQLKPEKDSDEAVTYSLGKFGQRALDFYSIHVTKESTHPVKPLAQIAGNRYASTPVGKALSDACMGTIASFLSKYQDIIIEHQKVVKGNQKRLESLRELAGKENLEYPSVTLPPQPHTKEGVDAYNEVIARVRMWVNLNLWQKLKLSRDDAKPLLRLKGFPSFPLVERQANEVDWWDMVCNVKKLINEKKEDGKVFWQNLAGYKRQEALRPYLSSEEDRQKGKKFARYQLGDLLLHLEKKHGEDWGKVYDEAWERIDKKVEGLSKHIKLEEERRSEDAQSKAALTDWLRAKASFVIEGLKEADKDEFCRCELKLQKWYGDLRGKPFAIEAENSILDISGFSKQYNCAFIWQKDGVKKLNLYLIINYFKGGKLRFKKIKPEAFEANRFYTVINKKSGEIVPMEVNFNFDDPNLIILPLAFGKRQGREFIWNDLLSLETGSLKLANGRVIEKTLYNRRTRQDEPALFVALTFERREVLDSSNIKPMNLIGVDRGENIPAVIALTDPEGCPLSRFKDSLGNPTHILRIGESYKEKQRTIQAKKEVEQRRAGGYSRKYASKAKNLADDMVRNTARDLLYYAVTQDAMLIFENLSRGFGRQGKRTFMAERQYTRMEDWLTAKLAYEGLPSKTYLSKTLAQYTSKTCSNCGFTITSADYDRVLEKLKKTATGWMTTINGKELKVEGQITYYNRYKRQNVVKDLSVELDRLSEESVNNDISSWTKGRSGEALSLLKKRFSHRPVQEKFVCLNCGFETHADEQAALNIARSWLFLRSQEYKKYQTNKTSTGNTDKRAFVETWQSFYRKKLKEVWKPAV

SEQ ID NO: 47876 - protein, 979 aa, synthetic construct
  REGION 1..979: note = engineered CasX variant
QEIKRINKIRRRLVKDSNTKKAGKTGPMKTLLVRVMTPDLRERLENLRKKPENIPQPISNTSRANLNKLLTDYTEMKKAILHVYWEEFQKDPVGLMSRVAQPASKKIDQNKLKPEMDEKGNLTTAGFACSQCGQPLFVYKLEQVSEKGKAYTNYFGRCNVAEHEKLILLAQLKPEKDSDEAVTYSLGKFGQRALDFYSIHVTKESTHPVKPLAQIAGNRYASAPVGKALSDACMGTIASFLSKYQDIIIEHQKVVKGNQKRLESLRELAGKENLEYPSVTLPPQPHTKEGVDAYNEVIARVRMWVNLNLWQKLKLSRDDAKPLLRLKGFPSFPLVERQANEVDWWDMVCNVKKLINEKKEDGKVFWQNLAGYKRQEALRPYLSSEEDRQKGKKFARYQLGDLLLHLEKKHGEDWGKVYDEAWERIDKKVEGLSKHIKLEEERRSEDAQSKAALTDWLRAKASFVIEGLKEADKDEFCRCELKLQKWYGDLRGKPFAIEAENSILDISGFSKQYNCAFIWQKDGVKKLNLYLIINYFKGGKLRFKKIKPEAFEANRFYTVINKKSGEIVPMEVNFNFDDPNLIILPLAFGKRQGREFIWNDLLSLETGSLKLANGRVIEKTLYNRRTRQDEPALFVALTFERREVLDSSNIKPMNLIGVDRGENIPAVIALTDPEGCPLSRFKDSLGNPTHILRIGESYKEKQRTIQAKKEVEQRRAGGYSRKYASKAKNLADDMVRNTARDLLYYAVTQDAMLIFENLSRGFGRQGKRTFMAERQYTRMEDWLTAKLAYEGLPSKTYLSKTLAQYTSKTCSNCGFTITSADYDRVLEKLKKTATGWMTTINGKELKVEGQITYYNRYKRQNVVKDLSVELDRLSEESVNNDISSWTKGRSGEALSLLKKRFSHRPVQEKFVCLNCGFETHADEQAALNIARSWLFLRSQEYKKYQTNKTSTGNTDKRAFVETWQSFYRKKLKEVWKPAV

SEQ ID NO: 47877 - protein, 979 aa, synthetic construct
  REGION 1..979: note = engineered CasX variant
QEIKRINKIRRRLVKDSNTKKAGKTGPMKTLLVRVMTPDLRERLENLRKKPENIPQPISNTSRANLNKLLTDYTEMKKAILHVYWEEFQKDPVGLMSRVAQPASKKIDQNKLKPEMDEKGNLTTAGFACSQCGQPLFVYKLEQVSEKGKAYTNYFGRCNVAEHEKLILLAQLKPEKDSDEAVTYSLGKFGQRALDFYSIHVTKESTHPVKPLAQIAGNRYASVPVGKALSDACMGTIASFLSKYQDIIIEHQKVVKGNQKRLESLRELAGKENLEYPSVTLPPQPHTKEGVDAYNEVIARVRMWVNLNLWQKLKLSRDDAKPLLRLKGFPSFPLVERQANEVDWWDMVCNVKKLINEKKEDGKVFWQNLAGYKRQEALRPYLSSEEDRQKGKKFARYQLGDLLLHLEKKHGEDWGKVYDEAWERIDKKVEGLSKHIKLEEERRSEDAQSKAALTDWLRAKASFVIEGLKEADKDEFCRCELKLQKWYGDLRGKPFAIEAENSILDISGFSKQYNCAFIWQKDGVKKLNLYLIINYFKGGKLRFKKIKPEAFEANRFYTVINKKSGEIVPMEVNFNFDDPNLIILPLAFGKRQGREFIWNDLLSLETGSLKLANGRVIEKTLYNRRTRQDEPALFVALTFERREVLDSSNIKPMNLIGVDRGENIPAVIALTDPEGCPLSRFKDSLGNPTHILRIGESYKEKQRTIQAKKEVEQRRAGGYSRKYASKAKNLADDMVRNTARDLLYYAVTQDAMLIFENLSRGFGRQGKRTFMAERQYTRMEDWLTAKLAYEGLPSKTYLSKTLAQYTSKTCSNCGFTITSADYDRVLEKLKKTATGWMTTINGKELKVEGQITYYNRYKRQNVVKDLSVELDRLSEESVNNDISSWTKGRSGEALSLLKKRFSHRPVQEKFVCLNCGFETHADEQAALNIARSWLFLRSQEYKKYQTNKTSTGNTDKRAFVETWQSFYRKKLKEVWKPAV

SEQ ID NO: 47878 - protein, 979 aa, synthetic construct
  REGION 1..979: note = engineered CasX variant
QEIKRINKIRRRLVKDSNTKKAGKTGPMKTLLVRVMTPDLRERLENLRKKPENIPQPISNTSRANLNKLLTDYTEMKKAILHVYWEEFQKDPVGLMSRVAQPASKKIDQNKLKPEMDEKGNLTTAGFACSQCGQPLFVYKLEQVSEKGKAYTNYFGRCNVAEHEKLIKLAQLKPEKDSDEAVTYSLGKFGQRALDFYSIHVTKESTHPVKPLAQIAGNRYASGPVGKALSDACMGTIASFLSKYQDIIIEHQKVVKGNQKRLESLRELAGKENLEYPSVTLPPQPHTKEGVDAYNEVIARVRMWVNLNLWQKLKLSRDDAKPLLRLKGFPSFPLVERQANEVDWWDMVCNVKKLINEKKEDGKVFWQNLAGYKRQEALRPYLSSEEDRQKGKKFARYQLGDLLLHLEKKHGEDWGKVYDEAWERIDKKVEGLSKHIKLEEERRSEDAQSKAALTDWLRAKASFVIEGLKEADKDEFCRCELKLQKWYGDLRGKPFAIEAENSILDISGFSKQYNCAFIWQKDGVKKLNLYLIINYFKGGKLRFKKIKPEAFEANRFYTVINKKSGEIVPMEVNFNFDDPNLIILPLAFGKRQGREFIWNDLLSLETGSLKLANGRVIEKTLYNRRTRQDEPALFVALTFERREVLDSSNIKPMNLIGVDRGENIPAVIALTDPEGCPLSRFKDSLGNPTHILRIGESYKEKQRTIQAKKEVEQRRAGGYSRKYASKAKNLADDMVRNTARDLLYYAVTQDAMLIFENLSRGFGRQGKRTFMAERQYTRMEDWLTAKLAYEGLPSKTYLSKTLAQYTSKTCSNCGFTITSADYDRVLEKLKKTATGWMTTINGKELKVEGQITYYNRYKRQNVVKDLSVELDRLSEESVNNDISSWTKGRSGEALSLLKKRFSHRPVQEKFVCLNCGFETHADEQAALNIARSWLFLRSQEYKKYQTNKTSTGNTDKRAFVETWQSFYRKKLKEVWKPAV

SEQ ID NO: 47879 - protein, 978 aa, synthetic construct
  REGION 1..978: note = engineered CasX variant
QEIKRINKIRRRLVKDSNTKKAGKTGPMKTLLVRVMTPDLRERLENLRKKPENIPQPISNTSRANLNKLLTDYTEMKKAILHVYWEEFQKDPVGLMSRVAQPASKKIDQNKLKPEMDEKGNLTTAGFACSQCGQPLFVYKLEQVSEKGKAYTNYFGRCNVAEHEKLILLAQLKPEKDSDEAVTYSLGKFGQRALDFYSIHVTKESTHPVKPLAQIAGNRYASPVGKALSDACMGTIASFLSKYQDIIIEHQKVVKGNQKRLESLRELAGKENLEYPSVTLPPQPHTKEGVDAYNEVIARVRMWVNLNLWQKLKLSRDDAKPLLRLKGFPSFPLVERQANEVDWWDMVCNVKKLINEKKEDGKVFWQNLAGYKRQEALRPYLSSEEDRQKGKKFARYQLGDLLLHLEKKHGEDWGKVYDEAWERIDKKVEGLSKHIKLEEERRSEDAQSKAALTDWLRAKASFVIEGLKEADKDEFCRCELKLQKWYGDLRGKPFAIEAENSILDISGFSKQYNCAFIWQKDGVKKLNLYLIINYFKGGKLRFKKIKPEAFEANRFYTVINKKSGEIVPMEVNFNFDDPNLIILPLAFGKRQGREFIWNDLLSLETGSLKLANGRVIEKTLYNRRTRQDEPALFVALTFERREVLDSSNIKPMNLIGVDRGENIPAVIALTDPEGCPLSRFKDSLGNPTHILRIGESYKEKQRTIQAKKEVEQRRAGGYSRKYASKAKNLADDMVRNTARDLLYYAVTQDAMLIFENLSRGFGRQGKRTFMAERQYTRMEDWLTAKLAYEGLPSKTYLSKTLAQYTSKTCSNCGFTITSADYDRVLEKLKKTATGWMTTINGKELKVEGQITYYNRYKRQNVVKDLSVELDRLSEESVNNDISSWTKGRSGEALSLLKKRFSHRPVQEKFVCLNCGFETHADEQAALNIARSWLFLRSQEYKKYQTNKTSTGNTDKRAFVETWQSFYRKKLKEVWKPAV

SEQ ID NO: 47880 - protein, 979 aa, synthetic construct
  REGION 1..979: note = engineered CasX variant
QEIKRINKIRRRLVKDSNTKKAGKTGPMKTLLVRVMTPDLRERLENLRKKPENIPQPISNTSRANLNKLLTDYTEMKKAILHVYWEEFQKDPVGLMSRVAQPASKKIDQNKLKPEMDEKGNLTTAGFACSQCGQPLFVYKLEQVSEKGKAYTNYFGRCNVAEHEKLILLAQLKPEKDSDEAVTYSLGKFGQRALDFYSIHVTKESTHPVKPLAQIAGNRYASYPVGKALSDACMGTIASFLSKYQDIIIEHQKVVKGNQKRLESLRELAGKENLEYPSVTLPPQPHTKEGVDAYNEVIARVRMWVNLNLWQKLKLSRDDAKPLLRLKGFPSFPLVERQANEVDWWDMVCNVKKLINEKKEDGKVFWQNLAGYKRQEALRPYLSSEEDRKKGKKFARYQLGDLLLHLEKKHGEDWGKVYDEAWERIDKKVEGLSKHIKLEEERRSEDAQSKAALTDWLRAKASFVIEGLKEADKDEFCRCELKLQKWYGDLRGKPFAIEAENSILDISGFSKQYNCAFIWQKDGVKKLNLYLIINYFKGGKLRFKKIKPEAFEANRFYTVINKKSGEIVPMEVNFNFDDPNLIILPLAFGKRQGREFIWNDLLSLETGSLKLANGRVIEKTLYNRRTRQDEPALFVALTFERREVLDSSNIKPMNLIGVDRGENIPAVIALTDPEGCPLSRFKDSLGNPTHILRIGESYKEKQRTIQAKKEVEQRRAGGYSRKYASKAKNLADDMVRNTARDLLYYAVTQDAMLIFENLSRGFGRQGKRTFMAERQYTRMEDWLTAKLAYEGLPSQTYLSKTLAQYTSKTCSNCGFTITSADYDRVLEKLKKTATGWMTTINGKELKVEGQITYYNRYKRQNVVKDLSVELDRLSEESVNNDISSWTKGRSGEALSLLKKRFSHRPVQEKFVCLNCGFETHADEQAALNIARSWLFLRSQEYKKYQTNKTSTGNTDKRAFVETWQSFYRKKLKEVWKPAV

SEQ ID NO: 47881 - protein, 979 aa, synthetic construct
  REGION 1..979: note = engineered CasX variant
QEIKRINKIRRRLVKDSNTKKAGKTGPMKTLLVRVMTPDLRERLENLRKKPENIPQPISNTSRANLNKLLTDYTEMKKAILHVYWEEFQKDPVGLMSRVAQPASKKIDQNKLKPEMDEKGNLTTAGFACSQCGQPLFVYKLEQVSEKGKAYTNYFGRCNVAEHEKLILLAQLKPEKDSDEAVTYSLGKFGQRALDFYSIHVTKESTHPVKPLAQIAGNRYASHPVGKALSDACMGTIASFLSKYQDIIIEHQKVVKGNQKRLESLRELAGKENLEYPSVTLPPQPHTKEGVDAYNEVIARVRMWVNLNLWQKLKLSRDDAKPLLRLKGFPSFPLVERQANEVDWWDMVCNVKKLINEKKEDGKVFWQNLAGYKRQEALRPYLSSEEDRKKGKKFARYQLGDLLLHLEKKHGEDWGKVYDEAWERIDKKVEGLSKHIKLEEERRSEDAQSKAALTDWLRAKASFVIEGLKEADKDEFCRCELKLQKWYGDLRGKPFAIEAENSILDISGFSKQYNCAFIWQKDGVKKLNLYLIINYFKGGKLRFKKIKPEAFEANRFYTVINKKSGEIVPMEVNFNFDDPNLIILPLAFGKRQGREFIWNDLLSLETGSLKLANGRVIEKTLYNRRTRQDEPALFVALTFERREVLDSSNIKPMNLIGVDRGENIPAVIALTDPEGCPLSRFKDSLGNPTHILRIGESYKEKQRTIQAKKEVEQRRAGGYSRKYASKAKNLADDMVRNTARDLLYYAVTQDAMLIFENLSRGFGRQGKRTFMAERQYTRMEDWLTAKLAYEGLPSQTYLSKTLAQYTSKTCSNCGFTITSADYDRVLEKLKKTATGWMTTINGKELKVEGQITYYNRYKRQNVVKDLSVELDRLSEESVNNDISSWTKGRSGEALSLLKKRFSHRPVQEKFVCLNCGFETHADEQAALNIARSWLFLRSQEYKKYQTNKTSTGNTDKRAFVETWQSFYRKKLKEVWKPAV

SEQ ID NO: 47882 - protein, 979 aa, synthetic construct
  REGION 1..979: note = engineered CasX variant
QEIKRINKIRRRLVKDSNTKKAGKTGPMKTLLVRVMTPDLRERLENLRKKPENIPQPISNTSRANLNKLLTDYTEMKKAILHVYWEEFQKDPVGLMSRVAQPASKKIDQNKLKPEMDEKGNLTTAGFACSQCGQPLFVYKLEQVSEKGKAYTNYFGRCNVAEHEKLILLAQLKPEKDSDEAVTYSLGKFGQRALDFYSIHVTKESTHPVKPLAQIAGNRYASSPVGKALSDACMGTIASFLSKYQDIIIEHQKVVKGNQKRLESLRELAGKENLEYPSVTLPPQPHTKEGVDAYNEVIARVRMWVNLNLWQKLKLSRDDAKPLLRLKGFPSFPLVERQANEVDWWDMVCNVKKLINEKKEDGKVFWQNLAGYKRQEALRPYLSSEEDRKKGKKFARYQLGDLLLHLEKKHGEDWGKVYDEAWERIDKKVEGLSKHIKLEEERRSEDAQSKAALTDWLRAKASFVIEGLKEADKDEFCRCELKLQKWYGDLRGKPFAIEAENSILDISGFSKQYNCAFIWQKDGVKKLNLYLIINYFKGGKLRFKKIKPEAFEANRFYTVINKKSGEIVPMEVNFNFDDPNLIILPLAFGKRQGREFIWNDLLSLETGSLKLANGRVIEKTLYNRRTRQDEPALFVALTFERREVLDSSNIKPMNLIGVDRGENIPAVIALTDPEGCPLSRFKDSLGNPTHILRIGESYKEKQRTIQAKKEVEQRRAGGYSRKYASKAKNLADDMVRNTARDLLYYAVTQDAMLIFENLSRGFGRQGKRTFMAERQYTRMEDWLTAKLAYEGLPSQTYLSKTLAQYTSKTCSNCGFTITSADYDRVLEKLKKTATGWMTTINGKELKVEGQITYYNRYKRQNVVKDLSVELDRLSEESVNNDISSWTKGRSGEALSLLKKRFSHRPVQEKFVCLNCGFETHADEQAALNIARSWLFLRSQEYKKYQTNKTSTGNTDKRAFVETWQSFYRKKLKEVWKPAV

SEQ ID NO: 47883 - protein, 979 aa, synthetic construct
  REGION 1..979: note = engineered CasX variant
QEIKRINKIRRRLVKDSNTKKAGKTGPMKTLLVRVMTPDLRERLENLRKKPENIPQPISNTSRANLNKLLTDYTEMKKAILHVYWEEFQKDPVGLMSRVAQPASKKIDQNKLKPEMDEKGNLTTAGFACSQCGQPLFVYKLEQVSEKGKAYTNYFGRCNVAEHEKLILLAQLKPEKDSDEAVTYSLGKFGQRALDFYSIHVTKESTHPVKPLAQIAGNRYASTPVGKALSDACMGTIASFLSKYQDIIIEHQKVVKGNQKRLESLRELAGKENLEYPSVTLPPQPHTKEGVDAYNEVIARVRMWVNLNLWQKLKLSRDDAKPLLRLKGFPSFPLVERQANEVDWWDMVCNVKKLINEKKEDGKVFWQNLAGYKRQEALRPYLSSEEDRKKGKKFARYQLGDLLLHLEKKHGEDWGKVYDEAWERIDKKVEGLSKHIKLEEERRSEDAQSKAALTDWLRAKASFVIEGLKEADKDEFCRCELKLQKWYGDLRGKPFAIEAENSILDISGFSKQYNCAFIWQKDGVKKLNLYLIINYFKGGKLRFKKIKPEAFEANRFYTVINKKSGEIVPMEVNFNFDDPNLIILPLAFGKRQGREFIWNDLLSLETGSLKLANGRVIEKTLYNRRTRQDEPALFVALTFERREVLDSSNIKPMNLIGVDRGENIPAVIALTDPEGCPLSRFKDSLGNPTHILRIGESYKEKQRTIQAKKEVEQRRAGGYSRKYASKAKNLADDMVRNTARDLLYYAVTQDAMLIFENLSRGFGRQGKRTFMAERQYTRMEDWLTAKLAYEGLPSQTYLSKTLAQYTSKTCSNCGFTITSADYDRVLEKLKKTATGWMTTINGKELKVEGQITYYNRYKRQNVVKDLSVELDRLSEESVNNDISSWTKGRSGEALSLLKKRFSHRPVQEKFVCLNCGFETHADEQAALNIARSWLFLRSQEYKKYQTNKTSTGNTDKRAFVETWQSFYRKKLKEVWKPAV

SEQ ID NO: 47884 - protein, 979 aa, synthetic construct
  REGION 1..979: note = engineered CasX variant
QEIKRINKIRRRLVKDSNTKKAGKTGPMKTLLVRVMTPDLRERLENLRKKPENIPQPISNTSRANLNKLLTDYTEMKKAILHVYWEEFQKDPVGLMSRVAQPASKKIDQNKLKPEMDEKGNLTTAGFACSQCGQPLFVYKLEQVSEKGKAYTNYFGRCNVAEHEKLILLAQLKPEKDSDEAVTYSLGKFGQRALDFYSIHVTKESTHPVKPLAQIAGNRYASAPVGKALSDACMGTIASFLSKYQDIIIEHQKVVKGNQKRLESLRELAGKENLEYPSVTLPPQPHTKEGVDAYNEVIARVRMWVNLNLWQKLKLSRDDAKPLLRLKGFPSFPLVERQANEVDWWDMVCNVKKLINEKKEDGKVFWQNLAGYKRQEALRPYLSSEEDRKKGKKFARYQLGDLLLHLEKKHGEDWGKVYDEAWERIDKKVEGLSKHIKLEEERRSEDAQSKAALTDWLRAKASFVIEGLKEADKDEFCRCELKLQKWYGDLRGKPFAIEAENSILDISGFSKQYNCAFIWQKDGVKKLNLYLIINYFKGGKLRFKKIKPEAFEANRFYTVINKKSGEIVPMEVNFNFDDPNLIILPLAFGKRQGREFIWNDLLSLETGSLKLANGRVIEKTLYNRRTRQDEPALFVALTFERREVLDSSNIKPMNLIGVDRGENIPAVIALTDPEGCPLSRFKDSLGNPTHILRIGESYKEKQRTIQAKKEVEQRRAGGYSRKYASKAKNLADDMVRNTARDLLYYAVTQDAMLIFENLSRGFGRQGKRTFMAERQYTRMEDWLTAKLAYEGLPSQTYLSKTLAQYTSKTCSNCGFTITSADYDRVLEKLKKTATGWMTTINGKELKVEGQITYYNRYKRQNVVKDLSVELDRLSEESVNNDISSWTKGRSGEALSLLKKRFSHRPVQEKFVCLNCGFETHADEQAALNIARSWLFLRSQEYKKYQTNKTSTGNTDKRAFVETWQSFYRKKLKEVWKPAV

SEQ ID NO: 47885 - protein, 979 aa, synthetic construct
  REGION 1..979: note = engineered CasX variant
QEIKRINKIRRRLVKDSNTKKAGKTGPMKTLLVRVMTPDLRERLENLRKKPENIPQPISNTSRANLNKLLTDYTEMKKAILHVYWEEFQKDPVGLMSRVAQPASKKIDQNKLKPEMDEKGNLTTAGFACSQCGQPLFVYKLEQVSEKGKAYTNYFGRCNVAEHEKLILLAQLKPEKDSDEAVTYSLGKFGQRALDFYSIHVTKESTHPVKPLAQIAGNRYASVPVGKALSDACMGTIASFLSKYQDIIIEHQKVVKGNQKRLESLRELAGKENLEYPSVTLPPQPHTKEGVDAYNEVIARVRMWVNLNLWQKLKLSRDDAKPLLRLKGFPSFPLVERQANEVDWWDMVCNVKKLINEKKEDGKVFWQNLAGYKRQEALRPYLSSEEDRKKGKKFARYQLGDLLLHLEKKHGEDWGKVYDEAWERIDKKVEGLSKHIKLEEERRSEDAQSKAALTDWLRAKASFVIEGLKEADKDEFCRCELKLQKWYGDLRGKPFAIEAENSILDISGFSKQYNCAFIWQKDGVKKLNLYLIINYFKGGKLRFKKIKPEAFEANRFYTVINKKSGEIVPMEVNFNFDDPNLIILPLAFGKRQGREFIWNDLLSLETGSLKLANGRVIEKTLYNRRTRQDEPALFVALTFERREVLDSSNIKPMNLIGVDRGENIPAVIALTDPEGCPLSRFKDSLGNPTHILRIGESYKEKQRTIQAKKEVEQRRAGGYSRKYASKAKNLADDMVRNTARDLLYYAVTQDAMLIFENLSRGFGRQGKRTFMAERQYTRMEDWLTAKLAYEGLPSQTYLSKTLAQYTSKTCSNCGFTITSADYDRVLEKLKKTATGWMTTINGKELKVEGQITYYNRYKRQNVVKDLSVELDRLSEESVNNDISSWTKGRSGEALSLLKKRFSHRPVQEKFVCLNCGFETHADEQAALNIARSWLFLRSQEYKKYQTNKTSTGNTDKRAFVETWQSFYRKKLKEVWKPAV

SEQ ID NO: 47886 - protein, 979 aa, synthetic construct
  REGION 1..979: note = engineered CasX variant
QEIKRINKIRRRLVKDSNTKKAGKTGPMKTLLVRVMTPDLRERLENLRKKPENIPQPISNTSRANLNKLLTDYTEMKKAILHVYWEEFQKDPVGLMSRVAQPASKKIDQNKLKPEMDEKGNLTTAGFACSQCGQPLFVYKLEQVSEKGKAYTNYFGRCNVAEHEKLIKLAQLKPEKDSDEAVTYSLGKFGQRALDFYSIHVTKESTHPVKPLAQIAGNRYASGPVGKALSDACMGTIASFLSKYQDIIIEHQKVVKGNQKRLESLRELAGKENLEYPSVTLPPQPHTKEGVDAYNEVIARVRMWVNLNLWQKLKLSRDDAKPLLRLKGFPSFPLVERQANEVDWWDMVCNVKKLINEKKEDGKVFWQNLAGYKRQEALRPYLSSEEDRKKGKKFARYQLGDLLLHLEKKHGEDWGKVYDEAWERIDKKVEGLSKHIKLEEERRSEDAQSKAALTDWLRAKASFVIEGLKEADKDEFCRCELKLQKWYGDLRGKPFAIEAENSILDISGFSKQYNCAFIWQKDGVKKLNLYLIINYFKGGKLRFKKIKPEAFEANRFYTVINKKSGEIVPMEVNFNFDDPNLIILPLAFGKRQGREFIWNDLLSLETGSLKLANGRVIEKTLYNRRTRQDEPALFVALTFERREVLDSSNIKPMNLIGVDRGENIPAVIALTDPEGCPLSRFKDSLGNPTHILRIGESYKEKQRTIQAKKEVEQRRAGGYSRKYASKAKNLADDMVRNTARDLLYYAVTQDAMLIFENLSRGFGRQGKRTFMAERQYTRMEDWLTAKLAYEGLPSQTYLSKTLAQYTSKTCSNCGFTITSADYDRVLEKLKKTATGWMTTINGKELKVEGQITYYNRYKRQNVVKDLSVELDRLSEESVNNDISSWTKGRSGEALSLLKKRFSHRPVQEKFVCLNCGFETHADEQAALNIARSWLFLRSQEYKKYQTNKTSTGNTDKRAFVETWQSFYRKKLKEVWKPAV

SEQ ID NO: 47887 - protein, 978 aa, synthetic construct
  REGION 1..978: note = engineered CasX variant
QEIKRINKIRRRLVKDSNTKKAGKTGPMKTLLVRVMTPDLRERLENLRKKPENIPQPISNTSRANLNKLLTDYTEMKKAILHVYWEEFQKDPVGLMSRVAQPASKKIDQNKLKPEMDEKGNLTTAGFACSQCGQPLFVYKLEQVSEKGKAYTNYFGRCNVAEHEKLILLAQLKPEKDSDEAVTYSLGKFGQRALDFYSIHVTKESTHPVKPLAQIAGNRYASPVGKALSDACMGTIASFLSKYQDIIIEHQKVVKGNQKRLESLRELAGKENLEYPSVTLPPQPHTKEGVDAYNEVIARVRMWVNLNLWQKLKLSRDDAKPLLRLKGFPSFPLVERQANEVDWWDMVCNVKKLINEKKEDGKVFWQNLAGYKRQEALRPYLSSEEDRKKGKKFARYQLGDLLLHLEKKHGEDWGKVYDEAWERIDKKVEGLSKHIKLEEERRSEDAQSKAALTDWLRAKASFVIEGLKEADKDEFCRCELKLQKWYGDLRGKPFAIEAENSILDISGFSKQYNCAFIWQKDGVKKLNLYLIINYFKGGKLRFKKIKPEAFEANRFYTVINKKSGEIVPMEVNFNFDDPNLIILPLAFGKRQGREFIWNDLLSLETGSLKLANGRVIEKTLYNRRTRQDEPALFVALTFERREVLDSSNIKPMNLIGVDRGENIPAVIALTDPEGCPLSRFKDSLGNPTHILRIGESYKEKQRTIQAKKEVEQRRAGGYSRKYASKAKNLADDMVRNTARDLLYYAVTQDAMLIFENLSRGFGRQGKRTFMAERQYTRMEDWLTAKLAYEGLPSQTYLSKTLAQYTSKTCSNCGFTITSADYDRVLEKLKKTATGWMTTINGKELKVEGQITYYNRYKRQNVVKDLSVELDRLSEESVNNDISSWTKGRSGEALSLLKKRFSHRPVQEKFVCLNCGFETHADEQAALNIARSWLFLRSQEYKKYQTNKTSTGNTDKRAFVETWQSFYRKKLKEVWKPAV

SEQ ID NO: 47888 - protein, 979 aa, synthetic construct
  REGION 1..979: note = engineered CasX variant
QEIKRINKIRRRLVKDSNTKKAGKTGPMKTLLVRVMTPDLRERLENLRKKPENIPQPISNTSRANLNKLLTDYTEMKKAILHVYWEEFQKDPVGLMSRVAQPASKKIDQNKLKPEMDEKGNLTTAGFACSQCGQPLFVYKLEQVSEKGKAYTNYFGRCNVAEHEKLILLAQLKPEKDSDEAVTYSLGKFGQRALDFYSIHVTKESTHPVKPLAQIAGNRYASYPVGKALSDACMGTIASFLSKYQDIIIEHQKVVKGNQKRLESLRELAGKENLEYPSVTLPPQPHTKEGVDAYNEVIARVRMWVNLNLWQKLKLSRDDAKPLLRLKGFPSFPLVERQANEVDWWDMVCNVKKLINEKKEDGKVFWQNLAGYKRQEALRPYLSSEEDRKKGKKFARYQLGDLLLHLEKKHGEDWGKVYDEAWERIDKKVEGLSKHIKLEEERRSEDAQSKAALTDWLRAKASFVIEGLKEADKDEFCRCELKLQKWYGDLRGKPFAIEAENSILDISGFSKQYNCAFIWQKDGVKKLNLYLIINYFKGGKLRFKKIKPEAFEANRFYTVINKKSGEIVPMEVNFNFDDPNLIILPLAFGKRQGREFIWNDLLSLETGSLKLANGRVIEKTLYNRRTRQDEPALFVALTFERREVLDSSNIKPMNLIGVDRGENIPAVIALTDPEGCPLSRFKDSLGNPTHILRIGESYKEKQRTIQAKKEVEQRRAGGYSRKYASKAKNLADDMVRNTARDLLYYAVTQDAMLIFENLSRGFGRQGKRTFMAERQYTRMEDWLTAKLAYNGLPSKTYLSKTLAQYTSKTCSNCGFTITSADYDRVLEKLKKTATGWMTTINGKELKVEGQITYYNRYKRQNVVKDLSVELDRLSEESVNNDISSWTKGRSGEALSLLKKRFSHRPVQEKFVCLNCGFETHADEQAALNIARSWLFLRSQEYKKYQTNKTSTGNTDKRAFVETWQSFYRKKLKEVWKPAV

SEQ ID NO: 47889 - protein, 979 aa, synthetic construct
  REGION 1..979: note = engineered CasX variant
QEIKRINKIRRRLVKDSNTKKAGKTGPMKTLLVRVMTPDLRERLENLRKKPENIPQPISNTSRANLNKLLTDYTEMKKAILHVYWEEFQKDPVGLMSRVAQPASKKIDQNKLKPEMDEKGNLTTAGFACSQCGQPLFVYKLEQVSEKGKAYTNYFGRCNVAEHEKLILLAQLKPEKDSDEAVTYSLGKFGQRALDFYSIHVTKESTHPVKPLAQIAGNRYASHPVGKALSDACMGTIASFLSKYQDIIIEHQKVVKGNQKRLESLRELAGKENLEYPSVTLPPQPHTKEGVDAYNEVIARVRMWVNLNLWQKLKLSRDDAKPLLRLKGFPSFPLVERQANEVDWWDMVCNVKKLINEKKEDGKVFWQNLAGYKRQEALRPYLSSEEDRKKGKKFARYQLGDLLLHLEKKHGEDWGKVYDEAWERIDKKVEGLSKHIKLEEERRSEDAQSKAALTDWLRAKASFVIEGLKEADKDEFCRCELKLQKWYGDLRGKPFAIEAENSILDISGFSKQYNCAFIWQKDGVKKLNLYLIINYFKGGKLRFKKIKPEAFEANRFYTVINKKSGEIVPMEVNFNFDDPNLIILPLAFGKRQGREFIWNDLLSLETGSLKLANGRVIEKTLYNRRTRQDEPALFVALTFERREVLDSSNIKPMNLIGVDRGENIPAVIALTDPEGCPLSRFKDSLGNPTHILRIGESYKEKQRTIQAKKEVEQRRAGGYSRKYASKAKNLADDMVRNTARDLLYYAVTQDAMLIFENLSRGFGRQGKRTFMAERQYTRMEDWLTAKLAYNGLPSKTYLSKTLAQYTSKTCSNCGFTITSADYDRVLEKLKKTATGWMTTINGKELKVEGQITYYNRYKRQNVVKDLSVELDRLSEESVNNDISSWTKGRSGEALSLLKKRFSHRPVQEKFVCLNCGFETHADEQAALNIARSWLFLRSQEYKKYQTNKTSTGNTDKRAFVETWQSFYRKKLKEVWKPAV

SEQ ID NO: 47890 - protein, 979 aa, synthetic construct
  REGION 1..979: note = engineered CasX variant
QEIKRINKIRRRLVKDSNTKKAGKTGPMKTLLVRVMTPDLRERLENLRKKPENIPQPISNTSRANLNKLLTDYTEMKKAILHVYWEEFQKDPVGLMSRVAQPASKKIDQNKLKPEMDEKGNLTTAGFACSQCGQPLFVYKLEQVSEKGKAYTNYFGRCNVAEHEKLILLAQLKPEKDSDEAVTYSLGKFGQRALDFYSIHVTKESTHPVKPLAQIAGNRYASSPVGKALSDACMGTIASFLSKYQDIIIEHQKVVKGNQKRLESLRELAGKENLEYPSVTLPPQPHTKEGVDAYNEVIARVRMWVNLNLWQKLKLSRDDAKPLLRLKGFPSFPLVERQANEVDWWDMVCNVKKLINEKKEDGKVFWQNLAGYKRQEALRPYLSSEEDRKKGKKFARYQLGDLLLHLEKKHGEDWGKVYDEAWERIDKKVEGLSKHIKLEEERRSEDAQSKAALTDWLRAKASFVIEGLKEADKDEFCRCELKLQKWYGDLRGKPFAIEAENSILDISGFSKQYNCAFIWQKDGVKKLNLYLIINYFKGGKLRFKKIKPEAFEANRFYTVINKKSGEIVPMEVNFNFDDPNLIILPLAFGKRQGREFIWNDLLSLETGSLKLANGRVIEKTLYNRRTRQDEPALFVALTFERREVLDSSNIKPMNLIGVDRGENIPAVIALTDPEGCPLSRFKDSLGNPTHILRIGESYKEKQRTIQAKKEVEQRRAGGYSRKYASKAKNLADDMVRNTARDLLYYAVTQDAMLIFENLSRGFGRQGKRTFMAERQYTRMEDWLTAKLAYNGLPSKTYLSKTLAQYTSKTCSNCGFTITSADYDRVLEKLKKTATGWMTTINGKELKVEGQITYYNRYKRQNVVKDLSVELDRLSEESVNNDISSWTKGRSGEALSLLKKRFSHRPVQEKFVCLNCGFETHADEQAALNIARSWLFLRSQEYKKYQTNKTSTGNTDKRAFVETWQSFYRKKLKEVWKPAV

SEQ ID NO: 47891 - protein, 979 aa, synthetic construct
  REGION 1..979: note = engineered CasX variant
QEIKRINKIRRRLVKDSNTKKAGKTGPMKTLLVRVMTPDLRERLENLRKKPENIPQPISNTSRANLNKLLTDYTEMKKAILHVYWEEFQKDPVGLMSRVAQPASKKIDQNKLKPEMDEKGNLTTAGFACSQCGQPLFVYKLEQVSEKGKAYTNYFGRCNVAEHEKLILLAQLKPEKDSDEAVTYSLGKFGQRALDFYSIHVTKESTHPVKPLAQIAGNRYASTPVGKALSDACMGTIASFLSKYQDIIIEHQKVVKGNQKRLESLRELAGKENLEYPSVTLPPQPHTKEGVDAYNEVIARVRMWVNLNLWQKLKLSRDDAKPLLRLKGFPSFPLVERQANEVDWWDMVCNVKKLINEKKEDGKVFWQNLAGYKRQEALRPYLSSEEDRKKGKKFARYQLGDLLLHLEKKHGEDWGKVYDEAWERIDKKVEGLSKHIKLEEERRSEDAQSKAALTDWLRAKASFVIEGLKEADKDEFCRCELKLQKWYGDLRGKPFAIEAENSILDISGFSKQYNCAFIWQKDGVKKLNLYLIINYFKGGKLRFKKIKPEAFEANRFYTVINKKSGEIVPMEVNFNFDDPNLIILPLAFGKRQGREFIWNDLLSLETGSLKLANGRVIEKTLYNRRTRQDEPALFVALTFERREVLDSSNIKPMNLIGVDRGENIPAVIALTDPEGCPLSRFKDSLGNPTHILRIGESYKEKQRTIQAKKEVEQRRAGGYSRKYASKAKNLADDMVRNTARDLLYYAVTQDAMLIFENLSRGFGRQGKRTFMAERQYTRMEDWLTAKLAYNGLPSKTYLSKTLAQYTSKTCSNCGFTITSADYDRVLEKLKKTATGWMTTINGKELKVEGQITYYNRYKRQNVVKDLSVELDRLSEESVNNDISSWTKGRSGEALSLLKKRFSHRPVQEKFVCLNCGFETHADEQAALNIARSWLFLRSQEYKKYQTNKTSTGNTDKRAFVETWQSFYRKKLKEVWKPAV

SEQ ID NO: 47892 - protein, 979 aa, synthetic construct
  REGION 1..979: note = engineered CasX variant
QEIKRINKIRRRLVKDSNTKKAGKTGPMKTLLVRVMTPDLRERLENLRKKPENIPQPISNTSRANLNKLLTDYTEMKKAILHVYWEEFQKDPVGLMSRVAQPASKKIDQNKLKPEMDEKGNLTTAGFACSQCGQPLFVYKLEQVSEKGKAYTNYFGRCNVAEHEKLILLAQLKPEKDSDEAVTYSLGKFGQRALDFYSIHVTKESTHPVKPLAQIAGNRYASAPVGKALSDACMGTIASFLSKYQDIIIEHQKVVKGNQKRLESLRELAGKENLEYPSVTLPPQPHTKEGVDAYNEVIARVRMWVNLNLWQKLKLSRDDAKPLLRLKGFPSFPLVERQANEVDWWDMVCNVKKLINEKKEDGKVFWQNLAGYKRQEALRPYLSSEEDRKKGKKFARYQLGDLLLHLEKKHGEDWGKVYDEAWERIDKKVEGLSKHIKLEEERRSEDAQSKAALTDWLRAKASFVIEGLKEADKDEFCRCELKLQKWYGDLRGKPFAIEAENSILDISGFSKQYNCAFIWQKDGVKKLNLYLIINYFKGGKLRFKKIKPEAFEANRFYTVINKKSGEIVPMEVNFNFDDPNLIILPLAFGKRQGREFIWNDLLSLETGSLKLANGRVIEKTLYNRRTRQDEPALFVALTFERREVLDSSNIKPMNLIGVDRGENIPAVIALTDPEGCPLSRFKDSLGNPTHILRIGESYKEKQRTIQAKKEVEQRRAGGYSRKYASKAKNLADDMVRNTARDLLYYAVTQDAMLIFENLSRGFGRQGKRTFMAERQYTRMEDWLTAKLAYNGLPSKTYLSKTLAQYTSKTCSNCGFTITSADYDRVLEKLKKTATGWMTTINGKELKVEGQITYYNRYKRQNVVKDLSVELDRLSEESVNNDISSWTKGRSGEALSLLKKRFSHRPVQEKFVCLNCGFETHADEQAALNIARSWLFLRSQEYKKYQTNKTSTGNTDKRAFVETWQSFYRKKLKEVWKPAV

SEQ ID NO: 47893 - protein, 979 aa, synthetic construct
  REGION 1..979: note = engineered CasX variant
QEIKRINKIRRRLVKDSNTKKAGKTGPMKTLLVRVMTPDLRERLENLRKKPENIPQPISNTSRANLNKLLTDYTEMKKAILHVYWEEFQKDPVGLMSRVAQPASKKIDQNKLKPEMDEKGNLTTAGFACSQCGQPLFVYKLEQVSEKGKAYTNYFGRCNVAEHEKLILLAQLKPEKDSDEAVTYSLGKFGQRALDFYSIHVTKESTHPVKPLAQIAGNRYASVPVGKALSDACMGTIASFLSKYQDIIIEHQKVVKGNQKRLESLRELAGKENLEYPSVTLPPQPHTKEGVDAYNEVIARVRMWVNLNLWQKLKLSRDDAKPLLRLKGFPSFPLVERQANEVDWWDMVCNVKKLINEKKEDGKVFWQNLAGYKRQEALRPYLSSEEDRKKGKKFARYQLGDLLLHLEKKHGEDWGKVYDEAWERIDKKVEGLSKHIKLEEERRSEDAQSKAALTDWLRAKASFVIEGLKEADKDEFCRCELKLQKWYGDLRGKPFAIEAENSILDISGFSKQYNCAFIWQKDGVKKLNLYLIINYFKGGKLRFKKIKPEAFEANRFYTVINKKSGEIVPMEVNFNFDDPNLIILPLAFGKRQGREFIWNDLLSLETGSLKLANGRVIEKTLYNRRTRQDEPALFVALTFERREVLDSSNIKPMNLIGVDRGENIPAVIALTDPEGCPLSRFKDSLGNPTHILRIGESYKEKQRTIQAKKEVEQRRAGGYSRKYASKAKNLADDMVRNTARDLLYYAVTQDAMLIFENLSRGFGRQGKRTFMAERQYTRMEDWLTAKLAYNGLPSKTYLSKTLAQYTSKTCSNCGFTITSADYDRVLEKLKKTATGWMTTINGKELKVEGQITYYNRYKRQNVVKDLSVELDRLSEESVNNDISSWTKGRSGEALSLLKKRFSHRPVQEKFVCLNCGFETHADEQAALNIARSWLFLRSQEYKKYQTNKTSTGNTDKRAFVETWQSFYRKKLKEVWKPAV

SEQ ID NO: 47894 - protein, 979 aa, synthetic construct
  REGION 1..979: note = engineered CasX variant
QEIKRINKIRRRLVKDSNTKKAGKTGPMKTLLVRVMTPDLRERLENLRKKPENIPQPISNTSRANLNKLLTDYTEMKKAILHVYWEEFQKDPVGLMSRVAQPASKKIDQNKLKPEMDEKGNLTTAGFACSQCGQPLFVYKLEQVSEKGKAYTNYFGRCNVAEHEKLIKLAQLKPEKDSDEAVTYSLGKFGQRALDFYSIHVTKESTHPVKPLAQIAGNRYASGPVGKALSDACMGTIASFLSKYQDIIIEHQKVVKGNQKRLESLRELAGKENLEYPSVTLPPQPHTKEGVDAYNEVIARVRMWVNLNLWQKLKLSRDDAKPLLRLKGFPSFPLVERQANEVDWWDMVCNVKKLINEKKEDGKVFWQNLAGYKRQEALRPYLSSEEDRKKGKKFARYQLGDLLLHLEKKHGEDWGKVYDEAWERIDKKVEGLSKHIKLEEERRSEDAQSKAALTDWLRAKASFVIEGLKEADKDEFCRCELKLQKWYGDLRGKPFAIEAENSILDISGFSKQYNCAFIWQKDGVKKLNLYLIINYFKGGKLRFKKIKPEAFEANRFYTVINKKSGEIVPMEVNFNFDDPNLIILPLAFGKRQGREFIWNDLLSLETGSLKLANGRVIEKTLYNRRTRQDEPALFVALTFERREVLDSSNIKPMNLIGVDRGENIPAVIALTDPEGCPLSRFKDSLGNPTHILRIGESYKEKQRTIQAKKEVEQRRAGGYSRKYASKAKNLADDMVRNTARDLLYYAVTQDAMLIFENLSRGFGRQGKRTFMAERQYTRMEDWLTAKLAYNGLPSKTYLSKTLAQYTSKTCSNCGFTITSADYDRVLEKLKKTATGWMTTINGKELKVEGQITYYNRYKRQNVVKDLSVELDRLSEESVNNDISSWTKGRSGEALSLLKKRFSHRPVQEKFVCLNCGFETHADEQAALNIARSWLFLRSQEYKKYQTNKTSTGNTDKRAFVETWQSFYRKKLKEVWKPAV

SEQ ID NO: 47895 - protein, 978 aa, synthetic construct
  REGION 1..978: note = engineered CasX variant
QEIKRINKIRRRLVKDSNTKKAGKTGPMKTLLVRVMTPDLRERLENLRKKPENIPQPISNTSRANLNKLLTDYTEMKKAILHVYWEEFQKDPVGLMSRVAQPASKKIDQNKLKPEMDEKGNLTTAGFACSQCGQPLFVYKLEQVSEKGKAYTNYFGRCNVAEHEKLILLAQLKPEKDSDEAVTYSLGKFGQRALDFYSIHVTKESTHPVKPLAQIAGNRYASPVGKALSDACMGTIASFLSKYQDIIIEHQKVVKGNQKRLESLRELAGKENLEYPSVTLPPQPHTKEGVDAYNEVIARVRMWVNLNLWQKLKLSRDDAKPLLRLKGFPSFPLVERQANEVDWWDMVCNVKKLINEKKEDGKVFWQNLAGYKRQEALRPYLSSEEDRKKGKKFARYQLGDLLLHLEKKHGEDWGKVYDEAWERIDKKVEGLSKHIKLEEERRSEDAQSKAALTDWLRAKASFVIEGLKEADKDEFCRCELKLQKWYGDLRGKPFAIEAENSILDISGFSKQYNCAFIWQKDGVKKLNLYLIINYFKGGKLRFKKIKPEAFEANRFYTVINKKSGEIVPMEVNFNFDDPNLIILPLAFGKRQGREFIWNDLLSLETGSLKLANGRVIEKTLYNRRTRQDEPALFVALTFERREVLDSSNIKPMNLIGVDRGENIPAVIALTDPEGCPLSRFKDSLGNPTHILRIGESYKEKQRTIQAKKEVEQRRAGGYSRKYASKAKNLADDMVRNTARDLLYYAVTQDAMLIFENLSRGFGRQGKRTFMAERQYTRMEDWLTAKLAYNGLPSKTYLSKTLAQYTSKTCSNCGFTITSADYDRVLEKLKKTATGWMTTINGKELKVEGQITYYNRYKRQNVVKDLSVELDRLSEESVNNDISSWTKGRSGEALSLLKKRFSHRPVQEKFVCLNCGFETHADEQAALNIARSWLFLRSQEYKKYQTNKTSTGNTDKRAFVETWQSFYRKKLKEVWKPAV

SEQ ID NO: 47896 - protein, 979 aa, synthetic construct
  REGION 1..979: note = engineered CasX variant
QEIKRINKIRRRLVKDSNTKKAGKTGPMKTLLVRVMTPDLRERLENLRKKPENIPQPISNTSRANLNKLLTDYTEMKKAILHVYWEEFQKDPVGLMSRVAQPASKKIDQNKLKPEMDEKGNLTTAGFACSQCGQPLFVYKLEQVSEKGKAYTNYFGRCNVAEHEKLIQLAQLKPEKDSDEAVTYSLGKFGQRALDFYSIHVTKESTHPVKPLAQIAGNRYASYPVGKALSDACMGTIASFLSKYQDIIIEHQKVVKGNQKRLESLRELAGKENLEYPSVTLPPQPHTKEGVDAYNEVIARVRMWVNLNLWQKLKLSRDDAKPLLRLKGFPSFPLVERQANEVDWWDMVCNVKKLINEKKEDGKVFWQNLAGYKRQEALRPYLSSEEDRKKGKKFARYQLGDLLLHLEKKHGEDWGKVYDEAWERIDKKVEGLSKHIKLEEERRSEDAQSKAALTDWLRAKASFVIEGLKEADKDEFCRCELKLQKWYGDLRGKPFAIEAENSILDISGFSKQYNCAFIWQKDGVKKLNLYLIINYFKGGKLRFKKIKPEAFEANRFYTVINKKSGEIVPMEVNFNFDDPNLIILPLAFGKRQGREFIWNDLLSLETGSLKLANGRVIEKTLYNRRTRQDEPALFVALTFERREVLDSSNIKPMNLIGVDRGENIPAVIALTDPEGCPLSRFKDSLGNPTHILRIGESYKEKQRTIQAKKEVEQRRAGGYSRKYASKAKNLADDMVRNTARDLLYYAVTQDAMLIFENLSRGFGRQGKRTFMAERQYTRMEDWLTAKLAYEGLPSKTYLSKTLAQYTSKTCSNCGFTITSADYDRVLEKLKKTATGWMTTINGKELKVEGQITYYNRYKRQNVVKDLSVELDRLSEESVNNDISSWTKGRSGEALSLLKKRFSHRPVQEKFVCLNCGFETHADEQAALNIARSWLFLRSQEYKKYQTNKTSTGNTDKRAFVETWQSFYRKKLKEVWKPAV

SEQ ID NO: 47897 - protein, 979 aa, synthetic construct
  REGION 1..979: note = engineered CasX variant
QEIKRINKIRRRLVKDSNTKKAGKTGPMKTLLVRVMTPDLRERLENLRKKPENIPQPISNTSRANLNKLLTDYTEMKKAILHVYWEEFQKDPVGLMSRVAQPASKKIDQNKLKPEMDEKGNLTTAGFACSQCGQPLFVYKLEQVSEKGKAYTNYFGRCNVAEHEKLIQLAQLKPEKDSDEAVTYSLGKFGQRALDFYSIHVTKESTHPVKPLAQIAGNRYASHPVGKALSDACMGTIASFLSKYQDIIIEHQKVVKGNQKRLESLRELAGKENLEYPSVTLPPQPHTKEGVDAYNEVIARVRMWVNLNLWQKLKLSRDDAKPLLRLKGFPSFPLVERQANEVDWWDMVCNVKKLINEKKEDGKVFWQNLAGYKRQEALRPYLSSEEDRKKGKKFARYQLGDLLLHLEKKHGEDWGKVYDEAWERIDKKVEGLSKHIKLEEERRSEDAQSKAALTDWLRAKASFVIEGLKEADKDEFCRCELKLQKWYGDLRGKPFAIEAENSILDISGFSKQYNCAFIWQKDGVKKLNLYLIINYFKGGKLRFKKIKPEAFEANRFYTVINKKSGEIVPMEVNFNFDDPNLIILPLAFGKRQGREFIWNDLLSLETGSLKLANGRVIEKTLYNRRTRQDEPALFVALTFERREVLDSSNIKPMNLIGVDRGENIPAVIALTDPEGCPLSRFKDSLGNPTHILRIGESYKEKQRTIQAKKEVEQRRAGGYSRKYASKAKNLADDMVRNTARDLLYYAVTQDAMLIFENLSRGFGRQGKRTFMAERQYTRMEDWLTAKLAYEGLPSKTYLSKTLAQYTSKTCSNCGFTITSADYDRVLEKLKKTATGWMTTINGKELKVEGQITYYNRYKRQNVVKDLSVELDRLSEESVNNDISSWTKGRSGEALSLLKKRFSHRPVQEKFVCLNCGFETHADEQAALNIARSWLFLRSQEYKKYQTNKTSTGNTDKRAFVETWQSFYRKKLKEVWKPAV

SEQ ID NO: 47898 - protein, 979 aa, synthetic construct
  REGION 1..979: note = engineered CasX variant
QEIKRINKIRRRLVKDSNTKKAGKTGPMKTLLVRVMTPDLRERLENLRKKPENIPQPISNTSRANLNKLLTDYTEMKKAILHVYWEEFQKDPVGLMSRVAQPASKKIDQNKLKPEMDEKGNLTTAGFACSQCGQPLFVYKLEQVSEKGKAYTNYFGRCNVAEHEKLIQLAQLKPEKDSDEAVTYSLGKFGQRALDFYSIHVTKESTHPVKPLAQIAGNRYASSPVGKALSDACMGTIASFLSKYQDIIIEHQKVVKGNQKRLESLRELAGKENLEYPSVTLPPQPHTKEGVDAYNEVIARVRMWVNLNLWQKLKLSRDDAKPLLRLKGFPSFPLVERQANEVDWWDMVCNVKKLINEKKEDGKVFWQNLAGYKRQEALRPYLSSEEDRKKGKKFARYQLGDLLLHLEKKHGEDWGKVYDEAWERIDKKVEGLSKHIKLEEERRSEDAQSKAALTDWLRAKASFVIEGLKEADKDEFCRCELKLQKWYGDLRGKPFAIEAENSILDISGFSKQYNCAFIWQKDGVKKLNLYLIINYFKGGKLRFKKIKPEAFEANRFYTVINKKSGEIVPMEVNFNFDDPNLIILPLAFGKRQGREFIWNDLLSLETGSLKLANGRVIEKTLYNRRTRQDEPALFVALTFERREVLDSSNIKPMNLIGVDRGENIPAVIALTDPEGCPLSRFKDSLGNPTHILRIGESYKEKQRTIQAKKEVEQRRAGGYSRKYASKAKNLADDMVRNTARDLLYYAVTQDAMLIFENLSRGFGRQGKRTFMAERQYTRMEDWLTAKLAYEGLPSKTYLSKTLAQYTSKTCSNCGFTITSADYDRVLEKLKKTATGWMTTINGKELKVEGQITYYNRYKRQNVVKDLSVELDRLSEESVNNDISSWTKGRSGEALSLLKKRFSHRPVQEKFVCLNCGFETHADEQAALNIARSWLFLRSQEYKKYQTNKTSTGNTDKRAFVETWQSFYRKKLKEVWKPAV

SEQ ID NO: 47899 - protein, 979 aa, synthetic construct
  REGION 1..979: note = engineered CasX variant
QEIKRINKIRRRLVKDSNTKKAGKTGPMKTLLVRVMTPDLRERLENLRKKPENIPQPISNTSRANLNKLLTDYTEMKKAILHVYWEEFQKDPVGLMSRVAQPASKKIDQNKLKPEMDEKGNLTTAGFACSQCGQPLFVYKLEQVSEKGKAYTNYFGRCNVAEHEKLIQLAQLKPEKDSDEAVTYSLGKFGQRALDFYSIHVTKESTHPVKPLAQIAGNRYASTPVGKALSDACMGTIASFLSKYQDIIIEHQKVVKGNQKRLESLRELAGKENLEYPSVTLPPQPHTKEGVDAYNEVIARVRMWVNLNLWQKLKLSRDDAKPLLRLKGFPSFPLVERQANEVDWWDMVCNVKKLINEKKEDGKVFWQNLAGYKRQEALRPYLSSEEDRKKGKKFARYQLGDLLLHLEKKHGEDWGKVYDEAWERIDKKVEGLSKHIKLEEERRSEDAQSKAALTDWLRAKASFVIEGLKEADKDEFCRCELKLQKWYGDLRGKPFAIEAENSILDISGFSKQYNCAFIWQKDGVKKLNLYLIINYFKGGKLRFKKIKPEAFEANRFYTVINKKSGEIVPMEVNFNFDDPNLIILPLAFGKRQGREFIWNDLLSLETGSLKLANGRVIEKTLYNRRTRQDEPALFVALTFERREVLDSSNIKPMNLIGVDRGENIPAVIALTDPEGCPLSRFKDSLGNPTHILRIGESYKEKQRTIQAKKEVEQRRAGGYSRKYASKAKNLADDMVRNTARDLLYYAVTQDAMLIFENLSRGFGRQGKRTFMAERQYTRMEDWLTAKLAYEGLPSKTYLSKTLAQYTSKTCSNCGFTITSADYDRVLEKLKKTATGWMTTINGKELKVEGQITYYNRYKRQNVVKDLSVELDRLSEESVNNDISSWTKGRSGEALSLLKKRFSHRPVQEKFVCLNCGFETHADEQAALNIARSWLFLRSQEYKKYQTNKTSTGNTDKRAFVETWQSFYRKKLKEVWKPAV

SEQ ID NO: 47900 - protein, 979 aa, synthetic construct
  REGION 1..979: note = engineered CasX variant
QEIKRINKIRRRLVKDSNTKKAGKTGPMKTLLVRVMTPDLRERLENLRKKPENIPQPISNTSRANLNKLLTDYTEMKKAILHVYWEEFQKDPVGLMSRVAQPASKKIDQNKLKPEMDEKGNLTTAGFACSQCGQPLFVYKLEQVSEKGKAYTNYFGRCNVAEHEKLIQLAQLKPEKDSDEAVTYSLGKFGQRALDFYSIHVTKESTHPVKPLAQIAGNRYASAPVGKALSDACMGTIASFLSKYQDIIIEHQKVVKGNQKRLESLRELAGKENLEYPSVTLPPQPHTKEGVDAYNEVIARVRMWVNLNLWQKLKLSRDDAKPLLRLKGFPSFPLVERQANEVDWWDMVCNVKKLINEKKEDGKVFWQNLAGYKRQEALRPYLSSEEDRKKGKKFARYQLGDLLLHLEKKHGEDWGKVYDEAWERIDKKVEGLSKHIKLEEERRSEDAQSKAALTDWLRAKASFVIEGLKEADKDEFCRCELKLQKWYGDLRGKPFAIEAENSILDISGFSKQYNCAFIWQKDGVKKLNLYLIINYFKGGKLRFKKIKPEAFEANRFYTVINKKSGEIVPMEVNFNFDDPNLIILPLAFGKRQGREFIWNDLLSLETGSLKLANGRVIEKTLYNRRTRQDEPALFVALTFERREVLDSSNIKPMNLIGVDRGENIPAVIALTDPEGCPLSRFKDSLGNPTHILRIGESYKEKQRTIQAKKEVEQRRAGGYSRKYASKAKNLADDMVRNTARDLLYYAVTQDAMLIFENLSRGFGRQGKRTFMAERQYTRMEDWLTAKLAYEGLPSKTYLSKTLAQYTSKTCSNCGFTITSADYDRVLEKLKKTATGWMTTINGKELKVEGQITYYNRYKRQNVVKDLSVELDRLSEESVNNDISSWTKGRSGEALSLLKKRFSHRPVQEKFVCLNCGFETHADEQAALNIARSWLFLRSQEYKKYQTNKTSTGNTDKRAFVETWQSFYRKKLKEVWKPAV

SEQ ID NO: 47901 - protein, 979 aa, synthetic construct
  REGION 1..979: note = engineered CasX variant
QEIKRINKIRRRLVKDSNTKKAGKTGPMKTLLVRVMTPDLRERLENLRKKPENIPQPISNTSRANLNKLLTDYTEMKKAILHVYWEEFQKDPVGLMSRVAQPASKKIDQNKLKPEMDEKGNLTTAGFACSQCGQPLFVYKLEQVSEKGKAYTNYFGRCNVAEHEKLIQLAQLKPEKDSDEAVTYSLGKFGQRALDFYSIHVTKESTHPVKPLAQIAGNRYASVPVGKALSDACMGTIASFLSKYQDIIIEHQKVVKGNQKRLESLRELAGKENLEYPSVTLPPQPHTKEGVDAYNEVIARVRMWVNLNLWQKLKLSRDDAKPLLRLKGFPSFPLVERQANEVDWWDMVCNVKKLINEKKEDGKVFWQNLAGYKRQEALRPYLSSEEDRKKGKKFARYQLGDLLLHLEKKHGEDWGKVYDEAWERIDKKVEGLSKHIKLEEERRSEDAQSKAALTDWLRAKASFVIEGLKEADKDEFCRCELKLQKWYGDLRGKPFAIEAENSILDISGFSKQYNCAFIWQKDGVKKLNLYLIINYFKGGKLRFKKIKPEAFEANRFYTVINKKSGEIVPMEVNFNFDDPNLIILPLAFGKRQGREFIWNDLLSLETGSLKLANGRVIEKTLYNRRTRQDEPALFVALTFERREVLDSSNIKPMNLIGVDRGENIPAVIALTDPEGCPLSRFKDSLGNPTHILRIGESYKEKQRTIQAKKEVEQRRAGGYSRKYASKAKNLADDMVRNTARDLLYYAVTQDAMLIFENLSRGFGRQGKRTFMAERQYTRMEDWLTAKLAYEGLPSKTYLSKTLAQYTSKTCSNCGFTITSADYDRVLEKLKKTATGWMTTINGKELKVEGQITYYNRYKRQNVVKDLSVELDRLSEESVNNDISSWTKGRSGEALSLLKKRFSHRPVQEKFVCLNCGFETHADEQAALNIARSWLFLRSQEYKKYQTNKTSTGNTDKRAFVETWQSFYRKKLKEVWKPAV

SEQ ID NO: 47902 - protein, 980 aa, synthetic construct
  REGION 1..980: note = engineered CasX variant
QEIKRINKIRRRLVKDSNTKKAGKTGPMKTLLVRVMTPDLRERLENLRKKPENIPQPISNTSRANLNKLLTDYTEMKKAILHVYWEEFQKDPVGLMSRVAQPASKKIDQNKLKPEMDEKGNLTTAGFACSQCGQPLFVYKLEQVSEKGKAYTNYFGRCNVAEHEKLIQKLAQLKPEKDSDEAVTYSLGKFGQRALDFYSIHVTKESTHPVKPLAQIAGNRYASGPVGKALSDACMGTIASFLSKYQDIIIEHQKVVKGNQKRLESLRELAGKENLEYPSVTLPPQPHTKEGVDAYNEVIARVRMWVNLNLWQKLKLSRDDAKPLLRLKGFPSFPLVERQANEVDWWDMVCNVKKLINEKKEDGKVFWQNLAGYKRQEALRPYLSSEEDRKKGKKFARYQLGDLLLHLEKKHGEDWGKVYDEAWERIDKKVEGLSKHIKLEEERRSEDAQSKAALTDWLRAKASFVIEGLKEADKDEFCRCELKLQKWYGDLRGKPFAIEAENSILDISGFSKQYNCAFIWQKDGVKKLNLYLIINYFKGGKLRFKKIKPEAFEANRFYTVINKKSGEIVPMEVNFNFDDPNLIILPLAFGKRQGREFIWNDLLSLETGSLKLANGRVIEKTLYNRRTRQDEPALFVALTFERREVLDSSNIKPMNLIGVDRGENIPAVIALTDPEGCPLSRFKDSLGNPTHILRIGESYKEKQRTIQAKKEVEQRRAGGYSRKYASKAKNLADDMVRNTARDLLYYAVTQDAMLIFENLSRGFGRQGKRTFMAERQYTRMEDWLTAKLAYEGLPSKTYLSKTLAQYTSKTCSNCGFTITSADYDRVLEKLKKTATGWMTTINGKELKVEGQITYYNRYKRQNVVKDLSVELDRLSEESVNNDISSWTKGRSGEALSLLKKRFSHRPVQEKFVCLNCGFETHADEQAALNIARSWLFLRSQEYKKYQTNKTSTGNTDKRAFVETWQSFYRKKLKEVWKPAV

SEQ ID NO: 47903 - protein, 978 aa, synthetic construct
  REGION 1..978: note = engineered CasX variant
QEIKRINKIRRRLVKDSNTKKAGKTGPMKTLLVRVMTPDLRERLENLRKKPENIPQPISNTSRANLNKLLTDYTEMKKAILHVYWEEFQKDPVGLMSRVAQPASKKIDQNKLKPEMDEKGNLTTAGFACSQCGQPLFVYKLEQVSEKGKAYTNYFGRCNVAEHEKLIQLAQLKPEKDSDEAVTYSLGKFGQRALDFYSIHVTKESTHPVKPLAQIAGNRYASPVGKALSDACMGTIASFLSKYQDIIIEHQKVVKGNQKRLESLRELAGKENLEYPSVTLPPQPHTKEGVDAYNEVIARVRMWVNLNLWQKLKLSRDDAKPLLRLKGFPSFPLVERQANEVDWWDMVCNVKKLINEKKEDGKVFWQNLAGYKRQEALRPYLSSEEDRKKGKKFARYQLGDLLLHLEKKHGEDWGKVYDEAWERIDKKVEGLSKHIKLEEERRSEDAQSKAALTDWLRAKASFVIEGLKEADKDEFCRCELKLQKWYGDLRGKPFAIEAENSILDISGFSKQYNCAFIWQKDGVKKLNLYLIINYFKGGKLRFKKIKPEAFEANRFYTVINKKSGEIVPMEVNFNFDDPNLIILPLAFGKRQGREFIWNDLLSLETGSLKLANGRVIEKTLYNRRTRQDEPALFVALTFERREVLDSSNIKPMNLIGVDRGENIPAVIALTDPEGCPLSRFKDSLGNPTHILRIGESYKEKQRTIQAKKEVEQRRAGGYSRKYASKAKNLADDMVRNTARDLLYYAVTQDAMLIFENLSRGFGRQGKRTFMAERQYTRMEDWLTAKLAYEGLPSKTYLSKTLAQYTSKTCSNCGFTITSADYDRVLEKLKKTATGWMTTINGKELKVEGQITYYNRYKRQNVVKDLSVELDRLSEESVNNDISSWTKGRSGEALSLLKKRFSHRPVQEKFVCLNCGFETHADEQAALNIARSWLFLRSQEYKKYQTNKTSTGNTDKRAFVETWQSFYRKKLKEVWKPAV

SEQ ID NO: 47904 - protein, 979 aa, synthetic construct
  REGION 1..979: note = engineered CasX variant
QEIKRINKIRRRLVKDSNTKKAGKTGPMKTLLVRVMTPDLRERLENLRKKPENIPQPISNTSRANLNKLLTDYTEMKKAILHVYWEEFQKDPVGLMSRVAQPASKKIDQNKLKPEMDEKGNLTTAGFACSQCGQPLFVYKLEQVSEKGKAYTNYFGRCNVAEHEKLILLAQLKPEKDSDEAVTYSLGKFGQRALDFYSIHVTKESTHPVKPLAQIAGNRYASYPVGKALSDACMGTIASFLSKYQDIIIEHQKVVKGNQKRLESLRELAGKENLEYPSVTLPPQPHTKEGVDAYNEVIARVRMWVNLNLWQKLKLSRDDAKPLLRLKGFPSFPLVERQANEVDWWDMVCNVKKLINEKKEDGKVFWQNLAIYKRQEALRPYLSSEEDRKKGKKFARYQLGDLLLHLEKKHGEDWGKVYDEAWERIDKKVEGLSKHIKLEEERRSEDAQSKAALTDWLRAKASFVIEGLKEADKDEFCRCELKLQKWYGDLRGKPFAIEAENSILDISGFSKQYNCAFIWQKDGVKKLNLYLIINYFKGGKLRFKKIKPEAFEANRFYTVINKKSGEIVPMEVNFNFDDPNLIILPLAFGKRQGREFIWNDLLSLETGSLKLANGRVIEKTLYNRRTRQDEPALFVALTFERREVLDSSNIKPMNLIGVDRGENIPAVIALTDPEGCPLSRFKDSLGNPTHILRIGESYKEKQRTIQAKKEVEQRRAGGYSRKYASKAKNLADDMVRNTARDLLYYAVTQDAMLIFENLSRGFGRQGKRTFMAERQYTRMEDWLTAKLAYEGLPSKTYLSKTLAQYTSKTCSNCGFTITSADYDRVLEKLKKTATGWMTTINGKELKVEGQITYYNRYKRQNVVKDLSVELDRLSEESVNNDISSWTKGRSGEALSLLKKRFSHRPVQEKFVCLNCGFETHADEQAALNIARSWLFLRSQEYKKYQTNKTSTGNTDKRAFVETWQSFYRKKLKEVWKPAV

SEQ ID NO: 47905 - protein, 979 aa, synthetic construct
  REGION 1..979: note = engineered CasX variant
QEIKRINKIRRRLVKDSNTKKAGKTGPMKTLLVRVMTPDLRERLENLRKKPENIPQPISNTSRANLNKLLTDYTEMKKAILHVYWEEFQKDPVGLMSRVAQPASKKIDQNKLKPEMDEKGNLTTAGFACSQCGQPLFVYKLEQVSEKGKAYTNYFGRCNVAEHEKLILLAQLKPEKDSDEAVTYSLGKFGQRALDFYSIHVTKESTHPVKPLAQIAGNRYASHPVGKALSDACMGTIASFLSKYQDIIIEHQKVVKGNQKRLESLRELAGKENLEYPSVTLPPQPHTKEGVDAYNEVIARVRMWVNLNLWQKLKLSRDDAKPLLRLKGFPSFPLVERQANEVDWWDMVCNVKKLINEKKEDGKVFWQNLAIYKRQEALRPYLSSEEDRKKGKKFARYQLGDLLLHLEKKHGEDWGKVYDEAWERIDKKVEGLSKHIKLEEERRSEDAQSKAALTDWLRAKASFVIEGLKEADKDEFCRCELKLQKWYGDLRGKPFAIEAENSILDISGFSKQYNCAFIWQKDGVKKLNLYLIINYFKGGKLRFKKIKPEAFEANRFYTVINKKSGEIVPMEVNFNFDDPNLIILPLAFGKRQGREFIWNDLLSLETGSLKLANGRVIEKTLYNRRTRQDEPALFVALTFERREVLDSSNIKPMNLIGVDRGENIPAVIALTDPEGCPLSRFKDSLGNPTHILRIGESYKEKQRTIQAKKEVEQRRAGGYSRKYASKAKNLADDMVRNTARDLLYYAVTQDAMLIFENLSRGFGRQGKRTFMAERQYTRMEDWLTAKLAYEGLPSKTYLSKTLAQYTSKTCSNCGFTITSADYDRVLEKLKKTATGWMTTINGKELKVEGQITYYNRYKRQNVVKDLSVELDRLSEESVNNDISSWTKGRSGEALSLLKKRFSHRPVQEKFVCLNCGFETHADEQAALNIARSWLFLRSQEYKKYQTNKTSTGNTDKRAFVETWQSFYRKKLKEVWKPAV

SEQ ID NO: 47906 - protein, 979 aa, synthetic construct
  REGION 1..979: note = engineered CasX variant
QEIKRINKIRRRLVKDSNTKKAGKTGPMKTLLVRVMTPDLRERLENLRKKPENIPQPISNTSRANLNKLLTDYTEMKKAILHVYWEEFQKDPVGLMSRVAQPASKKIDQNKLKPEMDEKGNLTTAGFACSQCGQPLFVYKLEQVSEKGKAYTNYFGRCNVAEHEKLILLAQLKPEKDSDEAVTYSLGKFGQRALDFYSIHVTKESTHPVKPLAQIAGNRYASSPVGKALSDACMGTIASFLSKYQDIIIEHQKVVKGNQKRLESLRELAGKENLEYPSVTLPPQPHTKEGVDAYNEVIARVRMWVNLNLWQKLKLSRDDAKPLLRLKGFPSFPLVERQANEVDWWDMVCNVKKLINEKKEDGKVFWQNLAIYKRQEALRPYLSSEEDRKKGKKFARYQLGDLLLHLEKKHGEDWGKVYDEAWERIDKKVEGLSKHIKLEEERRSEDAQSKAALTDWLRAKASFVIEGLKEADKDEFCRCELKLQKWYGDLRGKPFAIEAENSILDISGFSKQYNCAFIWQKDGVKKLNLYLIINYFKGGKLRFKKIKPEAFEANRFYTVINKKSGEIVPMEVNFNFDDPNLIILPLAFGKRQGREFIWNDLLSLETGSLKLANGRVIEKTLYNRRTRQDEPALFVALTFERREVLDSSNIKPMNLIGVDRGENIPAVIALTDPEGCPLSRFKDSLGNPTHILRIGESYKEKQRTIQAKKEVEQRRAGGYSRKYASKAKNLADDMVRNTARDLLYYAVTQDAMLIFENLSRGFGRQGKRTFMAERQYTRMEDWLTAKLAYEGLPSKTYLSKTLAQYTSKTCSNCGFTITSADYDRVLEKLKKTATGWMTTINGKELKVEGQITYYNRYKRQNVVKDLSVELDRLSEESVNNDISSWTKGRSGEALSLLKKRFSHRPVQEKFVCLNCGFETHADEQAALNIARSWLFLRSQEYKKYQTNKTSTGNTDKRAFVETWQSFYRKKLKEVWKPAV

SEQ ID NO: 47907 - protein, 979 aa, synthetic construct
  REGION 1..979: note = engineered CasX variant
QEIKRINKIRRRLVKDSNTKKAGKTGPMKTLLVRVMTPDLRERLENLRKKPENIPQPISNTSRANLNKLLTDYTEMKKAILHVYWEEFQKDPVGLMSRVAQPASKKIDQNKLKPEMDEKGNLTTAGFACSQCGQPLFVYKLEQVSEKGKAYTNYFGRCNVAEHEKLILLAQLKPEKDSDEAVTYSLGKFGQRALDFYSIHVTKESTHPVKPLAQIAGNRYASTPVGKALSDACMGTIASFLSKYQDIIIEHQKVVKGNQKRLESLRELAGKENLEYPSVTLPPQPHTKEGVDAYNEVIARVRMWVNLNLWQKLKLSRDDAKPLLRLKGFPSFPLVERQANEVDWWDMVCNVKKLINEKKEDGKVFWQNLAIYKRQEALRPYLSSEEDRKKGKKFARYQLGDLLLHLEKKHGEDWGKVYDEAWERIDKKVEGLSKHIKLEEERRSEDAQSKAALTDWLRAKASFVIEGLKEADKDEFCRCELKLQKWYGDLRGKPFAIEAENSILDISGFSKQYNCAFIWQKDGVKKLNLYLIINYFKGGKLRFKKIKPEAFEANRFYTVINKKSGEIVPMEVNFNFDDPNLIILPLAFGKRQGREFIWNDLLSLETGSLKLANGRVIEKTLYNRRTRQDEPALFVALTFERREVLDSSNIKPMNLIGVDRGENIPAVIALTDPEGCPLSRFKDSLGNPTHILRIGESYKEKQRTIQAKKEVEQRRAGGYSRKYASKAKNLADDMVRNTARDLLYYAVTQDAMLIFENLSRGFGRQGKRTFMAERQYTRMEDWLTAKLAYEGLPSKTYLSKTLAQYTSKTCSNCGFTITSADYDRVLEKLKKTATGWMTTINGKELKVEGQITYYNRYKRQNVVKDLSVELDRLSEESVNNDISSWTKGRSGEALSLLKKRFSHRPVQEKFVCLNCGFETHADEQAALNIARSWLFLRSQEYKKYQTNKTSTGNTDKRAFVETWQSFYRKKLKEVWKPAV

SEQ ID NO: 47908 - protein, 979 aa, synthetic construct
  REGION 1..979: note = engineered CasX variant
QEIKRINKIRRRLVKDSNTKKAGKTGPMKTLLVRVMTPDLRERLENLRKKPENIPQPISNTSRANLNKLLTDYTEMKKAILHVYWEEFQKDPVGLMSRVAQPASKKIDQNKLKPEMDEKGNLTTAGFACSQCGQPLFVYKLEQVSEKGKAYTNYFGRCNVAEHEKLILLAQLKPEKDSDEAVTYSLGKFGQRALDFYSIHVTKESTHPVKPLAQIAGNRYASAPVGKALSDACMGTIASFLSKYQDIIIEHQKVVKGNQKRLESLRELAGKENLEYPSVTLPPQPHTKEGVDAYNEVIARVRMWVNLNLWQKLKLSRDDAKPLLRLKGFPSFPLVERQANEVDWWDMVCNVKKLINEKKEDGKVFWQNLAIYKRQEALRPYLSSEEDRKKGKKFARYQLGDLLLHLEKKHGEDWGKVYDEAWERIDKKVEGLSKHIKLEEERRSEDAQSKAALTDWLRAKASFVIEGLKEADKDEFCRCELKLQKWYGDLRGKPFAIEAENSILDISGFSKQYNCAFIWQKDGVKKLNLYLIINYFKGGKLRFKKIKPEAFEANRFYTVINKKSGEIVPMEVNFNFDDPNLIILPLAFGKRQGREFIWNDLLSLETGSLKLANGRVIEKTLYNRRTRQDEPALFVALTFERREVLDSSNIKPMNLIGVDRGENIPAVIALTDPEGCPLSRFKDSLGNPTHILRIGESYKEKQRTIQAKKEVEQRRAGGYSRKYASKAKNLADDMVRNTARDLLYYAVTQDAMLIFENLSRGFGRQGKRTFMAERQYTRMEDWLTAKLAYEGLPSKTYLSKTLAQYTSKTCSNCGFTITSADYDRVLEKLKKTATGWMTTINGKELKVEGQITYYNRYKRQNVVKDLSVELDRLSEESVNNDISSWTKGRSGEALSLLKKRFSHRPVQEKFVCLNCGFETHADEQAALNIARSWLFLRSQEYKKYQTNKTSTGNTDKRAFVETWQSFYRKKLKEVWKPAV

SEQ ID NO: 47909 - protein, 979 aa, synthetic construct
  REGION 1..979: note = engineered CasX variant
QEIKRINKIRRRLVKDSNTKKAGKTGPMKTLLVRVMTPDLRERLENLRKKPENIPQPISNTSRANLNKLLTDYTEMKKAILHVYWEEFQKDPVGLMSRVAQPASKKIDQNKLKPEMDEKGNLTTAGFACSQCGQPLFVYKLEQVSEKGKAYTNYFGRCNVAEHEKLILLAQLKPEKDSDEAVTYSLGKFGQRALDFYSIHVTKESTHPVKPLAQIAGNRYASVPVGKALSDACMGTIASFLSKYQDIIIEHQKVVKGNQKRLESLRELAGKENLEYPSVTLPPQPHTKEGVDAYNEVIARVRMWVNLNLWQKLKLSRDDAKPLLRLKGFPSFPLVERQANEVDWWDMVCNVKKLINEKKEDGKVFWQNLAIYKRQEALRPYLSSEEDRKKGKKFARYQLGDLLLHLEKKHGEDWGKVYDEAWERIDKKVEGLSKHIKLEEERRSEDAQSKAALTDWLRAKASFVIEGLKEADKDEFCRCELKLQKWYGDLRGKPFAIEAENSILDISGFSKQYNCAFIWQKDGVKKLNLYLIINYFKGGKLRFKKIKPEAFEANRFYTVINKKSGEIVPMEVNFNFDDPNLIILPLAFGKRQGREFIWNDLLSLETGSLKLANGRVIEKTLYNRRTRQDEPALFVALTFERREVLDSSNIKPMNLIGVDRGENIPAVIALTDPEGCPLSRFKDSLGNPTHILRIGESYKEKQRTIQAKKEVEQRRAGGYSRKYASKAKNLADDMVRNTARDLLYYAVTQDAMLIFENLSRGFGRQGKRTFMAERQYTRMEDWLTAKLAYEGLPSKTYLSKTLAQYTSKTCSNCGFTITSADYDRVLEKLKKTATGWMTTINGKELKVEGQITYYNRYKRQNVVKDLSVELDRLSEESVNNDISSWTKGRSGEALSLLKKRFSHRPVQEKFVCLNCGFETHADEQAALNIARSWLFLRSQEYKKYQTNKTSTGNTDKRAFVETWQSFYRKKLKEVWKPAV

SEQ ID NO: 47910 - protein, 979 aa, synthetic construct
  REGION 1..979: note = engineered CasX variant
QEIKRINKIRRRLVKDSNTKKAGKTGPMKTLLVRVMTPDLRERLENLRKKPENIPQPISNTSRANLNKLLTDYTEMKKAILHVYWEEFQKDPVGLMSRVAQPASKKIDQNKLKPEMDEKGNLTTAGFACSQCGQPLFVYKLEQVSEKGKAYTNYFGRCNVAEHEKLIKLAQLKPEKDSDEAVTYSLGKFGQRALDFYSIHVTKESTHPVKPLAQIAGNRYASGPVGKALSDACMGTIASFLSKYQDIIIEHQKVVKGNQKRLESLRELAGKENLEYPSVTLPPQPHTKEGVDAYNEVIARVRMWVNLNLWQKLKLSRDDAKPLLRLKGFPSFPLVERQANEVDWWDMVCNVKKLINEKKEDGKVFWQNLAIYKRQEALRPYLSSEEDRKKGKKFARYQLGDLLLHLEKKHGEDWGKVYDEAWERIDKKVEGLSKHIKLEEERRSEDAQSKAALTDWLRAKASFVIEGLKEADKDEFCRCELKLQKWYGDLRGKPFAIEAENSILDISGFSKQYNCAFIWQKDGVKKLNLYLIINYFKGGKLRFKKIKPEAFEANRFYTVINKKSGEIVPMEVNFNFDDPNLIILPLAFGKRQGREFIWNDLLSLETGSLKLANGRVIEKTLYNRRTRQDEPALFVALTFERREVLDSSNIKPMNLIGVDRGENIPAVIALTDPEGCPLSRFKDSLGNPTHILRIGESYKEKQRTIQAKKEVEQRRAGGYSRKYASKAKNLADDMVRNTARDLLYYAVTQDAMLIFENLSRGFGRQGKRTFMAERQYTRMEDWLTAKLAYEGLPSKTYLSKTLAQYTSKTCSNCGFTITSADYDRVLEKLKKTATGWMTTINGKELKVEGQITYYNRYKRQNVVKDLSVELDRLSEESVNNDISSWTKGRSGEALSLLKKRFSHRPVQEKFVCLNCGFETHADEQAALNIARSWLFLRSQEYKKYQTNKTSTGNTDKRAFVETWQSFYRKKLKEVWKPAV

SEQ ID NO: 47911 - protein, 978 aa, synthetic construct
  REGION 1..978: note = engineered CasX variant
QEIKRINKIRRRLVKDSNTKKAGKTGPMKTLLVRVMTPDLRERLENLRKKPENIPQPISNTSRANLNKLLTDYTEMKKAILHVYWEEFQKDPVGLMSRVAQPASKKIDQNKLKPEMDEKGNLTTAGFACSQCGQPLFVYKLEQVSEKGKAYTNYFGRCNVAEHEKLILLAQLKPEKDSDEAVTYSLGKFGQRALDFYSIHVTKESTHPVKPLAQIAGNRYASPVGKALSDACMGTIASFLSKYQDIIIEHQKVVKGNQKRLESLRELAGKENLEYPSVTLPPQPHTKEGVDAYNEVIARVRMWVNLNLWQKLKLSRDDAKPLLRLKGFPSFPLVERQANEVDWWDMVCNVKKLINEKKEDGKVFWQNLAIYKRQEALRPYLSSEEDRKKGKKFARYQLGDLLLHLEKKHGEDWGKVYDEAWERIDKKVEGLSKHIKLEEERRSEDAQSKAALTDWLRAKASFVIEGLKEADKDEFCRCELKLQKWYGDLRGKPFAIEAENSILDISGFSKQYNCAFIWQKDGVKKLNLYLIINYFKGGKLRFKKIKPEAFEANRFYTVINKKSGEIVPMEVNFNFDDPNLIILPLAFGKRQGREFIWNDLLSLETGSLKLANGRVIEKTLYNRRTRQDEPALFVALTFERREVLDSSNIKPMNLIGVDRGENIPAVIALTDPEGCPLSRFKDSLGNPTHILRIGESYKEKQRTIQAKKEVEQRRAGGYSRKYASKAKNLADDMVRNTARDLLYYAVTQDAMLIFENLSRGFGRQGKRTFMAERQYTRMEDWLTAKLAYEGLPSKTYLSKTLAQYTSKTCSNCGFTITSADYDRVLEKLKKTATGWMTTINGKELKVEGQITYYNRYKRQNVVKDLSVELDRLSEESVNNDISSWTKGRSGEALSLLKKRFSHRPVQEKFVCLNCGFETHADEQAALNIARSWLFLRSQEYKKYQTNKTSTGNTDKRAFVETWQSFYRKKLKEVWKPAV

SEQ ID NO: 47912 - protein, 979 aa, synthetic construct
  REGION 1..979: note = engineered CasX variant
QEIKRINKIRRRLVKDSNTKKAGKTGPMKTLLVRVMTPDLRERLENLRKKPENIPQPISNTSRANLNKLLTDYTEMKKAILHVYWEEFQKDPVGLMSRVAQPASKKIDQNKLKPEMDEKGNLTTAGFACSQCGQPLFVYKLEQVSEKGKAYTNYFGRCNVAEHEKLILLAQLKPEKDSDEAVTYSLGKFGQRALDFYSIHVTKESTHPVKPLAQIAGNRYASYPVGKALSDACMGTIASFLSKYQDIIIEHQKVVKGNQKRLESLRELAGKENLEYPSVTLPPQPHTKEGVDAYNEVIARVRMWVNLNLWQKLKLSRDDAKPLLRLKGFPSFPLVERQANEVDWWDMVCNVKKLINEKKEDGKVFWQNLAGYKRQEALRPYLSSEEDREKGKKFARYQLGDLLLHLEKKHGEDWGKVYDEAWERIDKKVEGLSKHIKLEEERRSEDAQSKAALTDWLRAKASFVIEGLKEADKDEFCRCELKLQKWYGDLRGKPFAIEAENSILDISGFSKQYNCAFIWQKDGVKKLNLYLIINYFKGGKLRFKKIKPEAFEANRFYTVINKKSGEIVPMEVNFNFDDPNLIILPLAFGKRQGREFIWNDLLSLETGSLKLANGRVIEKTLYNRRTRQDEPALFVALTFERREVLDSSNIKPMNLIGVDRGENIPAVIALTDPEGCPLSRFKDSLGNPTHILRIGESYKEKQRTIQAKKEVEQRRAGGYSRKYASKAKNLADDMVRNTARDLLYYAVTQDAMLIFENLSRGFGRQGKRTFMAERQYTRMEDWLTAKLAYEGLPSKTYLSKTLAQYTSKTCSNCGFTITSADYDRVLEKLKKTATGWMTTINGKELKVEGQITYYNRYKRQNVVKDLSVELDRLSEESVNNDISSWTKGRSGEALSLLKKRFSHRPVQEKFVCLNCGFETHADEQAALNIARSWLFLRSQEYKKYQTNKTSTGNTDKRAFVETWQSFYRKKLKEVWKPAV

SEQ ID NO: 47913 - protein, 979 aa, synthetic construct
  REGION 1..979: note = engineered CasX variant
QEIKRINKIRRRLVKDSNTKKAGKTGPMKTLLVRVMTPDLRERLENLRKKPENIPQPISNTSRANLNKLLTDYTEMKKAILHVYWEEFQKDPVGLMSRVAQPASKKIDQNKLKPEMDEKGNLTTAGFACSQCGQPLFVYKLEQVSEKGKAYTNYFGRCNVAEHEKLILLAQLKPEKDSDEAVTYSLGKFGQRALDFYSIHVTKESTHPVKPLAQIAGNRYASHPVGKALSDACMGTIASFLSKYQDIIIEHQKVVKGNQKRLESLRELAGKENLEYPSVTLPPQPHTKEGVDAYNEVIARVRMWVNLNLWQKLKLSRDDAKPLLRLKGFPSFPLVERQANEVDWWDMVCNVKKLINEKKEDGKVFWQNLAGYKRQEALRPYLSSEEDREKGKKFARYQLGDLLLHLEKKHGEDWGKVYDEAWERIDKKVEGLSKHIKLEEERRSEDAQSKAALTDWLRAKASFVIEGLKEADKDEFCRCELKLQKWYGDLRGKPFAIEAENSILDISGFSKQYNCAFIWQKDGVKKLNLYLIINYFKGGKLRFKKIKPEAFEANRFYTVINKKSGEIVPMEVNFNFDDPNLIILPLAFGKRQGREFIWNDLLSLETGSLKLANGRVIEKTLYNRRTRQDEPALFVALTFERREVLDSSNIKPMNLIGVDRGENIPAVIALTDPEGCPLSRFKDSLGNPTHILRIGESYKEKQRTIQAKKEVEQRRAGGYSRKYASKAKNLADDMVRNTARDLLYYAVTQDAMLIFENLSRGFGRQGKRTFMAERQYTRMEDWLTAKLAYEGLPSKTYLSKTLAQYTSKTCSNCGFTITSADYDRVLEKLKKTATGWMTTINGKELKVEGQITYYNRYKRQNVVKDLSVELDRLSEESVNNDISSWTKGRSGEALSLLKKRFSHRPVQEKFVCLNCGFETHADEQAALNIARSWLFLRSQEYKKYQTNKTSTGNTDKRAFVETWQSFYRKKLKEVWKPAV

SEQ ID NO: 47914 - protein, 979 aa, synthetic construct
  REGION 1..979: note = engineered CasX variant
QEIKRINKIRRRLVKDSNTKKAGKTGPMKTLLVRVMTPDLRERLENLRKKPENIPQPISNTSRANLNKLLTDYTEMKKAILHVYWEEFQKDPVGLMSRVAQPASKKIDQNKLKPEMDEKGNLTTAGFACSQCGQPLFVYKLEQVSEKGKAYTNYFGRCNVAEHEKLILLAQLKPEKDSDEAVTYSLGKFGQRALDFYSIHVTKESTHPVKPLAQIAGNRYASSPVGKALSDACMGTIASFLSKYQDIIIEHQKVVKGNQKRLESLRELAGKENLEYPSVTLPPQPHTKEGVDAYNEVIARVRMWVNLNLWQKLKLSRDDAKPLLRLKGFPSFPLVERQANEVDWWDMVCNVKKLINEKKEDGKVFWQNLAGYKRQEALRPYLSSEEDREKGKKFARYQLGDLLLHLEKKHGEDWGKVYDEAWERIDKKVEGLSKHIKLEEERRSEDAQSKAALTDWLRAKASFVIEGLKEADKDEFCRCELKLQKWYGDLRGKPFAIEAENSILDISGFSKQYNCAFIWQKDGVKKLNLYLIINYFKGGKLRFKKIKPEAFEANRFYTVINKKSGEIVPMEVNFNFDDPNLIILPLAFGKRQGREFIWNDLLSLETGSLKLANGRVIEKTLYNRRTRQDEPALFVALTFERREVLDSSNIKPMNLIGVDRGENIPAVIALTDPEGCPLSRFKDSLGNPTHILRIGESYKEKQRTIQAKKEVEQRRAGGYSRKYASKAKNLADDMVRNTARDLLYYAVTQDAMLIFENLSRGFGRQGKRTFMAERQYTRMEDWLTAKLAYEGLPSKTYLSKTLAQYTSKTCSNCGFTITSADYDRVLEKLKKTATGWMTTINGKELKVEGQITYYNRYKRQNVVKDLSVELDRLSEESVNNDISSWTKGRSGEALSLLKKRFSHRPVQEKFVCLNCGFETHADEQAALNIARSWLFLRSQEYKKYQTNKTSTGNTDKRAFVETWQSFYRKKLKEVWKPAV

SEQ ID NO: 47915 - protein, 979 aa, synthetic construct
  REGION 1..979: note = engineered CasX variant
QEIKRINKIRRRLVKDSNTKKAGKTGPMKTLLVRVMTPDLRERLENLRKKPENIPQPISNTSRANLNKLLTDYTEMKKAILHVYWEEFQKDPVGLMSRVAQPASKKIDQNKLKPEMDEKGNLTTAGFACSQCGQPLFVYKLEQVSEKGKAYTNYFGRCNVAEHEKLILLAQLKPEKDSDEAVTYSLGKFGQRALDFYSIHVTKESTHPVKPLAQIAGNRYASTPVGKALSDACMGTIASFLSKYQDIIIEHQKVVKGNQKRLESLRELAGKENLEYPSVTLPPQPHTKEGVDAYNEVIARVRMWVNLNLWQKLKLSRDDAKPLLRLKGFPSFPLVERQANEVDWWDMVCNVKKLINEKKEDGKVFWQNLAGYKRQEALRPYLSSEEDREKGKKFARYQLGDLLLHLEKKHGEDWGKVYDEAWERIDKKVEGLSKHIKLEEERRSEDAQSKAALTDWLRAKASFVIEGLKEADKDEFCRCELKLQKWYGDLRGKPFAIEAENSILDISGFSKQYNCAFIWQKDGVKKLNLYLIINYFKGGKLRFKKIKPEAFEANRFYTVINKKSGEIVPMEVNFNFDDPNLIILPLAFGKRQGREFIWNDLLSLETGSLKLANGRVIEKTLYNRRTRQDEPALFVALTFERREVLDSSNIKPMNLIGVDRGENIPAVIALTDPEGCPLSRFKDSLGNPTHILRIGESYKEKQRTIQAKKEVEQRRAGGYSRKYASKAKNLADDMVRNTARDLLYYAVTQDAMLIFENLSRGFGRQGKRTFMAERQYTRMEDWLTAKLAYEGLPSKTYLSKTLAQYTSKTCSNCGFTITSADYDRVLEKLKKTATGWMTTINGKELKVEGQITYYNRYKRQNVVKDLSVELDRLSEESVNNDISSWTKGRSGEALSLLKKRFSHRPVQEKFVCLNCGFETHADEQAALNIARSWLFLRSQEYKKYQTNKTSTGNTDKRAFVETWQSFYRKKLKEVWKPAV

SEQ ID NO: 47916 - protein, 979 aa, synthetic construct
  REGION 1..979: note = engineered CasX variant
QEIKRINKIRRRLVKDSNTKKAGKTGPMKTLLVRVMTPDLRERLENLRKKPENIPQPISNTSRANLNKLLTDYTEMKKAILHVYWEEFQKDPVGLMSRVAQPASKKIDQNKLKPEMDEKGNLTTAGFACSQCGQPLFVYKLEQVSEKGKAYTNYFGRCNVAEHEKLILLAQLKPEKDSDEAVTYSLGKFGQRALDFYSIHVTKESTHPVKPLAQIAGNRYASAPVGKALSDACMGTIASFLSKYQDIIIEHQKVVKGNQKRLESLRELAGKENLEYPSVTLPPQPHTKEGVDAYNEVIARVRMWVNLNLWQKLKLSRDDAKPLLRLKGFPSFPLVERQANEVDWWDMVCNVKKLINEKKEDGKVFWQNLAGYKRQEALRPYLSSEEDREKGKKFARYQLGDLLLHLEKKHGEDWGKVYDEAWERIDKKVEGLSKHIKLEEERRSEDAQSKAALTDWLRAKASFVIEGLKEADKDEFCRCELKLQKWYGDLRGKPFAIEAENSILDISGFSKQYNCAFIWQKDGVKKLNLYLIINYFKGGKLRFKKIKPEAFEANRFYTVINKKSGEIVPMEVNFNFDDPNLIILPLAFGKRQGREFIWNDLLSLETGSLKLANGRVIEKTLYNRRTRQDEPALFVALTFERREVLDSSNIKPMNLIGVDRGENIPAVIALTDPEGCPLSRFKDSLGNPTHILRIGESYKEKQRTIQAKKEVEQRRAGGYSRKYASKAKNLADDMVRNTARDLLYYAVTQDAMLIFENLSRGFGRQGKRTFMAERQYTRMEDWLTAKLAYEGLPSKTYLSKTLAQYTSKTCSNCGFTITSADYDRVLEKLKKTATGWMTTINGKELKVEGQITYYNRYKRQNVVKDLSVELDRLSEESVNNDISSWTKGRSGEALSLLKKRFSHRPVQEKFVCLNCGFETHADEQAALNIARSWLFLRSQEYKKYQTNKTSTGNTDKRAFVETWQSFYRKKLKEVWKPAV

SEQ ID NO: 47917 - protein, 979 aa, synthetic construct
  REGION 1..979: note = engineered CasX variant
QEIKRINKIRRRLVKDSNTKKAGKTGPMKTLLVRVMTPDLRERLENLRKKPENIPQPISNTSRANLNKLLTDYTEMKKAILHVYWEEFQKDPVGLMSRVAQPASKKIDQNKLKPEMDEKGNLTTAGFACSQCGQPLFVYKLEQVSEKGKAYTNYFGRCNVAEHEKLILLAQLKPEKDSDEAVTYSLGKFGQRALDFYSIHVTKESTHPVKPLAQIAGNRYASVPVGKALSDACMGTIASFLSKYQDIIIEHQKVVKGNQKRLESLRELAGKENLEYPSVTLPPQPHTKEGVDAYNEVIARVRMWVNLNLWQKLKLSRDDAKPLLRLKGFPSFPLVERQANEVDWWDMVCNVKKLINEKKEDGKVFWQNLAGYKRQEALRPYLSSEEDREKGKKFARYQLGDLLLHLEKKHGEDWGKVYDEAWERIDKKVEGLSKHIKLEEERRSEDAQSKAALTDWLRAKASFVIEGLKEADKDEFCRCELKLQKWYGDLRGKPFAIEAENSILDISGFSKQYNCAFIWQKDGVKKLNLYLIINYFKGGKLRFKKIKPEAFEANRFYTVINKKSGEIVPMEVNFNFDDPNLIILPLAFGKRQGREFIWNDLLSLETGSLKLANGRVIEKTLYNRRTRQDEPALFVALTFERREVLDSSNIKPMNLIGVDRGENIPAVIALTDPEGCPLSRFKDSLGNPTHILRIGESYKEKQRTIQAKKEVEQRRAGGYSRKYASKAKNLADDMVRNTARDLLYYAVTQDAMLIFENLSRGFGRQGKRTFMAERQYTRMEDWLTAKLAYEGLPSKTYLSKTLAQYTSKTCSNCGFTITSADYDRVLEKLKKTATGWMTTINGKELKVEGQITYYNRYKRQNVVKDLSVELDRLSEESVNNDISSWTKGRSGEALSLLKKRFSHRPVQEKFVCLNCGFETHADEQAALNIARSWLFLRSQEYKKYQTNKTSTGNTDKRAFVETWQSFYRKKLKEVWKPAV

SEQ ID NO: 47918 - protein, 979 aa, synthetic construct
  REGION 1..979: note = engineered CasX variant
QEIKRINKIRRRLVKDSNTKKAGKTGPMKTLLVRVMTPDLRERLENLRKKPENIPQPISNTSRANLNKLLTDYTEMKKAILHVYWEEFQKDPVGLMSRVAQPASKKIDQNKLKPEMDEKGNLTTAGFACSQCGQPLFVYKLEQVSEKGKAYTNYFGRCNVAEHEKLIKLAQLKPEKDSDEAVTYSLGKFGQRALDFYSIHVTKESTHPVKPLAQIAGNRYASGPVGKALSDACMGTIASFLSKYQDIIIEHQKVVKGNQKRLESLRELAGKENLEYPSVTLPPQPHTKEGVDAYNEVIARVRMWVNLNLWQKLKLSRDDAKPLLRLKGFPSFPLVERQANEVDWWDMVCNVKKLINEKKEDGKVFWQNLAGYKRQEALRPYLSSEEDREKGKKFARYQLGDLLLHLEKKHGEDWGKVYDEAWERIDKKVEGLSKHIKLEEERRSEDAQSKAALTDWLRAKASFVIEGLKEADKDEFCRCELKLQKWYGDLRGKPFAIEAENSILDISGFSKQYNCAFIWQKDGVKKLNLYLIINYFKGGKLRFKKIKPEAFEANRFYTVINKKSGEIVPMEVNFNFDDPNLIILPLAFGKRQGREFIWNDLLSLETGSLKLANGRVIEKTLYNRRTRQDEPALFVALTFERREVLDSSNIKPMNLIGVDRGENIPAVIALTDPEGCPLSRFKDSLGNPTHILRIGESYKEKQRTIQAKKEVEQRRAGGYSRKYASKAKNLADDMVRNTARDLLYYAVTQDAMLIFENLSRGFGRQGKRTFMAERQYTRMEDWLTAKLAYEGLPSKTYLSKTLAQYTSKTCSNCGFTITSADYDRVLEKLKKTATGWMTTINGKELKVEGQITYYNRYKRQNVVKDLSVELDRLSEESVNNDISSWTKGRSGEALSLLKKRFSHRPVQEKFVCLNCGFETHADEQAALNIARSWLFLRSQEYKKYQTNKTSTGNTDKRAFVETWQSFYRKKLKEVWKPAV

SEQ ID NO: 47919 - protein, 978 aa, synthetic construct
  REGION 1..978: note = engineered CasX variant
QEIKRINKIRRRLVKDSNTKKAGKTGPMKTLLVRVMTPDLRERLENLRKKPENIPQPISNTSRANLNKLLTDYTEMKKAILHVYWEEFQKDPVGLMSRVAQPASKKIDQNKLKPEMDEKGNLTTAGFACSQCGQPLFVYKLEQVSEKGKAYTNYFGRCNVAEHEKLILLAQLKPEKDSDEAVTYSLGKFGQRALDFYSIHVTKESTHPVKPLAQIAGNRYASPVGKALSDACMGTIASFLSKYQDIIIEHQKVVKGNQKRLESLRELAGKENLEYPSVTLPPQPHTKEGVDAYNEVIARVRMWVNLNLWQKLKLSRDDAKPLLRLKGFPSFPLVERQANEVDWWDMVCNVKKLINEKKEDGKVFWQNLAGYKRQEALRPYLSSEEDREKGKKFARYQLGDLLLHLEKKHGEDWGKVYDEAWERIDKKVEGLSKHIKLEEERRSEDAQSKAALTDWLRAKASFVIEGLKEADKDEFCRCELKLQKWYGDLRGKPFAIEAENSILDISGFSKQYNCAFIWQKDGVKKLNLYLIINYFKGGKLRFKKIKPEAFEANRFYTVINKKSGEIVPMEVNFNFDDPNLIILPLAFGKRQGREFIWNDLLSLETGSLKLANGRVIEKTLYNRRTRQDEPALFVALTFERREVLDSSNIKPMNLIGVDRGENIPAVIALTDPEGCPLSRFKDSLGNPTHILRIGESYKEKQRTIQAKKEVEQRRAGGYSRKYASKAKNLADDMVRNTARDLLYYAVTQDAMLIFENLSRGFGRQGKRTFMAERQYTRMEDWLTAKLAYEGLPSKTYLSKTLAQYTSKTCSNCGFTITSADYDRVLEKLKKTATGWMTTINGKELKVEGQITYYNRYKRQNVVKDLSVELDRLSEESVNNDISSWTKGRSGEALSLLKKRFSHRPVQEKFVCLNCGFETHADEQAALNIARSWLFLRSQEYKKYQTNKTSTGNTDKRAFVETWQSFYRKKLKEVWKPAV

SEQ ID NO: 47920 - protein, 979 aa, synthetic construct
  REGION 1..979: note = engineered CasX variant
QEIKRINKIRRRLVKDSNTKKAGKTGPMKTLLVRVMTPDLRERLENLRKKPENIPQPISNTSRANLNKLLTDYTEMKKAILHVYWEEFQKDPVGLMSRVAQPASKKIDQNKLKPEMDEKGNLTTAGFACSQCGQPLFVYKLEQVSEKGKAYTNYFGRCNVAEHEKLILLAQLKPEKDSDEAVTYSLGKFGQRALDFYSIHVTKESTHPVKPLAQIAGNRYASYPVGKALSDACMGTIASFLSKYQDIIIEHQKVVKGNQKRLESLRELAGKENLEYPSVTLPPQPHTKEGVDAYNEVIARVRMWVNLNLWQKLKLSRDDAKPLLRLKGFPSFPLVERQANEVDWWDMVCNVKKLINEKKEDGKVFWQNLAGYKRQEALRPYLSSEEDRKKGKKFARYQLGDLLLHLEKKHGEDWGKVYDEAWERIDKKVEGLSKHIKLEEERRSEDAQSKAALTDWLRAKASFVIEGLKEADKDEFCRCELKLQKWYGDLRGKPFAIEAENSILDISGFSKQYNCAFIWQKDGVKKLNLYLIINYFKGGKLRFKKIKPEAFEANRFYTVINKKSGEIVIMEVNFNFDDPNLIILPLAFGKRQGREFIWNDLLSLETGSLKLANGRVIEKTLYNRRTRQDEPALFVALTFERREVLDSSNIKPMNLIGVDRGENIPAVIALTDPEGCPLSRFKDSLGNPTHILRIGESYKEKQRTIQAKKEVEQRRAGGYSRKYASKAKNLADDMVRNTARDLLYYAVTQDAMLIFENLSRGFGRQGKRTFMAERQYTRMEDWLTAKLAYEGLPSKTYLSKTLAQYTSKTCSNCGFTITSADYDRVLEKLKKTATGWMTTINGKELKVEGQITYYNRYKRQNVVKDLSVELDRLSEESVNNDISSWTKGRSGEALSLLKKRFSHRPVQEKFVCLNCGFETHADEQAALNIARSWLFLRSQEYKKYQTNKTSTGNTDKRAFVETWQSFYRKKLKEVWKPAV

SEQ ID NO: 47921 - protein, 979 aa, synthetic construct
  REGION 1..979: note = engineered CasX variant
QEIKRINKIRRRLVKDSNTKKAGKTGPMKTLLVRVMTPDLRERLENLRKKPENIPQPISNTSRANLNKLLTDYTEMKKAILHVYWEEFQKDPVGLMSRVAQPASKKIDQNKLKPEMDEKGNLTTAGFACSQCGQPLFVYKLEQVSEKGKAYTNYFGRCNVAEHEKLILLAQLKPEKDSDEAVTYSLGKFGQRALDFYSIHVTKESTHPVKPLAQIAGNRYASHPVGKALSDACMGTIASFLSKYQDIIIEHQKVVKGNQKRLESLRELAGKENLEYPSVTLPPQPHTKEGVDAYNEVIARVRMWVNLNLWQKLKLSRDDAKPLLRLKGFPSFPLVERQANEVDWWDMVCNVKKLINEKKEDGKVFWQNLAGYKRQEALRPYLSSEEDRKKGKKFARYQLGDLLLHLEKKHGEDWGKVYDEAWERIDKKVEGLSKHIKLEEERRSEDAQSKAALTDWLRAKASFVIEGLKEADKDEFCRCELKLQKWYGDLRGKPFAIEAENSILDISGFSKQYNCAFIWQKDGVKKLNLYLIINYFKGGKLRFKKIKPEAFEANRFYTVINKKSGEIVIMEVNFNFDDPNLIILPLAFGKRQGREFIWNDLLSLETGSLKLANGRVIEKTLYNRRTRQDEPALFVALTFERREVLDSSNIKPMNLIGVDRGENIPAVIALTDPEGCPLSRFKDSLGNPTHILRIGESYKEKQRTIQAKKEVEQRRAGGYSRKYASKAKNLADDMVRNTARDLLYYAVTQDAMLIFENLSRGFGRQGKRTFMAERQYTRMEDWLTAKLAYEGLPSKTYLSKTLAQYTSKTCSNCGFTITSADYDRVLEKLKKTATGWMTTINGKELKVEGQITYYNRYKRQNVVKDLSVELDRLSEESVNNDISSWTKGRSGEALSLLKKRFSHRPVQEKFVCLNCGFETHADEQAALNIARSWLFLRSQEYKKYQTNKTSTGNTDKRAFVETWQSFYRKKLKEVWKPAV

SEQ ID NO: 47922 - protein, 979 aa, synthetic construct
  REGION 1..979: note = engineered CasX variant
QEIKRINKIRRRLVKDSNTKKAGKTGPMKTLLVRVMTPDLRERLENLRKKPENIPQPISNTSRANLNKLLTDYTEMKKAILHVYWEEFQKDPVGLMSRVAQPASKKIDQNKLKPEMDEKGNLTTAGFACSQCGQPLFVYKLEQVSEKGKAYTNYFGRCNVAEHEKLILLAQLKPEKDSDEAVTYSLGKFGQRALDFYSIHVTKESTHPVKPLAQIAGNRYASSPVGKALSDACMGTIASFLSKYQDIIIEHQKVVKGNQKRLESLRELAGKENLEYPSVTLPPQPHTKEGVDAYNEVIARVRMWVNLNLWQKLKLSRDDAKPLLRLKGFPSFPLVERQANEVDWWDMVCNVKKLINEKKEDGKVFWQNLAGYKRQEALRPYLSSEEDRKKGKKFARYQLGDLLLHLEKKHGEDWGKVYDEAWERIDKKVEGLSKHIKLEEERRSEDAQSKAALTDWLRAKASFVIEGLKEADKDEFCRCELKLQKWYGDLRGKPFAIEAENSILDISGFSKQYNCAFIWQKDGVKKLNLYLIINYFKGGKLRFKKIKPEAFEANRFYTVINKKSGEIVIMEVNFNFDDPNLIILPLAFGKRQGREFIWNDLLSLETGSLKLANGRVIEKTLYNRRTRQDEPALFVALTFERREVLDSSNIKPMNLIGVDRGENIPAVIALTDPEGCPLSRFKDSLGNPTHILRIGESYKEKQRTIQAKKEVEQRRAGGYSRKYASKAKNLADDMVRNTARDLLYYAVTQDAMLIFENLSRGFGRQGKRTFMAERQYTRMEDWLTAKLAYEGLPSKTYLSKTLAQYTSKTCSNCGFTITSADYDRVLEKLKKTATGWMTTINGKELKVEGQITYYNRYKRQNVVKDLSVELDRLSEESVNNDISSWTKGRSGEALSLLKKRFSHRPVQEKFVCLNCGFETHADEQAALNIARSWLFLRSQEYKKYQTNKTSTGNTDKRAFVETWQSFYRKKLKEVWKPAV

SEQ ID NO: 47923 - protein, 979 aa, synthetic construct
  REGION 1..979: note = engineered CasX variant
QEIKRINKIRRRLVKDSNTKKAGKTGPMKTLLVRVMTPDLRERLENLRKKPENIPQPISNTSRANLNKLLTDYTEMKKAILHVYWEEFQKDPVGLMSRVAQPASKKIDQNKLKPEMDEKGNLTTAGFACSQCGQPLFVYKLEQVSEKGKAYTNYFGRCNVAEHEKLILLAQLKPEKDSDEAVTYSLGKFGQRALDFYSIHVTKESTHPVKPLAQIAGNRYASTPVGKALSDACMGTIASFLSKYQDIIIEHQKVVKGNQKRLESLRELAGKENLEYPSVTLPPQPHTKEGVDAYNEVIARVRMWVNLNLWQKLKLSRDDAKPLLRLKGFPSFPLVERQANEVDWWDMVCNVKKLINEKKEDGKVFWQNLAGYKRQEALRPYLSSEEDRKKGKKFARYQLGDLLLHLEKKHGEDWGKVYDEAWERIDKKVEGLSKHIKLEEERRSEDAQSKAALTDWLRAKASFVIEGLKEADKDEFCRCELKLQKWYGDLRGKPFAIEAENSILDISGFSKQYNCAFIWQKDGVKKLNLYLIINYFKGGKLRFKKIKPEAFEANRFYTVINKKSGEIVIMEVNFNFDDPNLIILPLAFGKRQGREFIWNDLLSLETGSLKLANGRVIEKTLYNRRTRQDEPALFVALTFERREVLDSSNIKPMNLIGVDRGENIPAVIALTDPEGCPLSRFKDSLGNPTHILRIGESYKEKQRTIQAKKEVEQRRAGGYSRKYASKAKNLADDMVRNTARDLLYYAVTQDAMLIFENLSRGFGRQGKRTFMAERQYTRMEDWLTAKLAYEGLPSKTYLSKTLAQYTSKTCSNCGFTITSADYDRVLEKLKKTATGWMTTINGKELKVEGQITYYNRYKRQNVVKDLSVELDRLSEESVNNDISSWTKGRSGEALSLLKKRFSHRPVQEKFVCLNCGFETHADEQAALNIARSWLFLRSQEYKKYQTNKTSTGNTDKRAFVETWQSFYRKKLKEVWKPAV

SEQ ID NO: 47924 - protein, 979 aa, synthetic construct
  REGION 1..979: note = engineered CasX variant
QEIKRINKIRRRLVKDSNTKKAGKTGPMKTLLVRVMTPDLRERLENLRKKPENIPQPISNTSRANLNKLLTDYTEMKKAILHVYWEEFQKDPVGLMSRVAQPASKKIDQNKLKPEMDEKGNLTTAGFACSQCGQPLFVYKLEQVSEKGKAYTNYFGRCNVAEHEKLILLAQLKPEKDSDEAVTYSLGKFGQRALDFYSIHVTKESTHPVKPLAQIAGNRYASAPVGKALSDACMGTIASFLSKYQDIIIEHQKVVKGNQKRLESLRELAGKENLEYPSVTLPPQPHTKEGVDAYNEVIARVRMWVNLNLWQKLKLSRDDAKPLLRLKGFPSFPLVERQANEVDWWDMVCNVKKLINEKKEDGKVFWQNLAGYKRQEALRPYLSSEEDRKKGKKFARYQLGDLLLHLEKKHGEDWGKVYDEAWERIDKKVEGLSKHIKLEEERRSEDAQSKAALTDWLRAKASFVIEGLKEADKDEFCRCELKLQKWYGDLRGKPFAIEAENSILDISGFSKQYNCAFIWQKDGVKKLNLYLIINYFKGGKLRFKKIKPEAFEANRFYTVINKKSGEIVIMEVNFNFDDPNLIILPLAFGKRQGREFIWNDLLSLETGSLKLANGRVIEKTLYNRRTRQDEPALFVALTFERREVLDSSNIKPMNLIGVDRGENIPAVIALTDPEGCPLSRFKDSLGNPTHILRIGESYKEKQRTIQAKKEVEQRRAGGYSRKYASKAKNLADDMVRNTARDLLYYAVTQDAMLIFENLSRGFGRQGKRTFMAERQYTRMEDWLTAKLAYEGLPSKTYLSKTLAQYTSKTCSNCGFTITSADYDRVLEKLKKTATGWMTTINGKELKVEGQITYYNRYKRQNVVKDLSVELDRLSEESVNNDISSWTKGRSGEALSLLKKRFSHRPVQEKFVCLNCGFETHADEQAALNIARSWLFLRSQEYKKYQTNKTSTGNTDKRAFVETWQSFYRKKLKEVWKPAV

SEQ ID NO: 47925 - protein, 979 aa, synthetic construct
  REGION 1..979: note = engineered CasX variant
QEIKRINKIRRRLVKDSNTKKAGKTGPMKTLLVRVMTPDLRERLENLRKKPENIPQPISNTSRANLNKLLTDYTEMKKAILHVYWEEFQKDPVGLMSRVAQPASKKIDQNKLKPEMDEKGNLTTAGFACSQCGQPLFVYKLEQVSEKGKAYTNYFGRCNVAEHEKLILLAQLKPEKDSDEAVTYSLGKFGQRALDFYSIHVTKESTHPVKPLAQIAGNRYASVPVGKALSDACMGTIASFLSKYQDIIIEHQKVVKGNQKRLESLRELAGKENLEYPSVTLPPQPHTKEGVDAYNEVIARVRMWVNLNLWQKLKLSRDDAKPLLRLKGFPSFPLVERQANEVDWWDMVCNVKKLINEKKEDGKVFWQNLAGYKRQEALRPYLSSEEDRKKGKKFARYQLGDLLLHLEKKHGEDWGKVYDEAWERIDKKVEGLSKHIKLEEERRSEDAQSKAALTDWLRAKASFVIEGLKEADKDEFCRCELKLQKWYGDLRGKPFAIEAENSILDISGFSKQYNCAFIWQKDGVKKLNLYLIINYFKGGKLRFKKIKPEAFEANRFYTVINKKSGEIVIMEVNFNFDDPNLIILPLAFGKRQGREFIWNDLLSLETGSLKLANGRVIEKTLYNRRTRQDEPALFVALTFERREVLDSSNIKPMNLIGVDRGENIPAVIALTDPEGCPLSRFKDSLGNPTHILRIGESYKEKQRTIQAKKEVEQRRAGGYSRKYASKAKNLADDMVRNTARDLLYYAVTQDAMLIFENLSRGFGRQGKRTFMAERQYTRMEDWLTAKLAYEGLPSKTYLSKTLAQYTSKTCSNCGFTITSADYDRVLEKLKKTATGWMTTINGKELKVEGQITYYNRYKRQNVVKDLSVELDRLSEESVNNDISSWTKGRSGEALSLLKKRFSHRPVQEKFVCLNCGFETHADEQAALNIARSWLFLRSQEYKKYQTNKTSTGNTDKRAFVETWQSFYRKKLKEVWKPAV

SEQ ID NO: 47926 - protein, 979 aa, synthetic construct
  REGION 1..979: note = engineered CasX variant
QEIKRINKIRRRLVKDSNTKKAGKTGPMKTLLVRVMTPDLRERLENLRKKPENIPQPISNTSRANLNKLLTDYTEMKKAILHVYWEEFQKDPVGLMSRVAQPASKKIDQNKLKPEMDEKGNLTTAGFACSQCGQPLFVYKLEQVSEKGKAYTNYFGRCNVAEHEKLIKLAQLKPEKDSDEAVTYSLGKFGQRALDFYSIHVTKESTHPVKPLAQIAGNRYASGPVGKALSDACMGTIASFLSKYQDIIIEHQKVVKGNQKRLESLRELAGKENLEYPSVTLPPQPHTKEGVDAYNEVIARVRMWVNLNLWQKLKLSRDDAKPLLRLKGFPSFPLVERQANEVDWWDMVCNVKKLINEKKEDGKVFWQNLAGYKRQEALRPYLSSEEDRKKGKKFARYQLGDLLLHLEKKHGEDWGKVYDEAWERIDKKVEGLSKHIKLEEERRSEDAQSKAALTDWLRAKASFVIEGLKEADKDEFCRCELKLQKWYGDLRGKPFAIEAENSILDISGFSKQYNCAFIWQKDGVKKLNLYLIINYFKGGKLRFKKIKPEAFEANRFYTVINKKSGEIVIMEVNFNFDDPNLIILPLAFGKRQGREFIWNDLLSLETGSLKLANGRVIEKTLYNRRTRQDEPALFVALTFERREVLDSSNIKPMNLIGVDRGENIPAVIALTDPEGCPLSRFKDSLGNPTHILRIGESYKEKQRTIQAKKEVEQRRAGGYSRKYASKAKNLADDMVRNTARDLLYYAVTQDAMLIFENLSRGFGRQGKRTFMAERQYTRMEDWLTAKLAYEGLPSKTYLSKTLAQYTSKTCSNCGFTITSADYDRVLEKLKKTATGWMTTINGKELKVEGQITYYNRYKRQNVVKDLSVELDRLSEESVNNDISSWTKGRSGEALSLLKKRFSHRPVQEKFVCLNCGFETHADEQAALNIARSWLFLRSQEYKKYQTNKTSTGNTDKRAFVETWQSFYRKKLKEVWKPAV

SEQ ID NO: 47927 - protein, 978 aa, synthetic construct
  REGION 1..978: note = engineered CasX variant
QEIKRINKIRRRLVKDSNTKKAGKTGPMKTLLVRVMTPDLRERLENLRKKPENIPQPISNTSRANLNKLLTDYTEMKKAILHVYWEEFQKDPVGLMSRVAQPASKKIDQNKLKPEMDEKGNLTTAGFACSQCGQPLFVYKLEQVSEKGKAYTNYFGRCNVAEHEKLILLAQLKPEKDSDEAVTYSLGKFGQRALDFYSIHVTKESTHPVKPLAQIAGNRYASPVGKALSDACMGTIASFLSKYQDIIIEHQKVVKGNQKRLESLRELAGKENLEYPSVTLPPQPHTKEGVDAYNEVIARVRMWVNLNLWQKLKLSRDDAKPLLRLKGFPSFPLVERQANEVDWWDMVCNVKKLINEKKEDGKVFWQNLAGYKRQEALRPYLSSEEDRKKGKKFARYQLGDLLLHLEKKHGEDWGKVYDEAWERIDKKVEGLSKHIKLEEERRSEDAQSKAALTDWLRAKASFVIEGLKEADKDEFCRCELKLQKWYGDLRGKPFAIEAENSILDISGFSKQYNCAFIWQKDGVKKLNLYLIINYFKGGKLRFKKIKPEAFEANRFYTVINKKSGEIVIMEVNFNFDDPNLIILPLAFGKRQGREFIWNDLLSLETGSLKLANGRVIEKTLYNRRTRQDEPALFVALTFERREVLDSSNIKPMNLIGVDRGENIPAVIALTDPEGCPLSRFKDSLGNPTHILRIGESYKEKQRTIQAKKEVEQRRAGGYSRKYASKAKNLADDMVRNTARDLLYYAVTQDAMLIFENLSRGFGRQGKRTFMAERQYTRMEDWLTAKLAYEGLPSKTYLSKTLAQYTSKTCSNCGFTITSADYDRVLEKLKKTATGWMTTINGKELKVEGQITYYNRYKRQNVVKDLSVELDRLSEESVNNDISSWTKGRSGEALSLLKKRFSHRPVQEKFVCLNCGFETHADEQAALNIARSWLFLRSQEYKKYQTNKTSTGNTDKRAFVETWQSFYRKKLKEVWKPAV

SEQ ID NO: 47928 - protein, 979 aa, synthetic construct
  REGION 1..979: note = engineered CasX variant
QEIKRINKIRRRLVKDSNTKKAGKTGPMKTLLVRVMTPDLRERLENLRKKPENIPQPISNTSRANLNKLLTDYTEMKKAILHVYWEEFQKDPVGLMSRVAQPASKKIDQNKLKPEMDEKGNLTTAGFACSQCGQPLFVYKLEQVSEKGKAYTNYFGRCNVAEHEKLILLAQLKPEKDSDEAVTYSLGKFGQRALDFYSIHVTKESTHPVKPLAQIAGNRYASYPVGKALSGACMGTIASFLSKYQDIIIEHQKVVKGNQKRLESLRELAGKENLEYPSVTLPPQPHTKEGVDAYNEVIARVRMWVNLNLWQKLKLSRDDAKPLLRLKGFPSFPLVERQANEVDWWDMVCNVKKLINEKKEDGKVFWQNLAGYKRQEALRPYLSSEEDRKKGKKFARYQLGDLLLHLEKKHGEDWGKVYDEAWERIDKKVEGLSKHIKLEEERRSEDAQSKAALTDWLRAKASFVIEGLKEADKDEFCRCELKLQKWYGDLRGKPFAIEAENSILDISGFSKQYNCAFIWQKDGVKKLNLYLIINYFKGGKLRFKKIKPEAFEANRFYTVINKKSGEIVPMEVNFNFDDPNLIILPLAFGKRQGREFIWNDLLSLETGSLKLANGRVIEKTLYNRRTRQDEPALFVALTFERREVLDSSNIKPMNLIGVDRGENIPAVIALTDPEGCPLSRFKDSLGNPTHILRIGESYKEKQRTIQAKKEVEQRRAGGYSRKYASKAKNLADDMVRNTARDLLYYAVTQDAMLIFENLSRGFGRQGKRTFMAERQYTRMEDWLTAKLAYEGLPSKTYLSKTLAQYTSKTCSNCGFTITSADYDRVLEKLKKTATGWMTTINGKELKVEGQITYYNRYKRQNVVKDLSVELDRLSEESVNNDISSWTKGRSGEALSLLKKRFSHRPVQEKFVCLNCGFETHADEQAALNIARSWLFLRSQEYKKYQTNKTTGKNTDKRAFVETWQSFYRKKLKEVWKPAV

SEQ ID NO: 47929 - protein, 979 aa, synthetic construct
  REGION 1..979: note = engineered CasX variant
QEIKRINKIRRRLVKDSNTKKAGKTGPMKTLLVRVMTPDLRERLENLRKKPENIPQPISNTSRANLNKLLTDYTEMKKAILHVYWEEFQKDPVGLMSRVAQPASKKIDQNKLKPEMDEKGNLTTAGFACSQCGQPLFVYKLEQVSEKGKAYTNYFGRCNVAEHEKLILLAQLKPEKDSDEAVTYSLGKFGQRALDFYSIHVTKESTHPVKPLAQIAGNRYASHPVGKALSGACMGTIASFLSKYQDIIIEHQKVVKGNQKRLESLRELAGKENLEYPSVTLPPQPHTKEGVDAYNEVIARVRMWVNLNLWQKLKLSRDDAKPLLRLKGFPSFPLVERQANEVDWWDMVCNVKKLINEKKEDGKVFWQNLAGYKRQEALRPYLSSEEDRKKGKKFARYQLGDLLLHLEKKHGEDWGKVYDEAWERIDKKVEGLSKHIKLEEERRSEDAQSKAALTDWLRAKASFVIEGLKEADKDEFCRCELKLQKWYGDLRGKPFAIEAENSILDISGFSKQYNCAFIWQKDGVKKLNLYLIINYFKGGKLRFKKIKPEAFEANRFYTVINKKSGEIVPMEVNFNFDDPNLIILPLAFGKRQGREFIWNDLLSLETGSLKLANGRVIEKTLYNRRTRQDEPALFVALTFERREVLDSSNIKPMNLIGVDRGENIPAVIALTDPEGCPLSRFKDSLGNPTHILRIGESYKEKQRTIQAKKEVEQRRAGGYSRKYASKAKNLADDMVRNTARDLLYYAVTQDAMLIFENLSRGFGRQGKRTFMAERQYTRMEDWLTAKLAYEGLPSKTYLSKTLAQYTSKTCSNCGFTITSADYDRVLEKLKKTATGWMTTINGKELKVEGQITYYNRYKRQNVVKDLSVELDRLSEESVNNDISSWTKGRSGEALSLLKKRFSHRPVQEKFVCLNCGFETHADEQAALNIARSWLFLRSQEYKKYQTNKTTGKNTDKRAFVETWQSFYRKKLKEVWKPAV

SEQ ID NO: 47930 - protein, 979 aa, synthetic construct
  REGION 1..979: note = engineered CasX variant
QEIKRINKIRRRLVKDSNTKKAGKTGPMKTLLVRVMTPDLRERLENLRKKPENIPQPISNTSRANLNKLLTDYTEMKKAILHVYWEEFQKDPVGLMSRVAQPASKKIDQNKLKPEMDEKGNLTTAGFACSQCGQPLFVYKLEQVSEKGKAYTNYFGRCNVAEHEKLILLAQLKPEKDSDEAVTYSLGKFGQRALDFYSIHVTKESTHPVKPLAQIAGNRYASSPVGKALSGACMGTIASFLSKYQDIIIEHQKVVKGNQKRLESLRELAGKENLEYPSVTLPPQPHTKEGVDAYNEVIARVRMWVNLNLWQKLKLSRDDAKPLLRLKGFPSFPLVERQANEVDWWDMVCNVKKLINEKKEDGKVFWQNLAGYKRQEALRPYLSSEEDRKKGKKFARYQLGDLLLHLEKKHGEDWGKVYDEAWERIDKKVEGLSKHIKLEEERRSEDAQSKAALTDWLRAKASFVIEGLKEADKDEFCRCELKLQKWYGDLRGKPFAIEAENSILDISGFSKQYNCAFIWQKDGVKKLNLYLIINYFKGGKLRFKKIKPEAFEANRFYTVINKKSGEIVPMEVNFNFDDPNLIILPLAFGKRQGREFIWNDLLSLETGSLKLANGRVIEKTLYNRRTRQDEPALFVALTFERREVLDSSNIKPMNLIGVDRGENIPAVIALTDPEGCPLSRFKDSLGNPTHILRIGESYKEKQRTIQAKKEVEQRRAGGYSRKYASKAKNLADDMVRNTARDLLYYAVTQDAMLIFENLSRGFGRQGKRTFMAERQYTRMEDWLTAKLAYEGLPSKTYLSKTLAQYTSKTCSNCGFTITSADYDRVLEKLKKTATGWMTTINGKELKVEGQITYYNRYKRQNVVKDLSVELDRLSEESVNNDISSWTKGRSGEALSLLKKRFSHRPVQEKFVCLNCGFETHADEQAALNIARSWLFLRSQEYKKYQTNKTTGKNTDKRAFVETWQSFYRKKLKEVWKPAV

SEQ ID NO: 47931 - protein, 979 aa, synthetic construct
  REGION 1..979: note = engineered CasX variant
QEIKRINKIRRRLVKDSNTKKAGKTGPMKTLLVRVMTPDLRERLENLRKKPENIPQPISNTSRANLNKLLTDYTEMKKAILHVYWEEFQKDPVGLMSRVAQPASKKIDQNKLKPEMDEKGNLTTAGFACSQCGQPLFVYKLEQVSEKGKAYTNYFGRCNVAEHEKLILLAQLKPEKDSDEAVTYSLGKFGQRALDFYSIHVTKESTHPVKPLAQIAGNRYASTPVGKALSGACMGTIASFLSKYQDIIIEHQKVVKGNQKRLESLRELAGKENLEYPSVTLPPQPHTKEGVDAYNEVIARVRMWVNLNLWQKLKLSRDDAKPLLRLKGFPSFPLVERQANEVDWWDMVCNVKKLINEKKEDGKVFWQNLAGYKRQEALRPYLSSEEDRKKGKKFARYQLGDLLLHLEKKHGEDWGKVYDEAWERIDKKVEGLSKHIKLEEERRSEDAQSKAALTDWLRAKASFVIEGLKEADKDEFCRCELKLQKWYGDLRGKPFAIEAENSILDISGFSKQYNCAFIWQKDGVKKLNLYLIINYFKGGKLRFKKIKPEAFEANRFYTVINKKSGEIVPMEVNFNFDDPNLIILPLAFGKRQGREFIWNDLLSLETGSLKLANGRVIEKTLYNRRTRQDEPALFVALTFERREVLDSSNIKPMNLIGVDRGENIPAVIALTDPEGCPLSRFKDSLGNPTHILRIGESYKEKQRTIQAKKEVEQRRAGGYSRKYASKAKNLADDMVRNTARDLLYYAVTQDAMLIFENLSRGFGRQGKRTFMAERQYTRMEDWLTAKLAYEGLPSKTYLSKTLAQYTSKTCSNCGFTITSADYDRVLEKLKKTATGWMTTINGKELKVEGQITYYNRYKRQNVVKDLSVELDRLSEESVNNDISSWTKGRSGEALSLLKKRFSHRPVQEKFVCLNCGFETHADEQAALNIARSWLFLRSQEYKKYQTNKTTGKNTDKRAFVETWQSFYRKKLKEVWKPAV

SEQ ID NO: 47932 - protein, 979 aa, synthetic construct
  REGION 1..979: note = engineered CasX variant
QEIKRINKIRRRLVKDSNTKKAGKTGPMKTLLVRVMTPDLRERLENLRKKPENIPQPISNTSRANLNKLLTDYTEMKKAILHVYWEEFQKDPVGLMSRVAQPASKKIDQNKLKPEMDEKGNLTTAGFACSQCGQPLFVYKLEQVSEKGKAYTNYFGRCNVAEHEKLILLAQLKPEKDSDEAVTYSLGKFGQRALDFYSIHVTKESTHPVKPLAQIAGNRYASAPVGKALSGACMGTIASFLSKYQDIIIEHQKVVKGNQKRLESLRELAGKENLEYPSVTLPPQPHTKEGVDAYNEVIARVRMWVNLNLWQKLKLSRDDAKPLLRLKGFPSFPLVERQANEVDWWDMVCNVKKLINEKKEDGKVFWQNLAGYKRQEALRPYLSSEEDRKKGKKFARYQLGDLLLHLEKKHGEDWGKVYDEAWERIDKKVEGLSKHIKLEEERRSEDAQSKAALTDWLRAKASFVIEGLKEADKDEFCRCELKLQKWYGDLRGKPFAIEAENSILDISGFSKQYNCAFIWQKDGVKKLNLYLIINYFKGGKLRFKKIKPEAFEANRFYTVINKKSGEIVPMEVNFNFDDPNLIILPLAFGKRQGREFIWNDLLSLETGSLKLANGRVIEKTLYNRRTRQDEPALFVALTFERREVLDSSNIKPMNLIGVDRGENIPAVIALTDPEGCPLSRFKDSLGNPTHILRIGESYKEKQRTIQAKKEVEQRRAGGYSRKYASKAKNLADDMVRNTARDLLYYAVTQDAMLIFENLSRGFGRQGKRTFMAERQYTRMEDWLTAKLAYEGLPSKTYLSKTLAQYTSKTCSNCGFTITSADYDRVLEKLKKTATGWMTTINGKELKVEGQITYYNRYKRQNVVKDLSVELDRLSEESVNNDISSWTKGRSGEALSLLKKRFSHRPVQEKFVCLNCGFETHADEQAALNIARSWLFLRSQEYKKYQTNKTTGKNTDKRAFVETWQSFYRKKLKEVWKPAV

SEQ ID NO: 47933 - protein, 979 aa, synthetic construct
  REGION 1..979: note = engineered CasX variant
QEIKRINKIRRRLVKDSNTKKAGKTGPMKTLLVRVMTPDLRERLENLRKKPENIPQPISNTSRANLNKLLTDYTEMKKAILHVYWEEFQKDPVGLMSRVAQPASKKIDQNKLKPEMDEKGNLTTAGFACSQCGQPLFVYKLEQVSEKGKAYTNYFGRCNVAEHEKLILLAQLKPEKDSDEAVTYSLGKFGQRALDFYSIHVTKESTHPVKPLAQIAGNRYASVPVGKALSGACMGTIASFLSKYQDIIIEHQKVVKGNQKRLESLRELAGKENLEYPSVTLPPQPHTKEGVDAYNEVIARVRMWVNLNLWQKLKLSRDDAKPLLRLKGFPSFPLVERQANEVDWWDMVCNVKKLINEKKEDGKVFWQNLAGYKRQEALRPYLSSEEDRKKGKKFARYQLGDLLLHLEKKHGEDWGKVYDEAWERIDKKVEGLSKHIKLEEERRSEDAQSKAALTDWLRAKASFVIEGLKEADKDEFCRCELKLQKWYGDLRGKPFAIEAENSILDISGFSKQYNCAFIWQKDGVKKLNLYLIINYFKGGKLRFKKIKPEAFEANRFYTVINKKSGEIVPMEVNFNFDDPNLIILPLAFGKRQGREFIWNDLLSLETGSLKLANGRVIEKTLYNRRTRQDEPALFVALTFERREVLDSSNIKPMNLIGVDRGENIPAVIALTDPEGCPLSRFKDSLGNPTHILRIGESYKEKQRTIQAKKEVEQRRAGGYSRKYASKAKNLADDMVRNTARDLLYYAVTQDAMLIFENLSRGFGRQGKRTFMAERQYTRMEDWLTAKLAYEGLPSKTYLSKTLAQYTSKTCSNCGFTITSADYDRVLEKLKKTATGWMTTINGKELKVEGQITYYNRYKRQNVVKDLSVELDRLSEESVNNDISSWTKGRSGEALSLLKKRFSHRPVQEKFVCLNCGFETHADEQAALNIARSWLFLRSQEYKKYQTNKTTGKNTDKRAFVETWQSFYRKKLKEVWKPAV

SEQ ID NO: 47934 - protein, 979 aa, synthetic construct
  REGION 1..979: note = engineered CasX variant
QEIKRINKIRRRLVKDSNTKKAGKTGPMKTLLVRVMTPDLRERLENLRKKPENIPQPISNTSRANLNKLLTDYTEMKKAILHVYWEEFQKDPVGLMSRVAQPASKKIDQNKLKPEMDEKGNLTTAGFACSQCGQPLFVYKLEQVSEKGKAYTNYFGRCNVAEHEKLIKLAQLKPEKDSDEAVTYSLGKFGQRALDFYSIHVTKESTHPVKPLAQIAGNRYASGPVGKALSGACMGTIASFLSKYQDIIIEHQKVVKGNQKRLESLRELAGKENLEYPSVTLPPQPHTKEGVDAYNEVIARVRMWVNLNLWQKLKLSRDDAKPLLRLKGFPSFPLVERQANEVDWWDMVCNVKKLINEKKEDGKVFWQNLAGYKRQEALRPYLSSEEDRKKGKKFARYQLGDLLLHLEKKHGEDWGKVYDEAWERIDKKVEGLSKHIKLEEERRSEDAQSKAALTDWLRAKASFVIEGLKEADKDEFCRCELKLQKWYGDLRGKPFAIEAENSILDISGFSKQYNCAFIWQKDGVKKLNLYLIINYFKGGKLRFKKIKPEAFEANRFYTVINKKSGEIVPMEVNFNFDDPNLIILPLAFGKRQGREFIWNDLLSLETGSLKLANGRVIEKTLYNRRTRQDEPALFVALTFERREVLDSSNIKPMNLIGVDRGENIPAVIALTDPEGCPLSRFKDSLGNPTHILRIGESYKEKQRTIQAKKEVEQRRAGGYSRKYASKAKNLADDMVRNTARDLLYYAVTQDAMLIFENLSRGFGRQGKRTFMAERQYTRMEDWLTAKLAYEGLPSKTYLSKTLAQYTSKTCSNCGFTITSADYDRVLEKLKKTATGWMTTINGKELKVEGQITYYNRYKRQNVVKDLSVELDRLSEESVNNDISSWTKGRSGEALSLLKKRFSHRPVQEKFVCLNCGFETHADEQAALNIARSWLFLRSQEYKKYQTNKTTGKNTDKRAFVETWQSFYRKKLKEVWKPAV

SEQ ID NO: 47935 - protein, 978 aa, synthetic construct
  REGION 1..978: note = engineered CasX variant
QEIKRINKIRRRLVKDSNTKKAGKTGPMKTLLVRVMTPDLRERLENLRKKPENIPQPISNTSRANLNKLLTDYTEMKKAILHVYWEEFQKDPVGLMSRVAQPASKKIDQNKLKPEMDEKGNLTTAGFACSQCGQPLFVYKLEQVSEKGKAYTNYFGRCNVAEHEKLILLAQLKPEKDSDEAVTYSLGKFGQRALDFYSIHVTKESTHPVKPLAQIAGNRYASPVGKALSGACMGTIASFLSKYQDIIIEHQKVVKGNQKRLESLRELAGKENLEYPSVTLPPQPHTKEGVDAYNEVIARVRMWVNLNLWQKLKLSRDDAKPLLRLKGFPSFPLVERQANEVDWWDMVCNVKKLINEKKEDGKVFWQNLAGYKRQEALRPYLSSEEDRKKGKKFARYQLGDLLLHLEKKHGEDWGKVYDEAWERIDKKVEGLSKHIKLEEERRSEDAQSKAALTDWLRAKASFVIEGLKEADKDEFCRCELKLQKWYGDLRGKPFAIEAENSILDISGFSKQYNCAFIWQKDGVKKLNLYLIINYFKGGKLRFKKIKPEAFEANRFYTVINKKSGEIVPMEVNFNFDDPNLIILPLAFGKRQGREFIWNDLLSLETGSLKLANGRVIEKTLYNRRTRQDEPALFVALTFERREVLDSSNIKPMNLIGVDRGENIPAVIALTDPEGCPLSRFKDSLGNPTHILRIGESYKEKQRTIQAKKEVEQRRAGGYSRKYASKAKNLADDMVRNTARDLLYYAVTQDAMLIFENLSRGFGRQGKRTFMAERQYTRMEDWLTAKLAYEGLPSKTYLSKTLAQYTSKTCSNCGFTITSADYDRVLEKLKKTATGWMTTINGKELKVEGQITYYNRYKRQNVVKDLSVELDRLSEESVNNDISSWTKGRSGEALSLLKKRFSHRPVQEKFVCLNCGFETHADEQAALNIARSWLFLRSQEYKKYQTNKTTGKNTDKRAFVETWQSFYRKKLKEVWKPAV

SEQ ID NO: 47936 - protein, 979 aa, synthetic construct
  REGION 1..979: note = engineered CasX variant
QEIKRINKIRRRLVKDSNTKKAGKTGPMKTLLVRVMTPDLRERLENLRKKPENIPQPISNTSRANLNKLLTDYTEMKKAILHVYWEEFQKDPVGLMSRVAQPASKKIDQNKLKPEMDEKGNLTTAGFACSQCGQPLFVYKLEQVSEKGKAYTNYFGRCNVAEHEKLILLAQLKPEKDSDEAVTYSLGKFGQRALDFYSIHVTKESTHPVKPLAQIAGNRYASYPVGKALSDACMGTIASFLSKYQDIIIEHQKVVKGNQKRLESLRELAGKENLEYPSVTLPPQPHTKEGVDAYNEVIARVRMWVNLNLWQKLKLSRDDAKPLLRLKNFPSFPLVERQANEVDWWDMVCNVKKLINEKKEDGKVFWQNLAGYKRQEALRPYLSSEEDRKKGKKFARYQLGDLLLHLEKKHGEDWGKVYDEAWERIDKKVEGLSKHIKLEEERRSEDAQSKAALTDWLRAKASFVIEGLKEADKDEFCRCELKLQKWYGDLRGKPFAIEAENSILDISGFSKQYNCAFIWQKDGVKKLNLYLIINYFKGGKLRFKKIKPEAFEANRFYTVINKKSGEIVPMEVNFNFDDPNLIILPLAFGKRQGREFIWNDLLSLETGSLKLANGRVIEKTLYNRRTRQDEPALFVALTFERREVLDSSNIKPMNLIGVDRGENIPAVIALTDPEGCPLSRFKDSLGNPTHILRIGESYKEKQRTIQAKKEVEQRRAGGYSRKYASKAKNLADDMVRNTARDLLYYAVTQDAMLIFENLSRGFGRQGKRTFMAERQYTRMEDWLTAKLAYEGLPSKTYLSKTLAQYTSKTCSNCGFTITSADYDRVLEKLKKTATGWMTTINGKELKVEGQITYYNRYKRQNVVKDLSVELDRLSEESVNNDISSWTKGRSGEALSLLKKRFSHRPVQEKFVCLNCGFETHADEQAALNIARSWLFLRSQEYKKYQTNKTTGKNTDKRAFVETWQSFYRKKLKEVWKPAV

SEQ ID NO: 47937 - protein, 979 aa, synthetic construct
  REGION 1..979: note = engineered CasX variant
QEIKRINKIRRRLVKDSNTKKAGKTGPMKTLLVRVMTPDLRERLENLRKKPENIPQPISNTSRANLNKLLTDYTEMKKAILHVYWEEFQKDPVGLMSRVAQPASKKIDQNKLKPEMDEKGNLTTAGFACSQCGQPLFVYKLEQVSEKGKAYTNYFGRCNVAEHEKLILLAQLKPEKDSDEAVTYSLGKFGQRALDFYSIHVTKESTHPVKPLAQIAGNRYASHPVGKALSDACMGTIASFLSKYQDIIIEHQKVVKGNQKRLESLRELAGKENLEYPSVTLPPQPHTKEGVDAYNEVIARVRMWVNLNLWQKLKLSRDDAKPLLRLKNFPSFPLVERQANEVDWWDMVCNVKKLINEKKEDGKVFWQNLAGYKRQEALRPYLSSEEDRKKGKKFARYQLGDLLLHLEKKHGEDWGKVYDEAWERIDKKVEGLSKHIKLEEERRSEDAQSKAALTDWLRAKASFVIEGLKEADKDEFCRCELKLQKWYGDLRGKPFAIEAENSILDISGFSKQYNCAFIWQKDGVKKLNLYLIINYFKGGKLRFKKIKPEAFEANRFYTVINKKSGEIVPMEVNFNFDDPNLIILPLAFGKRQGREFIWNDLLSLETGSLKLANGRVIEKTLYNRRTRQDEPALFVALTFERREVLDSSNIKPMNLIGVDRGENIPAVIALTDPEGCPLSRFKDSLGNPTHILRIGESYKEKQRTIQAKKEVEQRRAGGYSRKYASKAKNLADDMVRNTARDLLYYAVTQDAMLIFENLSRGFGRQGKRTFMAERQYTRMEDWLTAKLAYEGLPSKTYLSKTLAQYTSKTCSNCGFTITSADYDRVLEKLKKTATGWMTTINGKELKVEGQITYYNRYKRQNVVKDLSVELDRLSEESVNNDISSWTKGRSGEALSLLKKRFSHRPVQEKFVCLNCGFETHADEQAALNIARSWLFLRSQEYKKYQTNKTTGKNTDKRAFVETWQSFYRKKLKEVWKPAV

SEQ ID NO: 47938 - protein, 979 aa, synthetic construct
  REGION 1..979: note = engineered CasX variant
QEIKRINKIRRRLVKDSNTKKAGKTGPMKTLLVRVMTPDLRERLENLRKKPENIPQPISNTSRANLNKLLTDYTEMKKAILHVYWEEFQKDPVGLMSRVAQPASKKIDQNKLKPEMDEKGNLTTAGFACSQCGQPLFVYKLEQVSEKGKAYTNYFGRCNVAEHEKLILLAQLKPEKDSDEAVTYSLGKFGQRALDFYSIHVTKESTHPVKPLAQIAGNRYASSPVGKALSDACMGTIASFLSKYQDIIIEHQKVVKGNQKRLESLRELAGKENLEYPSVTLPPQPHTKEGVDAYNEVIARVRMWVNLNLWQKLKLSRDDAKPLLRLKNFPSFPLVERQANEVDWWDMVCNVKKLINEKKEDGKVFWQNLAGYKRQEALRPYLSSEEDRKKGKKFARYQLGDLLLHLEKKHGEDWGKVYDEAWERIDKKVEGLSKHIKLEEERRSEDAQSKAALTDWLRAKASFVIEGLKEADKDEFCRCELKLQKWYGDLRGKPFAIEAENSILDISGFSKQYNCAFIWQKDGVKKLNLYLIINYFKGGKLRFKKIKPEAFEANRFYTVINKKSGEIVPMEVNFNFDDPNLIILPLAFGKRQGREFIWNDLLSLETGSLKLANGRVIEKTLYNRRTRQDEPALFVALTFERREVLDSSNIKPMNLIGVDRGENIPAVIALTDPEGCPLSRFKDSLGNPTHILRIGESYKEKQRTIQAKKEVEQRRAGGYSRKYASKAKNLADDMVRNTARDLLYYAVTQDAMLIFENLSRGFGRQGKRTFMAERQYTRMEDWLTAKLAYEGLPSKTYLSKTLAQYTSKTCSNCGFTITSADYDRVLEKLKKTATGWMTTINGKELKVEGQITYYNRYKRQNVVKDLSVELDRLSEESVNNDISSWTKGRSGEALSLLKKRFSHRPVQEKFVCLNCGFETHADEQAALNIARSWLFLRSQEYKKYQTNKTTGKNTDKRAFVETWQSFYRKKLKEVWKPAV

SEQ ID NO: 47939 - protein, 979 aa, synthetic construct
  REGION 1..979: note = engineered CasX variant
QEIKRINKIRRRLVKDSNTKKAGKTGPMKTLLVRVMTPDLRERLENLRKKPENIPQPISNTSRANLNKLLTDYTEMKKAILHVYWEEFQKDPVGLMSRVAQPASKKIDQNKLKPEMDEKGNLTTAGFACSQCGQPLFVYKLEQVSEKGKAYTNYFGRCNVAEHEKLILLAQLKPEKDSDEAVTYSLGKFGQRALDFYSIHVTKESTHPVKPLAQIAGNRYASTPVGKALSDACMGTIASFLSKYQDIIIEHQKVVKGNQKRLESLRELAGKENLEYPSVTLPPQPHTKEGVDAYNEVIARVRMWVNLNLWQKLKLSRDDAKPLLRLKNFPSFPLVERQANEVDWWDMVCNVKKLINEKKEDGKVFWQNLAGYKRQEALRPYLSSEEDRKKGKKFARYQLGDLLLHLEKKHGEDWGKVYDEAWERIDKKVEGLSKHIKLEEERRSEDAQSKAALTDWLRAKASFVIEGLKEADKDEFCRCELKLQKWYGDLRGKPFAIEAENSILDISGFSKQYNCAFIWQKDGVKKLNLYLIINYFKGGKLRFKKIKPEAFEANRFYTVINKKSGEIVPMEVNFNFDDPNLIILPLAFGKRQGREFIWNDLLSLETGSLKLANGRVIEKTLYNRRTRQDEPALFVALTFERREVLDSSNIKPMNLIGVDRGENIPAVIALTDPEGCPLSRFKDSLGNPTHILRIGESYKEKQRTIQAKKEVEQRRAGGYSRKYASKAKNLADDMVRNTARDLLYYAVTQDAMLIFENLSRGFGRQGKRTFMAERQYTRMEDWLTAKLAYEGLPSKTYLSKTLAQYTSKTCSNCGFTITSADYDRVLEKLKKTATGWMTTINGKELKVEGQITYYNRYKRQNVVKDLSVELDRLSEESVNNDISSWTKGRSGEALSLLKKRFSHRPVQEKFVCLNCGFETHADEQAALNIARSWLFLRSQEYKKYQTNKTTGKNTDKRAFVETWQSFYRKKLKEVWKPAV

SEQ ID NO: 47940 - protein, 979 aa, synthetic construct
  REGION 1..979: note = engineered CasX variant
QEIKRINKIRRRLVKDSNTKKAGKTGPMKTLLVRVMTPDLRERLENLRKKPENIPQPISNTSRANLNKLLTDYTEMKKAILHVYWEEFQKDPVGLMSRVAQPASKKIDQNKLKPEMDEKGNLTTAGFACSQCGQPLFVYKLEQVSEKGKAYTNYFGRCNVAEHEKLILLAQLKPEKDSDEAVTYSLGKFGQRALDFYSIHVTKESTHPVKPLAQIAGNRYASAPVGKALSDACMGTIASFLSKYQDIIIEHQKVVKGNQKRLESLRELAGKENLEYPSVTLPPQPHTKEGVDAYNEVIARVRMWVNLNLWQKLKLSRDDAKPLLRLKNFPSFPLVERQANEVDWWDMVCNVKKLINEKKEDGKVFWQNLAGYKRQEALRPYLSSEEDRKKGKKFARYQLGDLLLHLEKKHGEDWGKVYDEAWERIDKKVEGLSKHIKLEEERRSEDAQSKAALTDWLRAKASFVIEGLKEADKDEFCRCELKLQKWYGDLRGKPFAIEAENSILDISGFSKQYNCAFIWQKDGVKKLNLYLIINYFKGGKLRFKKIKPEAFEANRFYTVINKKSGEIVPMEVNFNFDDPNLIILPLAFGKRQGREFIWNDLLSLETGSLKLANGRVIEKTLYNRRTRQDEPALFVALTFERREVLDSSNIKPMNLIGVDRGENIPAVIALTDPEGCPLSRFKDSLGNPTHILRIGESYKEKQRTIQAKKEVEQRRAGGYSRKYASKAKNLADDMVRNTARDLLYYAVTQDAMLIFENLSRGFGRQGKRTFMAERQYTRMEDWLTAKLAYEGLPSKTYLSKTLAQYTSKTCSNCGFTITSADYDRVLEKLKKTATGWMTTINGKELKVEGQITYYNRYKRQNVVKDLSVELDRLSEESVNNDISSWTKGRSGEALSLLKKRFSHRPVQEKFVCLNCGFETHADEQAALNIARSWLFLRSQEYKKYQTNKTTGKNTDKRAFVETWQSFYRKKLKEVWKPAV

SEQ ID NO: 47941 - protein, 979 aa, synthetic construct
  REGION 1..979: note = engineered CasX variant
QEIKRINKIRRRLVKDSNTKKAGKTGPMKTLLVRVMTPDLRERLENLRKKPENIPQPISNTSRANLNKLLTDYTEMKKAILHVYWEEFQKDPVGLMSRVAQPASKKIDQNKLKPEMDEKGNLTTAGFACSQCGQPLFVYKLEQVSEKGKAYTNYFGRCNVAEHEKLILLAQLKPEKDSDEAVTYSLGKFGQRALDFYSIHVTKESTHPVKPLAQIAGNRYASVPVGKALSDACMGTIASFLSKYQDIIIEHQKVVKGNQKRLESLRELAGKENLEYPSVTLPPQPHTKEGVDAYNEVIARVRMWVNLNLWQKLKLSRDDAKPLLRLKNFPSFPLVERQANEVDWWDMVCNVKKLINEKKEDGKVFWQNLAGYKRQEALRPYLSSEEDRKKGKKFARYQLGDLLLHLEKKHGEDWGKVYDEAWERIDKKVEGLSKHIKLEEERRSEDAQSKAALTDWLRAKASFVIEGLKEADKDEFCRCELKLQKWYGDLRGKPFAIEAENSILDISGFSKQYNCAFIWQKDGVKKLNLYLIINYFKGGKLRFKKIKPEAFEANRFYTVINKKSGEIVPMEVNFNFDDPNLIILPLAFGKRQGREFIWNDLLSLETGSLKLANGRVIEKTLYNRRTRQDEPALFVALTFERREVLDSSNIKPMNLIGVDRGENIPAVIALTDPEGCPLSRFKDSLGNPTHILRIGESYKEKQRTIQAKKEVEQRRAGGYSRKYASKAKNLADDMVRNTARDLLYYAVTQDAMLIFENLSRGFGRQGKRTFMAERQYTRMEDWLTAKLAYEGLPSKTYLSKTLAQYTSKTCSNCGFTITSADYDRVLEKLKKTATGWMTTINGKELKVEGQITYYNRYKRQNVVKDLSVELDRLSEESVNNDISSWTKGRSGEALSLLKKRFSHRPVQEKFVCLNCGFETHADEQAALNIARSWLFLRSQEYKKYQTNKTTGKNTDKRAFVETWQSFYRKKLKEVWKPAV

SEQ ID NO: 47942 - protein, 979 aa, synthetic construct
  REGION 1..979: note = engineered CasX variant
QEIKRINKIRRRLVKDSNTKKAGKTGPMKTLLVRVMTPDLRERLENLRKKPENIPQPISNTSRANLNKLLTDYTEMKKAILHVYWEEFQKDPVGLMSRVAQPASKKIDQNKLKPEMDEKGNLTTAGFACSQCGQPLFVYKLEQVSEKGKAYTNYFGRCNVAEHEKLIKLAQLKPEKDSDEAVTYSLGKFGQRALDFYSIHVTKESTHPVKPLAQIAGNRYASGPVGKALSDACMGTIASFLSKYQDIIIEHQKVVKGNQKRLESLRELAGKENLEYPSVTLPPQPHTKEGVDAYNEVIARVRMWVNLNLWQKLKLSRDDAKPLLRLKNFPSFPLVERQANEVDWWDMVCNVKKLINEKKEDGKVFWQNLAGYKRQEALRPYLSSEEDRKKGKKFARYQLGDLLLHLEKKHGEDWGKVYDEAWERIDKKVEGLSKHIKLEEERRSEDAQSKAALTDWLRAKASFVIEGLKEADKDEFCRCELKLQKWYGDLRGKPFAIEAENSILDISGFSKQYNCAFIWQKDGVKKLNLYLIINYFKGGKLRFKKIKPEAFEANRFYTVINKKSGEIVPMEVNFNFDDPNLIILPLAFGKRQGREFIWNDLLSLETGSLKLANGRVIEKTLYNRRTRQDEPALFVALTFERREVLDSSNIKPMNLIGVDRGENIPAVIALTDPEGCPLSRFKDSLGNPTHILRIGESYKEKQRTIQAKKEVEQRRAGGYSRKYASKAKNLADDMVRNTARDLLYYAVTQDAMLIFENLSRGFGRQGKRTFMAERQYTRMEDWLTAKLAYEGLPSKTYLSKTLAQYTSKTCSNCGFTITSADYDRVLEKLKKTATGWMTTINGKELKVEGQITYYNRYKRQNVVKDLSVELDRLSEESVNNDISSWTKGRSGEALSLLKKRFSHRPVQEKFVCLNCGFETHADEQAALNIARSWLFLRSQEYKKYQTNKTTGKNTDKRAFVETWQSFYRKKLKEVWKPAV

SEQ ID NO: 47943 - protein, 978 aa, synthetic construct
  REGION 1..978: note = engineered CasX variant
QEIKRINKIRRRLVKDSNTKKAGKTGPMKTLLVRVMTPDLRERLENLRKKPENIPQPISNTSRANLNKLLTDYTEMKKAILHVYWEEFQKDPVGLMSRVAQPASKKIDQNKLKPEMDEKGNLTTAGFACSQCGQPLFVYKLEQVSEKGKAYTNYFGRCNVAEHEKLILLAQLKPEKDSDEAVTYSLGKFGQRALDFYSIHVTKESTHPVKPLAQIAGNRYASPVGKALSDACMGTIASFLSKYQDIIIEHQKVVKGNQKRLESLRELAGKENLEYPSVTLPPQPHTKEGVDAYNEVIARVRMWVNLNLWQKLKLSRDDAKPLLRLKNFPSFPLVERQANEVDWWDMVCNVKKLINEKKEDGKVFWQNLAGYKRQEALRPYLSSEEDRKKGKKFARYQLGDLLLHLEKKHGEDWGKVYDEAWERIDKKVEGLSKHIKLEEERRSEDAQSKAALTDWLRAKASFVIEGLKEADKDEFCRCELKLQKWYGDLRGKPFAIEAENSILDISGFSKQYNCAFIWQKDGVKKLNLYLIINYFKGGKLRFKKIKPEAFEANRFYTVINKKSGEIVPMEVNFNFDDPNLIILPLAFGKRQGREFIWNDLLSLETGSLKLANGRVIEKTLYNRRTRQDEPALFVALTFERREVLDSSNIKPMNLIGVDRGENIPAVIALTDPEGCPLSRFKDSLGNPTHILRIGESYKEKQRTIQAKKEVEQRRAGGYSRKYASKAKNLADDMVRNTARDLLYYAVTQDAMLIFENLSRGFGRQGKRTFMAERQYTRMEDWLTAKLAYEGLPSKTYLSKTLAQYTSKTCSNCGFTITSADYDRVLEKLKKTATGWMTTINGKELKVEGQITYYNRYKRQNVVKDLSVELDRLSEESVNNDISSWTKGRSGEALSLLKKRFSHRPVQEKFVCLNCGFETHADEQAALNIARSWLFLRSQEYKKYQTNKTTGKNTDKRAFVETWQSFYRKKLKEVWKPAV

SEQ ID NO: 47944 - protein, 979 aa, synthetic construct
  REGION 1..979: note = engineered CasX variant
QEIKRINKIRRRLVKDSNTKKAGKTGPMKTLLVRVMTPDLRERLENLRKKPENIPQPISNTSRANLNKLLTDYTEMKKAILHVYWEEFQKDPVGLMSRVAQPASKKIDQNKLKPEMDEKGNLTTAGFACSQCGQPLFVYKLEQVSEKGKAYTNYFGRCNVAEHEKLILLAQLKPEKDSDEAVTYSLGKFGQRALDFYSIHVTKESTHPVKPLAQIAGNRYASYPVGKALSDACMGTIASFLSKYQDIIIEHQKVVKGNQKRLESLRELAGKENLEYPSVTLPPQPHTKEGVDAYNEVIARVRMWVNLNLWQKLKLSRDDAKPLLRLKGFPSFPLVERQANEVDWWDMVCNVKKLINEKKEDGKVFWQNLAGYKRQEALRPYLSSEEDRKKGKKFARYQLGDLLNHLEKKHGEDWGKVYDEAWERIDKKVEGLSKHIKLEEERRSEDAQSKAALTDWLRAKASFVIEGLKEADKDEFCRCELKLQKWYGDLRGKPFAIEAENSILDISGFSKQYNCAFIWQKDGVKKLNLYLIINYFKGGKLRFKKIKPEAFEANRFYTVINKKSGEIVPMEVNFNFDDPNLIILPLAFGKRQGREFIWNDLLSLETGSLKLANGRVIEKTLYNRRTRQDEPALFVALTFERREVLDSSNIKPMNLIGVDRGENIPAVIALTDPEGCPLSRFKDSLGNPTHILRIGESYKEKQRTIQAKKEVEQRRAGGYSRKYASKAKNLADDMVRNTARDLLYYAVTQDAMLIFENLSRGFGRQGKRTFMAERQYTRMEDWLTAKLAYEGLPSKTYLSKTLAQYTSKTCSNCGFTITSADYDRVLEKLKKTATGWMTTINGKELKVEGQITYYNRYKRQNVVKDLSVELDRLSEESVNNDISSWTKGRSGEALSLLKKRFSHRPVQEKFVCLNCGFETHADEQAALNIARSWLFLRSQEYKKYQTNKTTGKNTDKRAFVETWQSFYRKKLKEVWKPAV

SEQ ID NO: 47945 - protein, 979 aa, synthetic construct
  REGION 1..979: note = engineered CasX variant
QEIKRINKIRRRLVKDSNTKKAGKTGPMKTLLVRVMTPDLRERLENLRKKPENIPQPISNTSRANLNKLLTDYTEMKKAILHVYWEEFQKDPVGLMSRVAQPASKKIDQNKLKPEMDEKGNLTTAGFACSQCGQPLFVYKLEQVSEKGKAYTNYFGRCNVAEHEKLILLAQLKPEKDSDEAVTYSLGKFGQRALDFYSIHVTKESTHPVKPLAQIAGNRYASHPVGKALSDACMGTIASFLSKYQDIIIEHQKVVKGNQKRLESLRELAGKENLEYPSVTLPPQPHTKEGVDAYNEVIARVRMWVNLNLWQKLKLSRDDAKPLLRLKGFPSFPLVERQANEVDWWDMVCNVKKLINEKKEDGKVFWQNLAGYKRQEALRPYLSSEEDRKKGKKFARYQLGDLLNHLEKKHGEDWGKVYDEAWERIDKKVEGLSKHIKLEEERRSEDAQSKAALTDWLRAKASFVIEGLKEADKDEFCRCELKLQKWYGDLRGKPFAIEAENSILDISGFSKQYNCAFIWQKDGVKKLNLYLIINYFKGGKLRFKKIKPEAFEANRFYTVINKKSGEIVPMEVNFNFDDPNLIILPLAFGKRQGREFIWNDLLSLETGSLKLANGRVIEKTLYNRRTRQDEPALFVALTFERREVLDSSNIKPMNLIGVDRGENIPAVIALTDPEGCPLSRFKDSLGNPTHILRIGESYKEKQRTIQAKKEVEQRRAGGYSRKYASKAKNLADDMVRNTARDLLYYAVTQDAMLIFENLSRGFGRQGKRTFMAERQYTRMEDWLTAKLAYEGLPSKTYLSKTLAQYTSKTCSNCGFTITSADYDRVLEKLKKTATGWMTTINGKELKVEGQITYYNRYKRQNVVKDLSVELDRLSEESVNNDISSWTKGRSGEALSLLKKRFSHRPVQEKFVCLNCGFETHADEQAALNIARSWLFLRSQEYKKYQTNKTTGKNTDKRAFVETWQSFYRKKLKEVWKPAV

SEQ ID NO: 47946 - protein, 979 aa, synthetic construct
  REGION 1..979: note = engineered CasX variant
QEIKRINKIRRRLVKDSNTKKAGKTGPMKTLLVRVMTPDLRERLENLRKKPENIPQPISNTSRANLNKLLTDYTEMKKAILHVYWEEFQKDPVGLMSRVAQPASKKIDQNKLKPEMDEKGNLTTAGFACSQCGQPLFVYKLEQVSEKGKAYTNYFGRCNVAEHEKLILLAQLKPEKDSDEAVTYSLGKFGQRALDFYSIHVTKESTHPVKPLAQIAGNRYASSPVGKALSDACMGTIASFLSKYQDIIIEHQKVVKGNQKRLESLRELAGKENLEYPSVTLPPQPHTKEGVDAYNEVIARVRMWVNLNLWQKLKLSRDDAKPLLRLKGFPSFPLVERQANEVDWWDMVCNVKKLINEKKEDGKVFWQNLAGYKRQEALRPYLSSEEDRKKGKKFARYQLGDLLNHLEKKHGEDWGKVYDEAWERIDKKVEGLSKHIKLEEERRSEDAQSKAALTDWLRAKASFVIEGLKEADKDEFCRCELKLQKWYGDLRGKPFAIEAENSILDISGFSKQYNCAFIWQKDGVKKLNLYLIINYFKGGKLRFKKIKPEAFEANRFYTVINKKSGEIVPMEVNFNFDDPNLIILPLAFGKRQGREFIWNDLLSLETGSLKLANGRVIEKTLYNRRTRQDEPALFVALTFERREVLDSSNIKPMNLIGVDRGENIPAVIALTDPEGCPLSRFKDSLGNPTHILRIGESYKEKQRTIQAKKEVEQRRAGGYSRKYASKAKNLADDMVRNTARDLLYYAVTQDAMLIFENLSRGFGRQGKRTFMAERQYTRMEDWLTAKLAYEGLPSKTYLSKTLAQYTSKTCSNCGFTITSADYDRVLEKLKKTATGWMTTINGKELKVEGQITYYNRYKRQNVVKDLSVELDRLSEESVNNDISSWTKGRSGEALSLLKKRFSHRPVQEKFVCLNCGFETHADEQAALNIARSWLFLRSQEYKKYQTNKTTGKNTDKRAFVETWQSFYRKKLKEVWKPAV

SEQ ID NO: 47947 - protein, 979 aa, synthetic construct
  REGION 1..979: note = engineered CasX variant
QEIKRINKIRRRLVKDSNTKKAGKTGPMKTLLVRVMTPDLRERLENLRKKPENIPQPISNTSRANLNKLLTDYTEMKKAILHVYWEEFQKDPVGLMSRVAQPASKKIDQNKLKPEMDEKGNLTTAGFACSQCGQPLFVYKLEQVSEKGKAYTNYFGRCNVAEHEKLILLAQLKPEKDSDEAVTYSLGKFGQRALDFYSIHVTKESTHPVKPLAQIAGNRYASTPVGKALSDACMGTIASFLSKYQDIIIEHQKVVKGNQKRLESLRELAGKENLEYPSVTLPPQPHTKEGVDAYNEVIARVRMWVNLNLWQKLKLSRDDAKPLLRLKGFPSFPLVERQANEVDWWDMVCNVKKLINEKKEDGKVFWQNLAGYKRQEALRPYLSSEEDRKKGKKFARYQLGDLLNHLEKKHGEDWGKVYDEAWERIDKKVEGLSKHIKLEEERRSEDAQSKAALTDWLRAKASFVIEGLKEADKDEFCRCELKLQKWYGDLRGKPFAIEAENSILDISGFSKQYNCAFIWQKDGVKKLNLYLIINYFKGGKLRFKKIKPEAFEANRFYTVINKKSGEIVPMEVNFNFDDPNLIILPLAFGKRQGREFIWNDLLSLETGSLKLANGRVIEKTLYNRRTRQDEPALFVALTFERREVLDSSNIKPMNLIGVDRGENIPAVIALTDPEGCPLSRFKDSLGNPTHILRIGESYKEKQRTIQAKKEVEQRRAGGYSRKYASKAKNLADDMVRNTARDLLYYAVTQDAMLIFENLSRGFGRQGKRTFMAERQYTRMEDWLTAKLAYEGLPSKTYLSKTLAQYTSKTCSNCGFTITSADYDRVLEKLKKTATGWMTTINGKELKVEGQITYYNRYKRQNVVKDLSVELDRLSEESVNNDISSWTKGRSGEALSLLKKRFSHRPVQEKFVCLNCGFETHADEQAALNIARSWLFLRSQEYKKYQTNKTTGKNTDKRAFVETWQSFYRKKLKEVWKPAV

SEQ ID NO: 47948 - protein, 979 aa, synthetic construct
  REGION 1..979: note = engineered CasX variant
QEIKRINKIRRRLVKDSNTKKAGKTGPMKTLLVRVMTPDLRERLENLRKKPENIPQPISNTSRANLNKLLTDYTEMKKAILHVYWEEFQKDPVGLMSRVAQPASKKIDQNKLKPEMDEKGNLTTAGFACSQCGQPLFVYKLEQVSEKGKAYTNYFGRCNVAEHEKLILLAQLKPEKDSDEAVTYSLGKFGQRALDFYSIHVTKESTHPVKPLAQIAGNRYASAPVGKALSDACMGTIASFLSKYQDIIIEHQKVVKGNQKRLESLRELAGKENLEYPSVTLPPQPHTKEGVDAYNEVIARVRMWVNLNLWQKLKLSRDDAKPLLRLKGFPSFPLVERQANEVDWWDMVCNVKKLINEKKEDGKVFWQNLAGYKRQEALRPYLSSEEDRKKGKKFARYQLGDLLNHLEKKHGEDWGKVYDEAWERIDKKVEGLSKHIKLEEERRSEDAQSKAALTDWLRAKASFVIEGLKEADKDEFCRCELKLQKWYGDLRGKPFAIEAENSILDISGFSKQYNCAFIWQKDGVKKLNLYLIINYFKGGKLRFKKIKPEAFEANRFYTVINKKSGEIVPMEVNFNFDDPNLIILPLAFGKRQGREFIWNDLLSLETGSLKLANGRVIEKTLYNRRTRQDEPALFVALTFERREVLDSSNIKPMNLIGVDRGENIPAVIALTDPEGCPLSRFKDSLGNPTHILRIGESYKEKQRTIQAKKEVEQRRAGGYSRKYASKAKNLADDMVRNTARDLLYYAVTQDAMLIFENLSRGFGRQGKRTFMAERQYTRMEDWLTAKLAYEGLPSKTYLSKTLAQYTSKTCSNCGFTITSADYDRVLEKLKKTATGWMTTINGKELKVEGQITYYNRYKRQNVVKDLSVELDRLSEESVNNDISSWTKGRSGEALSLLKKRFSHRPVQEKFVCLNCGFETHADEQAALNIARSWLFLRSQEYKKYQTNKTTGKNTDKRAFVETWQSFYRKKLKEVWKPAV

SEQ ID NO: 47949 - protein, 979 aa, synthetic construct
  REGION 1..979: note = engineered CasX variant
QEIKRINKIRRRLVKDSNTKKAGKTGPMKTLLVRVMTPDLRERLENLRKKPENIPQPISNTSRANLNKLLTDYTEMKKAILHVYWEEFQKDPVGLMSRVAQPASKKIDQNKLKPEMDEKGNLTTAGFACSQCGQPLFVYKLEQVSEKGKAYTNYFGRCNVAEHEKLILLAQLKPEKDSDEAVTYSLGKFGQRALDFYSIHVTKESTHPVKPLAQIAGNRYASVPVGKALSDACMGTIASFLSKYQDIIIEHQKVVKGNQKRLESLRELAGKENLEYPSVTLPPQPHTKEGVDAYNEVIARVRMWVNLNLWQKLKLSRDDAKPLLRLKGFPSFPLVERQANEVDWWDMVCNVKKLINEKKEDGKVFWQNLAGYKRQEALRPYLSSEEDRKKGKKFARYQLGDLLNHLEKKHGEDWGKVYDEAWERIDKKVEGLSKHIKLEEERRSEDAQSKAALTDWLRAKASFVIEGLKEADKDEFCRCELKLQKWYGDLRGKPFAIEAENSILDISGFSKQYNCAFIWQKDGVKKLNLYLIINYFKGGKLRFKKIKPEAFEANRFYTVINKKSGEIVPMEVNFNFDDPNLIILPLAFGKRQGREFIWNDLLSLETGSLKLANGRVIEKTLYNRRTRQDEPALFVALTFERREVLDSSNIKPMNLIGVDRGENIPAVIALTDPEGCPLSRFKDSLGNPTHILRIGESYKEKQRTIQAKKEVEQRRAGGYSRKYASKAKNLADDMVRNTARDLLYYAVTQDAMLIFENLSRGFGRQGKRTFMAERQYTRMEDWLTAKLAYEGLPSKTYLSKTLAQYTSKTCSNCGFTITSADYDRVLEKLKKTATGWMTTINGKELKVEGQITYYNRYKRQNVVKDLSVELDRLSEESVNNDISSWTKGRSGEALSLLKKRFSHRPVQEKFVCLNCGFETHADEQAALNIARSWLFLRSQEYKKYQTNKTTGKNTDKRAFVETWQSFYRKKLKEVWKPAV

SEQ ID NO: 47950 - protein, 979 aa, synthetic construct
  REGION 1..979: note = engineered CasX variant
QEIKRINKIRRRLVKDSNTKKAGKTGPMKTLLVRVMTPDLRERLENLRKKPENIPQPISNTSRANLNKLLTDYTEMKKAILHVYWEEFQKDPVGLMSRVAQPASKKIDQNKLKPEMDEKGNLTTAGFACSQCGQPLFVYKLEQVSEKGKAYTNYFGRCNVAEHEKLIKLAQLKPEKDSDEAVTYSLGKFGQRALDFYSIHVTKESTHPVKPLAQIAGNRYASGPVGKALSDACMGTIASFLSKYQDIIIEHQKVVKGNQKRLESLRELAGKENLEYPSVTLPPQPHTKEGVDAYNEVIARVRMWVNLNLWQKLKLSRDDAKPLLRLKGFPSFPLVERQANEVDWWDMVCNVKKLINEKKEDGKVFWQNLAGYKRQEALRPYLSSEEDRKKGKKFARYQLGDLLNHLEKKHGEDWGKVYDEAWERIDKKVEGLSKHIKLEEERRSEDAQSKAALTDWLRAKASFVIEGLKEADKDEFCRCELKLQKWYGDLRGKPFAIEAENSILDISGFSKQYNCAFIWQKDGVKKLNLYLIINYFKGGKLRFKKIKPEAFEANRFYTVINKKSGEIVPMEVNFNFDDPNLIILPLAFGKRQGREFIWNDLLSLETGSLKLANGRVIEKTLYNRRTRQDEPALFVALTFERREVLDSSNIKPMNLIGVDRGENIPAVIALTDPEGCPLSRFKDSLGNPTHILRIGESYKEKQRTIQAKKEVEQRRAGGYSRKYASKAKNLADDMVRNTARDLLYYAVTQDAMLIFENLSRGFGRQGKRTFMAERQYTRMEDWLTAKLAYEGLPSKTYLSKTLAQYTSKTCSNCGFTITSADYDRVLEKLKKTATGWMTTINGKELKVEGQITYYNRYKRQNVVKDLSVELDRLSEESVNNDISSWTKGRSGEALSLLKKRFSHRPVQEKFVCLNCGFETHADEQAALNIARSWLFLRSQEYKKYQTNKTTGKNTDKRAFVETWQSFYRKKLKEVWKPAV

SEQ ID NO: 47951 - protein, 978 aa, synthetic construct
  REGION 1..978: note = engineered CasX variant
QEIKRINKIRRRLVKDSNTKKAGKTGPMKTLLVRVMTPDLRERLENLRKKPENIPQPISNTSRANLNKLLTDYTEMKKAILHVYWEEFQKDPVGLMSRVAQPASKKIDQNKLKPEMDEKGNLTTAGFACSQCGQPLFVYKLEQVSEKGKAYTNYFGRCNVAEHEKLILLAQLKPEKDSDEAVTYSLGKFGQRALDFYSIHVTKESTHPVKPLAQIAGNRYASPVGKALSDACMGTIASFLSKYQDIIIEHQKVVKGNQKRLESLRELAGKENLEYPSVTLPPQPHTKEGVDAYNEVIARVRMWVNLNLWQKLKLSRDDAKPLLRLKGFPSFPLVERQANEVDWWDMVCNVKKLINEKKEDGKVFWQNLAGYKRQEALRPYLSSEEDRKKGKKFARYQLGDLLNHLEKKHGEDWGKVYDEAWERIDKKVEGLSKHIKLEEERRSEDAQSKAALTDWLRAKASFVIEGLKEADKDEFCRCELKLQKWYGDLRGKPFAIEAENSILDISGFSKQYNCAFIWQKDGVKKLNLYLIINYFKGGKLRFKKIKPEAFEANRFYTVINKKSGEIVPMEVNFNFDDPNLIILPLAFGKRQGREFIWNDLLSLETGSLKLANGRVIEKTLYNRRTRQDEPALFVALTFERREVLDSSNIKPMNLIGVDRGENIPAVIALTDPEGCPLSRFKDSLGNPTHILRIGESYKEKQRTIQAKKEVEQRRAGGYSRKYASKAKNLADDMVRNTARDLLYYAVTQDAMLIFENLSRGFGRQGKRTFMAERQYTRMEDWLTAKLAYEGLPSKTYLSKTLAQYTSKTCSNCGFTITSADYDRVLEKLKKTATGWMTTINGKELKVEGQITYYNRYKRQNVVKDLSVELDRLSEESVNNDISSWTKGRSGEALSLLKKRFSHRPVQEKFVCLNCGFETHADEQAALNIARSWLFLRSQEYKKYQTNKTTGKNTDKRAFVETWQSFYRKKLKEVWKPAV

SEQ ID NO: 47952 - protein, 979 aa, synthetic construct
  REGION 1..979: note = engineered CasX variant
QEIKRINKIRRRLVKDSNTKKAGKTGPMKTLLVRVMTPDLRERLENLRKKPENIPQPISNTSRANLNKLLTDYTEMKKAILHVYWEEFQKDPVGLMSRVAQPASKKIDQNKLKPEMDEKGNLTTAGFACSQCGQPLFVYKLEQVSEKGKAYTNYFGRCNVAEHEKLILLAQLKPEKDSDEAVTYSLGKFGQRALDFYSIHVTKESTHPVKPLAQIAGNRYASYPVGKALSDACMGTIASFLSKYQDIIIEHQKVVKGNQKRLESLRELAGKENLEYPSVTLPPQPHTKEGVDAYNEVIARVRMWVNLNLWQKLKLSRDDAKPLLRLKGFPSFPLVERQANEVDWWDMVCNVKKLINEKKEDGKVFWQNLAGYKRQEALRPYLSSEEDRKKGKKFARYQLGDLLWHLEKKHGEDWGKVYDEAWERIDKKVEGLSKHIKLEEERRSEDAQSKAALTDWLRAKASFVIEGLKEADKDEFCRCELKLQKWYGDLRGKPFAIEAENSILDISGFSKQYNCAFIWQKDGVKKLNLYLIINYFKGGKLRFKKIKPEAFEANRFYTVINKKSGEIVPMEVNFNFDDPNLIILPLAFGKRQGREFIWNDLLSLETGSLKLANGRVIEKTLYNRRTRQDEPALFVALTFERREVLDSSNIKPMNLIGVDRGENIPAVIALTDPEGCPLSRFKDSLGNPTHILRIGESYKEKQRTIQAKKEVEQRRAGGYSRKYASKAKNLADDMVRNTARDLLYYAVTQDAMLIFENLSRGFGRQGKRTFMAERQYTRMEDWLTAKLAYEGLPSKTYLSKTLAQYTSKTCSNCGFTITSADYDRVLEKLKKTATGWMTTINGKELKVEGQITYYNRYKRQNVVKDLSVELDRLSEESVNNDISSWTKGRSGEALSLLKKRFSHRPVQEKFVCLNCGFETHADEQAALNIARSWLFLRSQEYKKYQTNKTTGKNTDKRAFVETWQSFYRKKLKEVWKPAV

SEQ ID NO: 47953 - protein, 979 aa, synthetic construct
  REGION 1..979: note = engineered CasX variant
QEIKRINKIRRRLVKDSNTKKAGKTGPMKTLLVRVMTPDLRERLENLRKKPENIPQPISNTSRANLNKLLTDYTEMKKAILHVYWEEFQKDPVGLMSRVAQPASKKIDQNKLKPEMDEKGNLTTAGFACSQCGQPLFVYKLEQVSEKGKAYTNYFGRCNVAEHEKLILLAQLKPEKDSDEAVTYSLGKFGQRALDFYSIHVTKESTHPVKPLAQIAGNRYASHPVGKALSDACMGTIASFLSKYQDIIIEHQKVVKGNQKRLESLRELAGKENLEYPSVTLPPQPHTKEGVDAYNEVIARVRMWVNLNLWQKLKLSRDDAKPLLRLKGFPSFPLVERQANEVDWWDMVCNVKKLINEKKEDGKVFWQNLAGYKRQEALRPYLSSEEDRKKGKKFARYQLGDLLWHLEKKHGEDWGKVYDEAWERIDKKVEGLSKHIKLEEERRSEDAQSKAALTDWLRAKASFVIEGLKEADKDEFCRCELKLQKWYGDLRGKPFAIEAENSILDISGFSKQYNCAFIWQKDGVKKLNLYLIINYFKGGKLRFKKIKPEAFEANRFYTVINKKSGEIVPMEVNFNFDDPNLIILPLAFGKRQGREFIWNDLLSLETGSLKLANGRVIEKTLYNRRTRQDEPALFVALTFERREVLDSSNIKPMNLIGVDRGENIPAVIALTDPEGCPLSRFKDSLGNPTHILRIGESYKEKQRTIQAKKEVEQRRAGGYSRKYASKAKNLADDMVRNTARDLLYYAVTQDAMLIFENLSRGFGRQGKRTFMAERQYTRMEDWLTAKLAYEGLPSKTYLSKTLAQYTSKTCSNCGFTITSADYDRVLEKLKKTATGWMTTINGKELKVEGQITYYNRYKRQNVVKDLSVELDRLSEESVNNDISSWTKGRSGEALSLLKKRFSHRPVQEKFVCLNCGFETHADEQAALNIARSWLFLRSQEYKKYQTNKTTGKNTDKRAFVETWQSFYRKKLKEVWKPAV

SEQ ID NO: 47954 - protein, 979 aa, synthetic construct
  REGION 1..979: note = engineered CasX variant
QEIKRINKIRRRLVKDSNTKKAGKTGPMKTLLVRVMTPDLRERLENLRKKPENIPQPISNTSRANLNKLLTDYTEMKKAILHVYWEEFQKDPVGLMSRVAQPASKKIDQNKLKPEMDEKGNLTTAGFACSQCGQPLFVYKLEQVSEKGKAYTNYFGRCNVAEHEKLILLAQLKPEKDSDEAVTYSLGKFGQRALDFYSIHVTKESTHPVKPLAQIAGNRYASSPVGKALSDACMGTIASFLSKYQDIIIEHQKVVKGNQKRLESLRELAGKENLEYPSVTLPPQPHTKEGVDAYNEVIARVRMWVNLNLWQKLKLSRDDAKPLLRLKGFPSFPLVERQANEVDWWDMVCNVKKLINEKKEDGKVFWQNLAGYKRQEALRPYLSSEEDRKKGKKFARYQLGDLLWHLEKKHGEDWGKVYDEAWERIDKKVEGLSKHIKLEEERRSEDAQSKAALTDWLRAKASFVIEGLKEADKDEFCRCELKLQKWYGDLRGKPFAIEAENSILDISGFSKQYNCAFIWQKDGVKKLNLYLIINYFKGGKLRFKKIKPEAFEANRFYTVINKKSGEIVPMEVNFNFDDPNLIILPLAFGKRQGREFIWNDLLSLETGSLKLANGRVIEKTLYNRRTRQDEPALFVALTFERREVLDSSNIKPMNLIGVDRGENIPAVIALTDPEGCPLSRFKDSLGNPTHILRIGESYKEKQRTIQAKKEVEQRRAGGYSRKYASKAKNLADDMVRNTARDLLYYAVTQDAMLIFENLSRGFGRQGKRTFMAERQYTRMEDWLTAKLAYEGLPSKTYLSKTLAQYTSKTCSNCGFTITSADYDRVLEKLKKTATGWMTTINGKELKVEGQITYYNRYKRQNVVKDLSVELDRLSEESVNNDISSWTKGRSGEALSLLKKRFSHRPVQEKFVCLNCGFETHADEQAALNIARSWLFLRSQEYKKYQTNKTTGKNTDKRAFVETWQSFYRKKLKEVWKPAV

SEQ ID NO: 47955 - protein, 979 aa, synthetic construct
  REGION 1..979: note = engineered CasX variant
QEIKRINKIRRRLVKDSNTKKAGKTGPMKTLLVRVMTPDLRERLENLRKKPENIPQPISNTSRANLNKLLTDYTEMKKAILHVYWEEFQKDPVGLMSRVAQPASKKIDQNKLKPEMDEKGNLTTAGFACSQCGQPLFVYKLEQVSEKGKAYTNYFGRCNVAEHEKLILLAQLKPEKDSDEAVTYSLGKFGQRALDFYSIHVTKESTHPVKPLAQIAGNRYASTPVGKALSDACMGTIASFLSKYQDIIIEHQKVVKGNQKRLESLRELAGKENLEYPSVTLPPQPHTKEGVDAYNEVIARVRMWVNLNLWQKLKLSRDDAKPLLRLKGFPSFPLVERQANEVDWWDMVCNVKKLINEKKEDGKVFWQNLAGYKRQEALRPYLSSEEDRKKGKKFARYQLGDLLWHLEKKHGEDWGKVYDEAWERIDKKVEGLSKHIKLEEERRSEDAQSKAALTDWLRAKASFVIEGLKEADKDEFCRCELKLQKWYGDLRGKPFAIEAENSILDISGFSKQYNCAFIWQKDGVKKLNLYLIINYFKGGKLRFKKIKPEAFEANRFYTVINKKSGEIVPMEVNFNFDDPNLIILPLAFGKRQGREFIWNDLLSLETGSLKLANGRVIEKTLYNRRTRQDEPALFVALTFERREVLDSSNIKPMNLIGVDRGENIPAVIALTDPEGCPLSRFKDSLGNPTHILRIGESYKEKQRTIQAKKEVEQRRAGGYSRKYASKAKNLADDMVRNTARDLLYYAVTQDAMLIFENLSRGFGRQGKRTFMAERQYTRMEDWLTAKLAYEGLPSKTYLSKTLAQYTSKTCSNCGFTITSADYDRVLEKLKKTATGWMTTINGKELKVEGQITYYNRYKRQNVVKDLSVELDRLSEESVNNDISSWTKGRSGEALSLLKKRFSHRPVQEKFVCLNCGFETHADEQAALNIARSWLFLRSQEYKKYQTNKTTGKNTDKRAFVETWQSFYRKKLKEVWKPAV

SEQ ID NO: 47956 - protein, 979 aa, synthetic construct
  REGION 1..979: note = engineered CasX variant
QEIKRINKIRRRLVKDSNTKKAGKTGPMKTLLVRVMTPDLRERLENLRKKPENIPQPISNTSRANLNKLLTDYTEMKKAILHVYWEEFQKDPVGLMSRVAQPASKKIDQNKLKPEMDEKGNLTTAGFACSQCGQPLFVYKLEQVSEKGKAYTNYFGRCNVAEHEKLILLAQLKPEKDSDEAVTYSLGKFGQRALDFYSIHVTKESTHPVKPLAQIAGNRYASAPVGKALSDACMGTIASFLSKYQDIIIEHQKVVKGNQKRLESLRELAGKENLEYPSVTLPPQPHTKEGVDAYNEVIARVRMWVNLNLWQKLKLSRDDAKPLLRLKGFPSFPLVERQANEVDWWDMVCNVKKLINEKKEDGKVFWQNLAGYKRQEALRPYLSSEEDRKKGKKFARYQLGDLLWHLEKKHGEDWGKVYDEAWERIDKKVEGLSKHIKLEEERRSEDAQSKAALTDWLRAKASFVIEGLKEADKDEFCRCELKLQKWYGDLRGKPFAIEAENSILDISGFSKQYNCAFIWQKDGVKKLNLYLIINYFKGGKLRFKKIKPEAFEANRFYTVINKKSGEIVPMEVNFNFDDPNLIILPLAFGKRQGREFIWNDLLSLETGSLKLANGRVIEKTLYNRRTRQDEPALFVALTFERREVLDSSNIKPMNLIGVDRGENIPAVIALTDPEGCPLSRFKDSLGNPTHILRIGESYKEKQRTIQAKKEVEQRRAGGYSRKYASKAKNLADDMVRNTARDLLYYAVTQDAMLIFENLSRGFGRQGKRTFMAERQYTRMEDWLTAKLAYEGLPSKTYLSKTLAQYTSKTCSNCGFTITSADYDRVLEKLKKTATGWMTTINGKELKVEGQITYYNRYKRQNVVKDLSVELDRLSEESVNNDISSWTKGRSGEALSLLKKRFSHRPVQEKFVCLNCGFETHADEQAALNIARSWLFLRSQEYKKYQTNKTTGKNTDKRAFVETWQSFYRKKLKEVWKPAV

SEQ ID NO: 47957 - protein, 979 aa, synthetic construct
  REGION 1..979: note = engineered CasX variant
QEIKRINKIRRRLVKDSNTKKAGKTGPMKTLLVRVMTPDLRERLENLRKKPENIPQPISNTSRANLNKLLTDYTEMKKAILHVYWEEFQKDPVGLMSRVAQPASKKIDQNKLKPEMDEKGNLTTAGFACSQCGQPLFVYKLEQVSEKGKAYTNYFGRCNVAEHEKLILLAQLKPEKDSDEAVTYSLGKFGQRALDFYSIHVTKESTHPVKPLAQIAGNRYASVPVGKALSDACMGTIASFLSKYQDIIIEHQKVVKGNQKRLESLRELAGKENLEYPSVTLPPQPHTKEGVDAYNEVIARVRMWVNLNLWQKLKLSRDDAKPLLRLKGFPSFPLVERQANEVDWWDMVCNVKKLINEKKEDGKVFWQNLAGYKRQEALRPYLSSEEDRKKGKKFARYQLGDLLWHLEKKHGEDWGKVYDEAWERIDKKVEGLSKHIKLEEERRSEDAQSKAALTDWLRAKASFVIEGLKEADKDEFCRCELKLQKWYGDLRGKPFAIEAENSILDISGFSKQYNCAFIWQKDGVKKLNLYLIINYFKGGKLRFKKIKPEAFEANRFYTVINKKSGEIVPMEVNFNFDDPNLIILPLAFGKRQGREFIWNDLLSLETGSLKLANGRVIEKTLYNRRTRQDEPALFVALTFERREVLDSSNIKPMNLIGVDRGENIPAVIALTDPEGCPLSRFKDSLGNPTHILRIGESYKEKQRTIQAKKEVEQRRAGGYSRKYASKAKNLADDMVRNTARDLLYYAVTQDAMLIFENLSRGFGRQGKRTFMAERQYTRMEDWLTAKLAYEGLPSKTYLSKTLAQYTSKTCSNCGFTITSADYDRVLEKLKKTATGWMTTINGKELKVEGQITYYNRYKRQNVVKDLSVELDRLSEESVNNDISSWTKGRSGEALSLLKKRFSHRPVQEKFVCLNCGFETHADEQAALNIARSWLFLRSQEYKKYQTNKTTGKNTDKRAFVETWQSFYRKKLKEVWKPAV

SEQ ID NO: 47958 - protein, 979 aa, synthetic construct
  REGION 1..979: note = engineered CasX variant
QEIKRINKIRRRLVKDSNTKKAGKTGPMKTLLVRVMTPDLRERLENLRKKPENIPQPISNTSRANLNKLLTDYTEMKKAILHVYWEEFQKDPVGLMSRVAQPASKKIDQNKLKPEMDEKGNLTTAGFACSQCGQPLFVYKLEQVSEKGKAYTNYFGRCNVAEHEKLIKLAQLKPEKDSDEAVTYSLGKFGQRALDFYSIHVTKESTHPVKPLAQIAGNRYASGPVGKALSDACMGTIASFLSKYQDIIIEHQKVVKGNQKRLESLRELAGKENLEYPSVTLPPQPHTKEGVDAYNEVIARVRMWVNLNLWQKLKLSRDDAKPLLRLKGFPSFPLVERQANEVDWWDMVCNVKKLINEKKEDGKVFWQNLAGYKRQEALRPYLSSEEDRKKGKKFARYQLGDLLWHLEKKHGEDWGKVYDEAWERIDKKVEGLSKHIKLEEERRSEDAQSKAALTDWLRAKASFVIEGLKEADKDEFCRCELKLQKWYGDLRGKPFAIEAENSILDISGFSKQYNCAFIWQKDGVKKLNLYLIINYFKGGKLRFKKIKPEAFEANRFYTVINKKSGEIVPMEVNFNFDDPNLIILPLAFGKRQGREFIWNDLLSLETGSLKLANGRVIEKTLYNRRTRQDEPALFVALTFERREVLDSSNIKPMNLIGVDRGENIPAVIALTDPEGCPLSRFKDSLGNPTHILRIGESYKEKQRTIQAKKEVEQRRAGGYSRKYASKAKNLADDMVRNTARDLLYYAVTQDAMLIFENLSRGFGRQGKRTFMAERQYTRMEDWLTAKLAYEGLPSKTYLSKTLAQYTSKTCSNCGFTITSADYDRVLEKLKKTATGWMTTINGKELKVEGQITYYNRYKRQNVVKDLSVELDRLSEESVNNDISSWTKGRSGEALSLLKKRFSHRPVQEKFVCLNCGFETHADEQAALNIARSWLFLRSQEYKKYQTNKTTGKNTDKRAFVETWQSFYRKKLKEVWKPAV

SEQ ID NO: 47959 - protein, 978 aa, synthetic construct
  REGION 1..978: note = engineered CasX variant
QEIKRINKIRRRLVKDSNTKKAGKTGPMKTLLVRVMTPDLRERLENLRKKPENIPQPISNTSRANLNKLLTDYTEMKKAILHVYWEEFQKDPVGLMSRVAQPASKKIDQNKLKPEMDEKGNLTTAGFACSQCGQPLFVYKLEQVSEKGKAYTNYFGRCNVAEHEKLILLAQLKPEKDSDEAVTYSLGKFGQRALDFYSIHVTKESTHPVKPLAQIAGNRYASPVGKALSDACMGTIASFLSKYQDIIIEHQKVVKGNQKRLESLRELAGKENLEYPSVTLPPQPHTKEGVDAYNEVIARVRMWVNLNLWQKLKLSRDDAKPLLRLKGFPSFPLVERQANEVDWWDMVCNVKKLINEKKEDGKVFWQNLAGYKRQEALRPYLSSEEDRKKGKKFARYQLGDLLWHLEKKHGEDWGKVYDEAWERIDKKVEGLSKHIKLEEERRSEDAQSKAALTDWLRAKASFVIEGLKEADKDEFCRCELKLQKWYGDLRGKPFAIEAENSILDISGFSKQYNCAFIWQKDGVKKLNLYLIINYFKGGKLRFKKIKPEAFEANRFYTVINKKSGEIVPMEVNFNFDDPNLIILPLAFGKRQGREFIWNDLLSLETGSLKLANGRVIEKTLYNRRTRQDEPALFVALTFERREVLDSSNIKPMNLIGVDRGENIPAVIALTDPEGCPLSRFKDSLGNPTHILRIGESYKEKQRTIQAKKEVEQRRAGGYSRKYASKAKNLADDMVRNTARDLLYYAVTQDAMLIFENLSRGFGRQGKRTFMAERQYTRMEDWLTAKLAYEGLPSKTYLSKTLAQYTSKTCSNCGFTITSADYDRVLEKLKKTATGWMTTINGKELKVEGQITYYNRYKRQNVVKDLSVELDRLSEESVNNDISSWTKGRSGEALSLLKKRFSHRPVQEKFVCLNCGFETHADEQAALNIARSWLFLRSQEYKKYQTNKTTGKNTDKRAFVETWQSFYRKKLKEVWKPAV

SEQ ID NO: 47960 - protein, 979 aa, synthetic construct
  REGION 1..979: note = engineered CasX variant
QEIKRINKIRRRLVKDSNTKKAGKTGPMKTLLVRVMTPDLRERLENLRKKPENIPQPISNTSRANLNKLLTDYTEMKKAILHVYWEEFQKDPVGLMSRVAQPASKKIDQNKLKPEMDEKGNLTTAGFACSQCGQPLFVYKLEQVSEKGKAYTNYFGRCNVAEHEKLILLAQLKPEKDSDEAVTYSLGKFGQRALDFYSIHVTKESTHPVKPLAQIAGNRYASYPVGKALSDACMGTIASFLSKYQDIIIEHQKVVKGNQKRLESLRELAGKENLEYPSVTLPPQPHTKEGVDAYNEVIARVRMWVNLNLWQKLKLSRDDAKPLLRLKGFPSFPLVERQANEVDWWDMVCNVKKLINEKKEDGKVFWQNLAGYKRQEALRPYLSSEEDRKKGKKFARYQLGDLLLHLYKKHGEDWGKVYDEAWERIDKKVEGLSKHIKLEEERRSEDAQSKAALTDWLRAKASFVIEGLKEADKDEFCRCELKLQKWYGDLRGKPFAIEAENSILDISGFSKQYNCAFIWQKDGVKKLNLYLIINYFKGGKLRFKKIKPEAFEANRFYTVINKKSGEIVPMEVNFNFDDPNLIILPLAFGKRQGREFIWNDLLSLETGSLKLANGRVIEKTLYNRRTRQDEPALFVALTFERREVLDSSNIKPMNLIGVDRGENIPAVIALTDPEGCPLSRFKDSLGNPTHILRIGESYKEKQRTIQAKKEVEQRRAGGYSRKYASKAKNLADDMVRNTARDLLYYAVTQDAMLIFENLSRGFGRQGKRTFMAERQYTRMEDWLTAKLAYEGLPSKTYLSKTLAQYTSKTCSNCGFTITSADYDRVLEKLKKTATGWMTTINGKELKVEGQITYYNRYKRQNVVKDLSVELDRLSEESVNNDISSWTKGRSGEALSLLKKRFSHRPVQEKFVCLNCGFETHADEQAALNIARSWLFLRSQEYKKYQTNKTTGKNTDKRAFVETWQSFYRKKLKEVWKPAV

SEQ ID NO: 47961 - protein, 979 aa, synthetic construct
  REGION 1..979: note = engineered CasX variant
QEIKRINKIRRRLVKDSNTKKAGKTGPMKTLLVRVMTPDLRERLENLRKKPENIPQPISNTSRANLNKLLTDYTEMKKAILHVYWEEFQKDPVGLMSRVAQPASKKIDQNKLKPEMDEKGNLTTAGFACSQCGQPLFVYKLEQVSEKGKAYTNYFGRCNVAEHEKLILLAQLKPEKDSDEAVTYSLGKFGQRALDFYSIHVTKESTHPVKPLAQIAGNRYASHPVGKALSDACMGTIASFLSKYQDIIIEHQKVVKGNQKRLESLRELAGKENLEYPSVTLPPQPHTKEGVDAYNEVIARVRMWVNLNLWQKLKLSRDDAKPLLRLKGFPSFPLVERQANEVDWWDMVCNVKKLINEKKEDGKVFWQNLAGYKRQEALRPYLSSEEDRKKGKKFARYQLGDLLLHLYKKHGEDWGKVYDEAWERIDKKVEGLSKHIKLEEERRSEDAQSKAALTDWLRAKASFVIEGLKEADKDEFCRCELKLQKWYGDLRGKPFAIEAENSILDISGFSKQYNCAFIWQKDGVKKLNLYLIINYFKGGKLRFKKIKPEAFEANRFYTVINKKSGEIVPMEVNFNFDDPNLIILPLAFGKRQGREFIWNDLLSLETGSLKLANGRVIEKTLYNRRTRQDEPALFVALTFERREVLDSSNIKPMNLIGVDRGENIPAVIALTDPEGCPLSRFKDSLGNPTHILRIGESYKEKQRTIQAKKEVEQRRAGGYSRKYASKAKNLADDMVRNTARDLLYYAVTQDAMLIFENLSRGFGRQGKRTFMAERQYTRMEDWLTAKLAYEGLPSKTYLSKTLAQYTSKTCSNCGFTITSADYDRVLEKLKKTATGWMTTINGKELKVEGQITYYNRYKRQNVVKDLSVELDRLSEESVNNDISSWTKGRSGEALSLLKKRFSHRPVQEKFVCLNCGFETHADEQAALNIARSWLFLRSQEYKKYQTNKTTGKNTDKRAFVETWQSFYRKKLKEVWKPAV

SEQ ID NO: 47962 - protein, 979 aa, synthetic construct
  REGION 1..979: note = engineered CasX variant
QEIKRINKIRRRLVKDSNTKKAGKTGPMKTLLVRVMTPDLRERLENLRKKPENIPQPISNTSRANLNKLLTDYTEMKKAILHVYWEEFQKDPVGLMSRVAQPASKKIDQNKLKPEMDEKGNLTTAGFACSQCGQPLFVYKLEQVSEKGKAYTNYFGRCNVAEHEKLILLAQLKPEKDSDEAVTYSLGKFGQRALDFYSIHVTKESTHPVKPLAQIAGNRYASSPVGKALSDACMGTIASFLSKYQDIIIEHQKVVKGNQKRLESLRELAGKENLEYPSVTLPPQPHTKEGVDAYNEVIARVRMWVNLNLWQKLKLSRDDAKPLLRLKGFPSFPLVERQANEVDWWDMVCNVKKLINEKKEDGKVFWQNLAGYKRQEALRPYLSSEEDRKKGKKFARYQLGDLLLHLYKKHGEDWGKVYDEAWERIDKKVEGLSKHIKLEEERRSEDAQSKAALTDWLRAKASFVIEGLKEADKDEFCRCELKLQKWYGDLRGKPFAIEAENSILDISGFSKQYNCAFIWQKDGVKKLNLYLIINYFKGGKLRFKKIKPEAFEANRFYTVINKKSGEIVPMEVNFNFDDPNLIILPLAFGKRQGREFIWNDLLSLETGSLKLANGRVIEKTLYNRRTRQDEPALFVALTFERREVLDSSNIKPMNLIGVDRGENIPAVIALTDPEGCPLSRFKDSLGNPTHILRIGESYKEKQRTIQAKKEVEQRRAGGYSRKYASKAKNLADDMVRNTARDLLYYAVTQDAMLIFENLSRGFGRQGKRTFMAERQYTRMEDWLTAKLAYEGLPSKTYLSKTLAQYTSKTCSNCGFTITSADYDRVLEKLKKTATGWMTTINGKELKVEGQITYYNRYKRQNVVKDLSVELDRLSEESVNNDISSWTKGRSGEALSLLKKRFSHRPVQEKFVCLNCGFETHADEQAALNIARSWLFLRSQEYKKYQTNKTTGKNTDKRAFVETWQSFYRKKLKEVWKPAV

SEQ ID NO: 47963 - protein, 979 aa, synthetic construct
  REGION 1..979: note = engineered CasX variant
QEIKRINKIRRRLVKDSNTKKAGKTGPMKTLLVRVMTPDLRERLENLRKKPENIPQPISNTSRANLNKLLTDYTEMKKAILHVYWEEFQKDPVGLMSRVAQPASKKIDQNKLKPEMDEKGNLTTAGFACSQCGQPLFVYKLEQVSEKGKAYTNYFGRCNVAEHEKLILLAQLKPEKDSDEAVTYSLGKFGQRALDFYSIHVTKESTHPVKPLAQIAGNRYASTPVGKALSDACMGTIASFLSKYQDIIIEHQKVVKGNQKRLESLRELAGKENLEYPSVTLPPQPHTKEGVDAYNEVIARVRMWVNLNLWQKLKLSRDDAKPLLRLKGFPSFPLVERQANEVDWWDMVCNVKKLINEKKEDGKVFWQNLAGYKRQEALRPYLSSEEDRKKGKKFARYQLGDLLLHLYKKHGEDWGKVYDEAWERIDKKVEGLSKHIKLEEERRSEDAQSKAALTDWLRAKASFVIEGLKEADKDEFCRCELKLQKWYGDLRGKPFAIEAENSILDISGFSKQYNCAFIWQKDGVKKLNLYLIINYFKGGKLRFKKIKPEAFEANRFYTVINKKSGEIVPMEVNFNFDDPNLIILPLAFGKRQGREFIWNDLLSLETGSLKLANGRVIEKTLYNRRTRQDEPALFVALTFERREVLDSSNIKPMNLIGVDRGENIPAVIALTDPEGCPLSRFKDSLGNPTHILRIGESYKEKQRTIQAKKEVEQRRAGGYSRKYASKAKNLADDMVRNTARDLLYYAVTQDAMLIFENLSRGFGRQGKRTFMAERQYTRMEDWLTAKLAYEGLPSKTYLSKTLAQYTSKTCSNCGFTITSADYDRVLEKLKKTATGWMTTINGKELKVEGQITYYNRYKRQNVVKDLSVELDRLSEESVNNDISSWTKGRSGEALSLLKKRFSHRPVQEKFVCLNCGFETHADEQAALNIARSWLFLRSQEYKKYQTNKTTGKNTDKRAFVETWQSFYRKKLKEVWKPAV

SEQ ID NO: 47964 - protein, 979 aa, synthetic construct
  REGION 1..979: note = engineered CasX variant
QEIKRINKIRRRLVKDSNTKKAGKTGPMKTLLVRVMTPDLRERLENLRKKPENIPQPISNTSRANLNKLLTDYTEMKKAILHVYWEEFQKDPVGLMSRVAQPASKKIDQNKLKPEMDEKGNLTTAGFACSQCGQPLFVYKLEQVSEKGKAYTNYFGRCNVAEHEKLILLAQLKPEKDSDEAVTYSLGKFGQRALDFYSIHVTKESTHPVKPLAQIAGNRYASAPVGKALSDACMGTIASFLSKYQDIIIEHQKVVKGNQKRLESLRELAGKENLEYPSVTLPPQPHTKEGVDAYNEVIARVRMWVNLNLWQKLKLSRDDAKPLLRLKGFPSFPLVERQANEVDWWDMVCNVKKLINEKKEDGKVFWQNLAGYKRQEALRPYLSSEEDRKKGKKFARYQLGDLLLHLYKKHGEDWGKVYDEAWERIDKKVEGLSKHIKLEEERRSEDAQSKAALTDWLRAKASFVIEGLKEADKDEFCRCELKLQKWYGDLRGKPFAIEAENSILDISGFSKQYNCAFIWQKDGVKKLNLYLIINYFKGGKLRFKKIKPEAFEANRFYTVINKKSGEIVPMEVNFNFDDPNLIILPLAFGKRQGREFIWNDLLSLETGSLKLANGRVIEKTLYNRRTRQDEPALFVALTFERREVLDSSNIKPMNLIGVDRGENIPAVIALTDPEGCPLSRFKDSLGNPTHILRIGESYKEKQRTIQAKKEVEQRRAGGYSRKYASKAKNLADDMVRNTARDLLYYAVTQDAMLIFENLSRGFGRQGKRTFMAERQYTRMEDWLTAKLAYEGLPSKTYLSKTLAQYTSKTCSNCGFTITSADYDRVLEKLKKTATGWMTTINGKELKVEGQITYYNRYKRQNVVKDLSVELDRLSEESVNNDISSWTKGRSGEALSLLKKRFSHRPVQEKFVCLNCGFETHADEQAALNIARSWLFLRSQEYKKYQTNKTTGKNTDKRAFVETWQSFYRKKLKEVWKPAV

SEQ ID NO: 47965 - protein, 979 aa, synthetic construct
  REGION 1..979: note = engineered CasX variant
QEIKRINKIRRRLVKDSNTKKAGKTGPMKTLLVRVMTPDLRERLENLRKKPENIPQPISNTSRANLNKLLTDYTEMKKAILHVYWEEFQKDPVGLMSRVAQPASKKIDQNKLKPEMDEKGNLTTAGFACSQCGQPLFVYKLEQVSEKGKAYTNYFGRCNVAEHEKLILLAQLKPEKDSDEAVTYSLGKFGQRALDFYSIHVTKESTHPVKPLAQIAGNRYASVPVGKALSDACMGTIASFLSKYQDIIIEHQKVVKGNQKRLESLRELAGKENLEYPSVTLPPQPHTKEGVDAYNEVIARVRMWVNLNLWQKLKLSRDDAKPLLRLKGFPSFPLVERQANEVDWWDMVCNVKKLINEKKEDGKVFWQNLAGYKRQEALRPYLSSEEDRKKGKKFARYQLGDLLLHLYKKHGEDWGKVYDEAWERIDKKVEGLSKHIKLEEERRSEDAQSKAALTDWLRAKASFVIEGLKEADKDEFCRCELKLQKWYGDLRGKPFAIEAENSILDISGFSKQYNCAFIWQKDGVKKLNLYLIINYFKGGKLRFKKIKPEAFEANRFYTVINKKSGEIVPMEVNFNFDDPNLIILPLAFGKRQGREFIWNDLLSLETGSLKLANGRVIEKTLYNRRTRQDEPALFVALTFERREVLDSSNIKPMNLIGVDRGENIPAVIALTDPEGCPLSRFKDSLGNPTHILRIGESYKEKQRTIQAKKEVEQRRAGGYSRKYASKAKNLADDMVRNTARDLLYYAVTQDAMLIFENLSRGFGRQGKRTFMAERQYTRMEDWLTAKLAYEGLPSKTYLSKTLAQYTSKTCSNCGFTITSADYDRVLEKLKKTATGWMTTINGKELKVEGQITYYNRYKRQNVVKDLSVELDRLSEESVNNDISSWTKGRSGEALSLLKKRFSHRPVQEKFVCLNCGFETHADEQAALNIARSWLFLRSQEYKKYQTNKTTGKNTDKRAFVETWQSFYRKKLKEVWKPAV

SEQ ID NO: 47966 - protein, 979 aa, synthetic construct
  REGION 1..979: note = engineered CasX variant
QEIKRINKIRRRLVKDSNTKKAGKTGPMKTLLVRVMTPDLRERLENLRKKPENIPQPISNTSRANLNKLLTDYTEMKKAILHVYWEEFQKDPVGLMSRVAQPASKKIDQNKLKPEMDEKGNLTTAGFACSQCGQPLFVYKLEQVSEKGKAYTNYFGRCNVAEHEKLIKLAQLKPEKDSDEAVTYSLGKFGQRALDFYSIHVTKESTHPVKPLAQIAGNRYASGPVGKALSDACMGTIASFLSKYQDIIIEHQKVVKGNQKRLESLRELAGKENLEYPSVTLPPQPHTKEGVDAYNEVIARVRMWVNLNLWQKLKLSRDDAKPLLRLKGFPSFPLVERQANEVDWWDMVCNVKKLINEKKEDGKVFWQNLAGYKRQEALRPYLSSEEDRKKGKKFARYQLGDLLLHLYKKHGEDWGKVYDEAWERIDKKVEGLSKHIKLEEERRSEDAQSKAALTDWLRAKASFVIEGLKEADKDEFCRCELKLQKWYGDLRGKPFAIEAENSILDISGFSKQYNCAFIWQKDGVKKLNLYLIINYFKGGKLRFKKIKPEAFEANRFYTVINKKSGEIVPMEVNFNFDDPNLIILPLAFGKRQGREFIWNDLLSLETGSLKLANGRVIEKTLYNRRTRQDEPALFVALTFERREVLDSSNIKPMNLIGVDRGENIPAVIALTDPEGCPLSRFKDSLGNPTHILRIGESYKEKQRTIQAKKEVEQRRAGGYSRKYASKAKNLADDMVRNTARDLLYYAVTQDAMLIFENLSRGFGRQGKRTFMAERQYTRMEDWLTAKLAYEGLPSKTYLSKTLAQYTSKTCSNCGFTITSADYDRVLEKLKKTATGWMTTINGKELKVEGQITYYNRYKRQNVVKDLSVELDRLSEESVNNDISSWTKGRSGEALSLLKKRFSHRPVQEKFVCLNCGFETHADEQAALNIARSWLFLRSQEYKKYQTNKTTGKNTDKRAFVETWQSFYRKKLKEVWKPAV

SEQ ID NO: 47967 - protein, 978 aa, synthetic construct
  REGION 1..978: note = engineered CasX variant
QEIKRINKIRRRLVKDSNTKKAGKTGPMKTLLVRVMTPDLRERLENLRKKPENIPQPISNTSRANLNKLLTDYTEMKKAILHVYWEEFQKDPVGLMSRVAQPASKKIDQNKLKPEMDEKGNLTTAGFACSQCGQPLFVYKLEQVSEKGKAYTNYFGRCNVAEHEKLILLAQLKPEKDSDEAVTYSLGKFGQRALDFYSIHVTKESTHPVKPLAQIAGNRYASPVGKALSDACMGTIASFLSKYQDIIIEHQKVVKGNQKRLESLRELAGKENLEYPSVTLPPQPHTKEGVDAYNEVIARVRMWVNLNLWQKLKLSRDDAKPLLRLKGFPSFPLVERQANEVDWWDMVCNVKKLINEKKEDGKVFWQNLAGYKRQEALRPYLSSEEDRKKGKKFARYQLGDLLLHLYKKHGEDWGKVYDEAWERIDKKVEGLSKHIKLEEERRSEDAQSKAALTDWLRAKASFVIEGLKEADKDEFCRCELKLQKWYGDLRGKPFAIEAENSILDISGFSKQYNCAFIWQKDGVKKLNLYLIINYFKGGKLRFKKIKPEAFEANRFYTVINKKSGEIVPMEVNFNFDDPNLIILPLAFGKRQGREFIWNDLLSLETGSLKLANGRVIEKTLYNRRTRQDEPALFVALTFERREVLDSSNIKPMNLIGVDRGENIPAVIALTDPEGCPLSRFKDSLGNPTHILRIGESYKEKQRTIQAKKEVEQRRAGGYSRKYASKAKNLADDMVRNTARDLLYYAVTQDAMLIFENLSRGFGRQGKRTFMAERQYTRMEDWLTAKLAYEGLPSKTYLSKTLAQYTSKTCSNCGFTITSADYDRVLEKLKKTATGWMTTINGKELKVEGQITYYNRYKRQNVVKDLSVELDRLSEESVNNDISSWTKGRSGEALSLLKKRFSHRPVQEKFVCLNCGFETHADEQAALNIARSWLFLRSQEYKKYQTNKTTGKNTDKRAFVETWQSFYRKKLKEVWKPAV

SEQ ID NO: 47968 - protein, 979 aa, synthetic construct
  REGION 1..979: note = engineered CasX variant
QEIKRINKIRRRLVKDSNTKKAGKTGPMKTLLVRVMTPDLRERLENLRKKPENIPQPISNTSRANLNKLLTDYTEMKKAILHVYWEEFQKDPVGLMSRVAQPASKKIDQNKLKPEMDEKGNLTTAGFACSQCGQPLFVYKLEQVSEKGKAYTNYFGRCNVAEHEKLILLAQLKPEKDSDEAVTYSLGKFGQRALDFYSIHVTKESTHPVKPLAQIAGNRYASYPVGKALSDACMGTIASFLSKYQDIIIEHQKVVKGNQKRLESLRELAGKENLEYPSVTLPPQPHTKEGVDAYNEVIARVRMWVNLNLWQKLKLSRDDAKPLLRLKGFPSFPLVERQANEVDWWDMVCNVKKLINEKKEDGKVFWQNLAGYKRQEALRPYLSSEEDRKKGKKFARYQLGDLLLHLEKKHPEDWGKVYDEAWERIDKKVEGLSKHIKLEEERRSEDAQSKAALTDWLRAKASFVIEGLKEADKDEFCRCELKLQKWYGDLRGKPFAIEAENSILDISGFSKQYNCAFIWQKDGVKKLNLYLIINYFKGGKLRFKKIKPEAFEANRFYTVINKKSGEIVPMEVNFNFDDPNLIILPLAFGKRQGREFIWNDLLSLETGSLKLANGRVIEKTLYNRRTRQDEPALFVALTFERREVLDSSNIKPMNLIGVDRGENIPAVIALTDPEGCPLSRFKDSLGNPTHILRIGESYKEKQRTIQAKKEVEQRRAGGYSRKYASKAKNLADDMVRNTARDLLYYAVTQDAMLIFENLSRGFGRQGKRTFMAERQYTRMEDWLTAKLAYEGLPSKTYLSKTLAQYTSKTCSNCGFTITSADYDRVLEKLKKTATGWMTTINGKELKVEGQITYYNRYKRQNVVKDLSVELDRLSEESVNNDISSWTKGRSGEALSLLKKRFSHRPVQEKFVCLNCGFETHADEQAALNIARSWLFLRSQEYKKYQTNKTTGKNTDKRAFVETWQSFYRKKLKEVWKPAV

SEQ ID NO: 47969 - protein, 979 aa, synthetic construct
  REGION 1..979: note = engineered CasX variant
QEIKRINKIRRRLVKDSNTKKAGKTGPMKTLLVRVMTPDLRERLENLRKKPENIPQPISNTSRANLNKLLTDYTEMKKAILHVYWEEFQKDPVGLMSRVAQPASKKIDQNKLKPEMDEKGNLTTAGFACSQCGQPLFVYKLEQVSEKGKAYTNYFGRCNVAEHEKLILLAQLKPEKDSDEAVTYSLGKFGQRALDFYSIHVTKESTHPVKPLAQIAGNRYASHPVGKALSDACMGTIASFLSKYQDIIIEHQKVVKGNQKRLESLRELAGKENLEYPSVTLPPQPHTKEGVDAYNEVIARVRMWVNLNLWQKLKLSRDDAKPLLRLKGFPSFPLVERQANEVDWWDMVCNVKKLINEKKEDGKVFWQNLAGYKRQEALRPYLSSEEDRKKGKKFARYQLGDLLLHLEKKHPEDWGKVYDEAWERIDKKVEGLSKHIKLEEERRSEDAQSKAALTDWLRAKASFVIEGLKEADKDEFCRCELKLQKWYGDLRGKPFAIEAENSILDISGFSKQYNCAFIWQKDGVKKLNLYLIINYFKGGKLRFKKIKPEAFEANRFYTVINKKSGEIVPMEVNFNFDDPNLIILPLAFGKRQGREFIWNDLLSLETGSLKLANGRVIEKTLYNRRTRQDEPALFVALTFERREVLDSSNIKPMNLIGVDRGENIPAVIALTDPEGCPLSRFKDSLGNPTHILRIGESYKEKQRTIQAKKEVEQRRAGGYSRKYASKAKNLADDMVRNTARDLLYYAVTQDAMLIFENLSRGFGRQGKRTFMAERQYTRMEDWLTAKLAYEGLPSKTYLSKTLAQYTSKTCSNCGFTITSADYDRVLEKLKKTATGWMTTINGKELKVEGQITYYNRYKRQNVVKDLSVELDRLSEESVNNDISSWTKGRSGEALSLLKKRFSHRPVQEKFVCLNCGFETHADEQAALNIARSWLFLRSQEYKKYQTNKTTGKNTDKRAFVETWQSFYRKKLKEVWKPAV

SEQ ID NO: 47970 - protein, 979 aa, synthetic construct
  REGION 1..979: note = engineered CasX variant
QEIKRINKIRRRLVKDSNTKKAGKTGPMKTLLVRVMTPDLRERLENLRKKPENIPQPISNTSRANLNKLLTDYTEMKKAILHVYWEEFQKDPVGLMSRVAQPASKKIDQNKLKPEMDEKGNLTTAGFACSQCGQPLFVYKLEQVSEKGKAYTNYFGRCNVAEHEKLILLAQLKPEKDSDEAVTYSLGKFGQRALDFYSIHVTKESTHPVKPLAQIAGNRYASSPVGKALSDACMGTIASFLSKYQDIIIEHQKVVKGNQKRLESLRELAGKENLEYPSVTLPPQPHTKEGVDAYNEVIARVRMWVNLNLWQKLKLSRDDAKPLLRLKGFPSFPLVERQANEVDWWDMVCNVKKLINEKKEDGKVFWQNLAGYKRQEALRPYLSSEEDRKKGKKFARYQLGDLLLHLEKKHPEDWGKVYDEAWERIDKKVEGLSKHIKLEEERRSEDAQSKAALTDWLRAKASFVIEGLKEADKDEFCRCELKLQKWYGDLRGKPFAIEAENSILDISGFSKQYNCAFIWQKDGVKKLNLYLIINYFKGGKLRFKKIKPEAFEANRFYTVINKKSGEIVPMEVNFNFDDPNLIILPLAFGKRQGREFIWNDLLSLETGSLKLANGRVIEKTLYNRRTRQDEPALFVALTFERREVLDSSNIKPMNLIGVDRGENIPAVIALTDPEGCPLSRFKDSLGNPTHILRIGESYKEKQRTIQAKKEVEQRRAGGYSRKYASKAKNLADDMVRNTARDLLYYAVTQDAMLIFENLSRGFGRQGKRTFMAERQYTRMEDWLTAKLAYEGLPSKTYLSKTLAQYTSKTCSNCGFTITSADYDRVLEKLKKTATGWMTTINGKELKVEGQITYYNRYKRQNVVKDLSVELDRLSEESVNNDISSWTKGRSGEALSLLKKRFSHRPVQEKFVCLNCGFETHADEQAALNIARSWLFLRSQEYKKYQTNKTTGKNTDKRAFVETWQSFYRKKLKEVWKPAV

SEQ ID NO: 47971 - protein, 979 aa, synthetic construct
  REGION 1..979: note = engineered CasX variant
QEIKRINKIRRRLVKDSNTKKAGKTGPMKTLLVRVMTPDLRERLENLRKKPENIPQPISNTSRANLNKLLTDYTEMKKAILHVYWEEFQKDPVGLMSRVAQPASKKIDQNKLKPEMDEKGNLTTAGFACSQCGQPLFVYKLEQVSEKGKAYTNYFGRCNVAEHEKLILLAQLKPEKDSDEAVTYSLGKFGQRALDFYSIHVTKESTHPVKPLAQIAGNRYASTPVGKALSDACMGTIASFLSKYQDIIIEHQKVVKGNQKRLESLRELAGKENLEYPSVTLPPQPHTKEGVDAYNEVIARVRMWVNLNLWQKLKLSRDDAKPLLRLKGFPSFPLVERQANEVDWWDMVCNVKKLINEKKEDGKVFWQNLAGYKRQEALRPYLSSEEDRKKGKKFARYQLGDLLLHLEKKHPEDWGKVYDEAWERIDKKVEGLSKHIKLEEERRSEDAQSKAALTDWLRAKASFVIEGLKEADKDEFCRCELKLQKWYGDLRGKPFAIEAENSILDISGFSKQYNCAFIWQKDGVKKLNLYLIINYFKGGKLRFKKIKPEAFEANRFYTVINKKSGEIVPMEVNFNFDDPNLIILPLAFGKRQGREFIWNDLLSLETGSLKLANGRVIEKTLYNRRTRQDEPALFVALTFERREVLDSSNIKPMNLIGVDRGENIPAVIALTDPEGCPLSRFKDSLGNPTHILRIGESYKEKQRTIQAKKEVEQRRAGGYSRKYASKAKNLADDMVRNTARDLLYYAVTQDAMLIFENLSRGFGRQGKRTFMAERQYTRMEDWLTAKLAYEGLPSKTYLSKTLAQYTSKTCSNCGFTITSADYDRVLEKLKKTATGWMTTINGKELKVEGQITYYNRYKRQNVVKDLSVELDRLSEESVNNDISSWTKGRSGEALSLLKKRFSHRPVQEKFVCLNCGFETHADEQAALNIARSWLFLRSQEYKKYQTNKTTGKNTDKRAFVETWQSFYRKKLKEVWKPAV

SEQ ID NO: 47972 - protein, 979 aa, synthetic construct
  REGION 1..979: note = engineered CasX variant
QEIKRINKIRRRLVKDSNTKKAGKTGPMKTLLVRVMTPDLRERLENLRKKPENIPQPISNTSRANLNKLLTDYTEMKKAILHVYWEEFQKDPVGLMSRVAQPASKKIDQNKLKPEMDEKGNLTTAGFACSQCGQPLFVYKLEQVSEKGKAYTNYFGRCNVAEHEKLILLAQLKPEKDSDEAVTYSLGKFGQRALDFYSIHVTKESTHPVKPLAQIAGNRYASAPVGKALSDACMGTIASFLSKYQDIIIEHQKVVKGNQKRLESLRELAGKENLEYPSVTLPPQPHTKEGVDAYNEVIARVRMWVNLNLWQKLKLSRDDAKPLLRLKGFPSFPLVERQANEVDWWDMVCNVKKLINEKKEDGKVFWQNLAGYKRQEALRPYLSSEEDRKKGKKFARYQLGDLLLHLEKKHPEDWGKVYDEAWERIDKKVEGLSKHIKLEEERRSEDAQSKAALTDWLRAKASFVIEGLKEADKDEFCRCELKLQKWYGDLRGKPFAIEAENSILDISGFSKQYNCAFIWQKDGVKKLNLYLIINYFKGGKLRFKKIKPEAFEANRFYTVINKKSGEIVPMEVNFNFDDPNLIILPLAFGKRQGREFIWNDLLSLETGSLKLANGRVIEKTLYNRRTRQDEPALFVALTFERREVLDSSNIKPMNLIGVDRGENIPAVIALTDPEGCPLSRFKDSLGNPTHILRIGESYKEKQRTIQAKKEVEQRRAGGYSRKYASKAKNLADDMVRNTARDLLYYAVTQDAMLIFENLSRGFGRQGKRTFMAERQYTRMEDWLTAKLAYEGLPSKTYLSKTLAQYTSKTCSNCGFTITSADYDRVLEKLKKTATGWMTTINGKELKVEGQITYYNRYKRQNVVKDLSVELDRLSEESVNNDISSWTKGRSGEALSLLKKRFSHRPVQEKFVCLNCGFETHADEQAALNIARSWLFLRSQEYKKYQTNKTTGKNTDKRAFVETWQSFYRKKLKEVWKPAV

SEQ ID NO: 47973 - protein, 979 aa, synthetic construct
  REGION 1..979: note = engineered CasX variant
QEIKRINKIRRRLVKDSNTKKAGKTGPMKTLLVRVMTPDLRERLENLRKKPENIPQPISNTSRANLNKLLTDYTEMKKAILHVYWEEFQKDPVGLMSRVAQPASKKIDQNKLKPEMDEKGNLTTAGFACSQCGQPLFVYKLEQVSEKGKAYTNYFGRCNVAEHEKLILLAQLKPEKDSDEAVTYSLGKFGQRALDFYSIHVTKESTHPVKPLAQIAGNRYASVPVGKALSDACMGTIASFLSKYQDIIIEHQKVVKGNQKRLESLRELAGKENLEYPSVTLPPQPHTKEGVDAYNEVIARVRMWVNLNLWQKLKLSRDDAKPLLRLKGFPSFPLVERQANEVDWWDMVCNVKKLINEKKEDGKVFWQNLAGYKRQEALRPYLSSEEDRKKGKKFARYQLGDLLLHLEKKHPEDWGKVYDEAWERIDKKVEGLSKHIKLEEERRSEDAQSKAALTDWLRAKASFVIEGLKEADKDEFCRCELKLQKWYGDLRGKPFAIEAENSILDISGFSKQYNCAFIWQKDGVKKLNLYLIINYFKGGKLRFKKIKPEAFEANRFYTVINKKSGEIVPMEVNFNFDDPNLIILPLAFGKRQGREFIWNDLLSLETGSLKLANGRVIEKTLYNRRTRQDEPALFVALTFERREVLDSSNIKPMNLIGVDRGENIPAVIALTDPEGCPLSRFKDSLGNPTHILRIGESYKEKQRTIQAKKEVEQRRAGGYSRKYASKAKNLADDMVRNTARDLLYYAVTQDAMLIFENLSRGFGRQGKRTFMAERQYTRMEDWLTAKLAYEGLPSKTYLSKTLAQYTSKTCSNCGFTITSADYDRVLEKLKKTATGWMTTINGKELKVEGQITYYNRYKRQNVVKDLSVELDRLSEESVNNDISSWTKGRSGEALSLLKKRFSHRPVQEKFVCLNCGFETHADEQAALNIARSWLFLRSQEYKKYQTNKTTGKNTDKRAFVETWQSFYRKKLKEVWKPAV

SEQ ID NO: 47974 - protein, 979 aa, synthetic construct
  REGION 1..979: note = engineered CasX variant
QEIKRINKIRRRLVKDSNTKKAGKTGPMKTLLVRVMTPDLRERLENLRKKPENIPQPISNTSRANLNKLLTDYTEMKKAILHVYWEEFQKDPVGLMSRVAQPASKKIDQNKLKPEMDEKGNLTTAGFACSQCGQPLFVYKLEQVSEKGKAYTNYFGRCNVAEHEKLIKLAQLKPEKDSDEAVTYSLGKFGQRALDFYSIHVTKESTHPVKPLAQIAGNRYASGPVGKALSDACMGTIASFLSKYQDIIIEHQKVVKGNQKRLESLRELAGKENLEYPSVTLPPQPHTKEGVDAYNEVIARVRMWVNLNLWQKLKLSRDDAKPLLRLKGFPSFPLVERQANEVDWWDMVCNVKKLINEKKEDGKVFWQNLAGYKRQEALRPYLSSEEDRKKGKKFARYQLGDLLLHLEKKHPEDWGKVYDEAWERIDKKVEGLSKHIKLEEERRSEDAQSKAALTDWLRAKASFVIEGLKEADKDEFCRCELKLQKWYGDLRGKPFAIEAENSILDISGFSKQYNCAFIWQKDGVKKLNLYLIINYFKGGKLRFKKIKPEAFEANRFYTVINKKSGEIVPMEVNFNFDDPNLIILPLAFGKRQGREFIWNDLLSLETGSLKLANGRVIEKTLYNRRTRQDEPALFVALTFERREVLDSSNIKPMNLIGVDRGENIPAVIALTDPEGCPLSRFKDSLGNPTHILRIGESYKEKQRTIQAKKEVEQRRAGGYSRKYASKAKNLADDMVRNTARDLLYYAVTQDAMLIFENLSRGFGRQGKRTFMAERQYTRMEDWLTAKLAYEGLPSKTYLSKTLAQYTSKTCSNCGFTITSADYDRVLEKLKKTATGWMTTINGKELKVEGQITYYNRYKRQNVVKDLSVELDRLSEESVNNDISSWTKGRSGEALSLLKKRFSHRPVQEKFVCLNCGFETHADEQAALNIARSWLFLRSQEYKKYQTNKTTGKNTDKRAFVETWQSFYRKKLKEVWKPAV

SEQ ID NO: 47975 - protein, 978 aa, synthetic construct
  REGION 1..978: note = engineered CasX variant
QEIKRINKIRRRLVKDSNTKKAGKTGPMKTLLVRVMTPDLRERLENLRKKPENIPQPISNTSRANLNKLLTDYTEMKKAILHVYWEEFQKDPVGLMSRVAQPASKKIDQNKLKPEMDEKGNLTTAGFACSQCGQPLFVYKLEQVSEKGKAYTNYFGRCNVAEHEKLILLAQLKPEKDSDEAVTYSLGKFGQRALDFYSIHVTKESTHPVKPLAQIAGNRYASPVGKALSDACMGTIASFLSKYQDIIIEHQKVVKGNQKRLESLRELAGKENLEYPSVTLPPQPHTKEGVDAYNEVIARVRMWVNLNLWQKLKLSRDDAKPLLRLKGFPSFPLVERQANEVDWWDMVCNVKKLINEKKEDGKVFWQNLAGYKRQEALRPYLSSEEDRKKGKKFARYQLGDLLLHLEKKHPEDWGKVYDEAWERIDKKVEGLSKHIKLEEERRSEDAQSKAALTDWLRAKASFVIEGLKEADKDEFCRCELKLQKWYGDLRGKPFAIEAENSILDISGFSKQYNCAFIWQKDGVKKLNLYLIINYFKGGKLRFKKIKPEAFEANRFYTVINKKSGEIVPMEVNFNFDDPNLIILPLAFGKRQGREFIWNDLLSLETGSLKLANGRVIEKTLYNRRTRQDEPALFVALTFERREVLDSSNIKPMNLIGVDRGENIPAVIALTDPEGCPLSRFKDSLGNPTHILRIGESYKEKQRTIQAKKEVEQRRAGGYSRKYASKAKNLADDMVRNTARDLLYYAVTQDAMLIFENLSRGFGRQGKRTFMAERQYTRMEDWLTAKLAYEGLPSKTYLSKTLAQYTSKTCSNCGFTITSADYDRVLEKLKKTATGWMTTINGKELKVEGQITYYNRYKRQNVVKDLSVELDRLSEESVNNDISSWTKGRSGEALSLLKKRFSHRPVQEKFVCLNCGFETHADEQAALNIARSWLFLRSQEYKKYQTNKTTGKNTDKRAFVETWQSFYRKKLKEVWKPAV

SEQ ID NO: 47976 - protein, 980 aa, synthetic construct
  REGION 1..980: note = engineered CasX variant
QEIKRINKIRRRLVKDSNTKKAGKTGPMKTLLVRVMTPDLRERLENLRKKPENIPQPISNTSRANLNKLLTDYTEMKKAILHVYWEEFQKDPVGLMSRVAQPASKKIDQNKLKPEMDEKGNLTTAGFACSQCGQPLFVYKLEQVSEKGKAYTNYFGRCNVAEHEKLILLAQLKPEKDSDEAVTYSLGKFGQRALDFYSIHVTKESTHPVKPLAQIAGNRYASYPVGKALSDACMGTIASFLSKYQDIIIEHQKVVKGNQKRLESLRELAGKENLEYPSVTLPPQPHTKEGVDAYNEVIARVRMWVNLNLWQKLKLSRDDAKPLLRLKGFPSFPLVERQANEVDWWDMVCNVKKLINEKKEDGKVFWQNLAGYKRQEALRPYLSSEEDRKKGKKFARYQLGDLLLHLEKKHGERDWGKVYDEAWERIDKKVEGLSKHIKLEEERRSEDAQSKAALTDWLRAKASFVIEGLKEADKDEFCRCELKLQKWYGDLRGKPFAIEAENSILDISGFSKQYNCAFIWQKDGVKKLNLYLIINYFKGGKLRFKKIKPEAFEANRFYTVINKKSGEIVPMEVNFNFDDPNLIILPLAFGKRQGREFIWNDLLSLETGSLKLANGRVIEKTLYNRRTRQDEPALFVALTFERREVLDSSNIKPMNLIGVDRGENIPAVIALTDPEGCPLSRFKDSLGNPTHILRIGESYKEKQRTIQAKKEVEQRRAGGYSRKYASKAKNLADDMVRNTARDLLYYAVTQDAMLIFENLSRGFGRQGKRTFMAERQYTRMEDWLTAKLAYEGLPSKTYLSKTLAQYTSKTCSNCGFTITSADYDRVLEKLKKTATGWMTTINGKELKVEGQITYYNRYKRQNVVKDLSVELDRLSEESVNNDISSWTKGRSGEALSLLKKRFSHRPVQEKFVCLNCGFETHADEQAALNIARSWLFLRSQEYKKYQTNKTTGKNTDKRAFVETWQSFYRKKLKEVWKPAV

SEQ ID NO: 47977 - protein, 980 aa, synthetic construct
  REGION 1..980: note = engineered CasX variant
QEIKRINKIRRRLVKDSNTKKAGKTGPMKTLLVRVMTPDLRERLENLRKKPENIPQPISNTSRANLNKLLTDYTEMKKAILHVYWEEFQKDPVGLMSRVAQPASKKIDQNKLKPEMDEKGNLTTAGFACSQCGQPLFVYKLEQVSEKGKAYTNYFGRCNVAEHEKLILLAQLKPEKDSDEAVTYSLGKFGQRALDFYSIHVTKESTHPVKPLAQIAGNRYASHPVGKALSDACMGTIASFLSKYQDIIIEHQKVVKGNQKRLESLRELAGKENLEYPSVTLPPQPHTKEGVDAYNEVIARVRMWVNLNLWQKLKLSRDDAKPLLRLKGFPSFPLVERQANEVDWWDMVCNVKKLINEKKEDGKVFWQNLAGYKRQEALRPYLSSEEDRKKGKKFARYQLGDLLLHLEKKHGERDWGKVYDEAWERIDKKVEGLSKHIKLEEERRSEDAQSKAALTDWLRAKASFVIEGLKEADKDEFCRCELKLQKWYGDLRGKPFAIEAENSILDISGFSKQYNCAFIWQKDGVKKLNLYLIINYFKGGKLRFKKIKPEAFEANRFYTVINKKSGEIVPMEVNFNFDDPNLIILPLAFGKRQGREFIWNDLLSLETGSLKLANGRVIEKTLYNRRTRQDEPALFVALTFERREVLDSSNIKPMNLIGVDRGENIPAVIALTDPEGCPLSRFKDSLGNPTHILRIGESYKEKQRTIQAKKEVEQRRAGGYSRKYASKAKNLADDMVRNTARDLLYYAVTQDAMLIFENLSRGFGRQGKRTFMAERQYTRMEDWLTAKLAYEGLPSKTYLSKTLAQYTSKTCSNCGFTITSADYDRVLEKLKKTATGWMTTINGKELKVEGQITYYNRYKRQNVVKDLSVELDRLSEESVNNDISSWTKGRSGEALSLLKKRFSHRPVQEKFVCLNCGFETHADEQAALNIARSWLFLRSQEYKKYQTNKTTGKNTDKRAFVETWQSFYRKKLKEVWKPAV

SEQ ID NO: 47978 - protein, 980 aa, synthetic construct
  REGION 1..980: note = engineered CasX variant
QEIKRINKIRRRLVKDSNTKKAGKTGPMKTLLVRVMTPDLRERLENLRKKPENIPQPISNTSRANLNKLLTDYTEMKKAILHVYWEEFQKDPVGLMSRVAQPASKKIDQNKLKPEMDEKGNLTTAGFACSQCGQPLFVYKLEQVSEKGKAYTNYFGRCNVAEHEKLILLAQLKPEKDSDEAVTYSLGKFGQRALDFYSIHVTKESTHPVKPLAQIAGNRYASSPVGKALSDACMGTIASFLSKYQDIIIEHQKVVKGNQKRLESLRELAGKENLEYPSVTLPPQPHTKEGVDAYNEVIARVRMWVNLNLWQKLKLSRDDAKPLLRLKGFPSFPLVERQANEVDWWDMVCNVKKLINEKKEDGKVFWQNLAGYKRQEALRPYLSSEEDRKKGKKFARYQLGDLLLHLEKKHGERDWGKVYDEAWERIDKKVEGLSKHIKLEEERRSEDAQSKAALTDWLRAKASFVIEGLKEADKDEFCRCELKLQKWYGDLRGKPFAIEAENSILDISGFSKQYNCAFIWQKDGVKKLNLYLIINYFKGGKLRFKKIKPEAFEANRFYTVINKKSGEIVPMEVNFNFDDPNLIILPLAFGKRQGREFIWNDLLSLETGSLKLANGRVIEKTLYNRRTRQDEPALFVALTFERREVLDSSNIKPMNLIGVDRGENIPAVIALTDPEGCPLSRFKDSLGNPTHILRIGESYKEKQRTIQAKKEVEQRRAGGYSRKYASKAKNLADDMVRNTARDLLYYAVTQDAMLIFENLSRGFGRQGKRTFMAERQYTRMEDWLTAKLAYEGLPSKTYLSKTLAQYTSKTCSNCGFTITSADYDRVLEKLKKTATGWMTTINGKELKVEGQITYYNRYKRQNVVKDLSVELDRLSEESVNNDISSWTKGRSGEALSLLKKRFSHRPVQEKFVCLNCGFETHADEQAALNIARSWLFLRSQEYKKYQTNKTTGKNTDKRAFVETWQSFYRKKLKEVWKPAV

SEQ ID NO: 47979 - protein, 980 aa, synthetic construct
  REGION 1..980: note = engineered CasX variant
QEIKRINKIRRRLVKDSNTKKAGKTGPMKTLLVRVMTPDLRERLENLRKKPENIPQPISNTSRANLNKLLTDYTEMKKAILHVYWEEFQKDPVGLMSRVAQPASKKIDQNKLKPEMDEKGNLTTAGFACSQCGQPLFVYKLEQVSEKGKAYTNYFGRCNVAEHEKLILLAQLKPEKDSDEAVTYSLGKFGQRALDFYSIHVTKESTHPVKPLAQIAGNRYASTPVGKALSDACMGTIASFLSKYQDIIIEHQKVVKGNQKRLESLRELAGKENLEYPSVTLPPQPHTKEGVDAYNEVIARVRMWVNLNLWQKLKLSRDDAKPLLRLKGFPSFPLVERQANEVDWWDMVCNVKKLINEKKEDGKVFWQNLAGYKRQEALRPYLSSEEDRKKGKKFARYQLGDLLLHLEKKHGERDWGKVYDEAWERIDKKVEGLSKHIKLEEERRSEDAQSKAALTDWLRAKASFVIEGLKEADKDEFCRCELKLQKWYGDLRGKPFAIEAENSILDISGFSKQYNCAFIWQKDGVKKLNLYLIINYFKGGKLRFKKIKPEAFEANRFYTVINKKSGEIVPMEVNFNFDDPNLIILPLAFGKRQGREFIWNDLLSLETGSLKLANGRVIEKTLYNRRTRQDEPALFVALTFERREVLDSSNIKPMNLIGVDRGENIPAVIALTDPEGCPLSRFKDSLGNPTHILRIGESYKEKQRTIQAKKEVEQRRAGGYSRKYASKAKNLADDMVRNTARDLLYYAVTQDAMLIFENLSRGFGRQGKRTFMAERQYTRMEDWLTAKLAYEGLPSKTYLSKTLAQYTSKTCSNCGFTITSADYDRVLEKLKKTATGWMTTINGKELKVEGQITYYNRYKRQNVVKDLSVELDRLSEESVNNDISSWTKGRSGEALSLLKKRFSHRPVQEKFVCLNCGFETHADEQAALNIARSWLFLRSQEYKKYQTNKTTGKNTDKRAFVETWQSFYRKKLKEVWKPAV

SEQ ID NO: 47980 - protein, 980 aa, synthetic construct
  REGION 1..980: note = engineered CasX variant
QEIKRINKIRRRLVKDSNTKKAGKTGPMKTLLVRVMTPDLRERLENLRKKPENIPQPISNTSRANLNKLLTDYTEMKKAILHVYWEEFQKDPVGLMSRVAQPASKKIDQNKLKPEMDEKGNLTTAGFACSQCGQPLFVYKLEQVSEKGKAYTNYFGRCNVAEHEKLILLAQLKPEKDSDEAVTYSLGKFGQRALDFYSIHVTKESTHPVKPLAQIAGNRYASAPVGKALSDACMGTIASFLSKYQDIIIEHQKVVKGNQKRLESLRELAGKENLEYPSVTLPPQPHTKEGVDAYNEVIARVRMWVNLNLWQKLKLSRDDAKPLLRLKGFPSFPLVERQANEVDWWDMVCNVKKLINEKKEDGKVFWQNLAGYKRQEALRPYLSSEEDRKKGKKFARYQLGDLLLHLEKKHGERDWGKVYDEAWERIDKKVEGLSKHIKLEEERRSEDAQSKAALTDWLRAKASFVIEGLKEADKDEFCRCELKLQKWYGDLRGKPFAIEAENSILDISGFSKQYNCAFIWQKDGVKKLNLYLIINYFKGGKLRFKKIKPEAFEANRFYTVINKKSGEIVPMEVNFNFDDPNLIILPLAFGKRQGREFIWNDLLSLETGSLKLANGRVIEKTLYNRRTRQDEPALFVALTFERREVLDSSNIKPMNLIGVDRGENIPAVIALTDPEGCPLSRFKDSLGNPTHILRIGESYKEKQRTIQAKKEVEQRRAGGYSRKYASKAKNLADDMVRNTARDLLYYAVTQDAMLIFENLSRGFGRQGKRTFMAERQYTRMEDWLTAKLAYEGLPSKTYLSKTLAQYTSKTCSNCGFTITSADYDRVLEKLKKTATGWMTTINGKELKVEGQITYYNRYKRQNVVKDLSVELDRLSEESVNNDISSWTKGRSGEALSLLKKRFSHRPVQEKFVCLNCGFETHADEQAALNIARSWLFLRSQEYKKYQTNKTTGKNTDKRAFVETWQSFYRKKLKEVWKPAV

SEQ ID NO: 47981 - protein, 980 aa, synthetic construct
  REGION 1..980: note = engineered CasX variant
QEIKRINKIRRRLVKDSNTKKAGKTGPMKTLLVRVMTPDLRERLENLRKKPENIPQPISNTSRANLNKLLTDYTEMKKAILHVYWEEFQKDPVGLMSRVAQPASKKIDQNKLKPEMDEKGNLTTAGFACSQCGQPLFVYKLEQVSEKGKAYTNYFGRCNVAEHEKLILLAQLKPEKDSDEAVTYSLGKFGQRALDFYSIHVTKESTHPVKPLAQIAGNRYASVPVGKALSDACMGTIASFLSKYQDIIIEHQKVVKGNQKRLESLRELAGKENLEYPSVTLPPQPHTKEGVDAYNEVIARVRMWVNLNLWQKLKLSRDDAKPLLRLKGFPSFPLVERQANEVDWWDMVCNVKKLINEKKEDGKVFWQNLAGYKRQEALRPYLSSEEDRKKGKKFARYQLGDLLLHLEKKHGERDWGKVYDEAWERIDKKVEGLSKHIKLEEERRSEDAQSKAALTDWLRAKASFVIEGLKEADKDEFCRCELKLQKWYGDLRGKPFAIEAENSILDISGFSKQYNCAFIWQKDGVKKLNLYLIINYFKGGKLRFKKIKPEAFEANRFYTVINKKSGEIVPMEVNFNFDDPNLIILPLAFGKRQGREFIWNDLLSLETGSLKLANGRVIEKTLYNRRTRQDEPALFVALTFERREVLDSSNIKPMNLIGVDRGENIPAVIALTDPEGCPLSRFKDSLGNPTHILRIGESYKEKQRTIQAKKEVEQRRAGGYSRKYASKAKNLADDMVRNTARDLLYYAVTQDAMLIFENLSRGFGRQGKRTFMAERQYTRMEDWLTAKLAYEGLPSKTYLSKTLAQYTSKTCSNCGFTITSADYDRVLEKLKKTATGWMTTINGKELKVEGQITYYNRYKRQNVVKDLSVELDRLSEESVNNDISSWTKGRSGEALSLLKKRFSHRPVQEKFVCLNCGFETHADEQAALNIARSWLFLRSQEYKKYQTNKTTGKNTDKRAFVETWQSFYRKKLKEVWKPAV

SEQ ID NO: 47982 - protein, 980 aa, synthetic construct
  REGION 1..980: note = engineered CasX variant
QEIKRINKIRRRLVKDSNTKKAGKTGPMKTLLVRVMTPDLRERLENLRKKPENIPQPISNTSRANLNKLLTDYTEMKKAILHVYWEEFQKDPVGLMSRVAQPASKKIDQNKLKPEMDEKGNLTTAGFACSQCGQPLFVYKLEQVSEKGKAYTNYFGRCNVAEHEKLIKLAQLKPEKDSDEAVTYSLGKFGQRALDFYSIHVTKESTHPVKPLAQIAGNRYASGPVGKALSDACMGTIASFLSKYQDIIIEHQKVVKGNQKRLESLRELAGKENLEYPSVTLPPQPHTKEGVDAYNEVIARVRMWVNLNLWQKLKLSRDDAKPLLRLKGFPSFPLVERQANEVDWWDMVCNVKKLINEKKEDGKVFWQNLAGYKRQEALRPYLSSEEDRKKGKKFARYQLGDLLLHLEKKHGERDWGKVYDEAWERIDKKVEGLSKHIKLEEERRSEDAQSKAALTDWLRAKASFVIEGLKEADKDEFCRCELKLQKWYGDLRGKPFAIEAENSILDISGFSKQYNCAFIWQKDGVKKLNLYLIINYFKGGKLRFKKIKPEAFEANRFYTVINKKSGEIVPMEVNFNFDDPNLIILPLAFGKRQGREFIWNDLLSLETGSLKLANGRVIEKTLYNRRTRQDEPALFVALTFERREVLDSSNIKPMNLIGVDRGENIPAVIALTDPEGCPLSRFKDSLGNPTHILRIGESYKEKQRTIQAKKEVEQRRAGGYSRKYASKAKNLADDMVRNTARDLLYYAVTQDAMLIFENLSRGFGRQGKRTFMAERQYTRMEDWLTAKLAYEGLPSKTYLSKTLAQYTSKTCSNCGFTITSADYDRVLEKLKKTATGWMTTINGKELKVEGQITYYNRYKRQNVVKDLSVELDRLSEESVNNDISSWTKGRSGEALSLLKKRFSHRPVQEKFVCLNCGFETHADEQAALNIARSWLFLRSQEYKKYQTNKTTGKNTDKRAFVETWQSFYRKKLKEVWKPAV

SEQ ID NO: 47983 - protein, 979 aa, synthetic construct
  REGION 1..979: note = engineered CasX variant
QEIKRINKIRRRLVKDSNTKKAGKTGPMKTLLVRVMTPDLRERLENLRKKPENIPQPISNTSRANLNKLLTDYTEMKKAILHVYWEEFQKDPVGLMSRVAQPASKKIDQNKLKPEMDEKGNLTTAGFACSQCGQPLFVYKLEQVSEKGKAYTNYFGRCNVAEHEKLILLAQLKPEKDSDEAVTYSLGKFGQRALDFYSIHVTKESTHPVKPLAQIAGNRYASPVGKALSDACMGTIASFLSKYQDIIIEHQKVVKGNQKRLESLRELAGKENLEYPSVTLPPQPHTKEGVDAYNEVIARVRMWVNLNLWQKLKLSRDDAKPLLRLKGFPSFPLVERQANEVDWWDMVCNVKKLINEKKEDGKVFWQNLAGYKRQEALRPYLSSEEDRKKGKKFARYQLGDLLLHLEKKHGERDWGKVYDEAWERIDKKVEGLSKHIKLEEERRSEDAQSKAALTDWLRAKASFVIEGLKEADKDEFCRCELKLQKWYGDLRGKPFAIEAENSILDISGFSKQYNCAFIWQKDGVKKLNLYLIINYFKGGKLRFKKIKPEAFEANRFYTVINKKSGEIVPMEVNFNFDDPNLIILPLAFGKRQGREFIWNDLLSLETGSLKLANGRVIEKTLYNRRTRQDEPALFVALTFERREVLDSSNIKPMNLIGVDRGENIPAVIALTDPEGCPLSRFKDSLGNPTHILRIGESYKEKQRTIQAKKEVEQRRAGGYSRKYASKAKNLADDMVRNTARDLLYYAVTQDAMLIFENLSRGFGRQGKRTFMAERQYTRMEDWLTAKLAYEGLPSKTYLSKTLAQYTSKTCSNCGFTITSADYDRVLEKLKKTATGWMTTINGKELKVEGQITYYNRYKRQNVVKDLSVELDRLSEESVNNDISSWTKGRSGEALSLLKKRFSHRPVQEKFVCLNCGFETHADEQAALNIARSWLFLRSQEYKKYQTNKTTGKNTDKRAFVETWQSFYRKKLKEVWKPAV

SEQ ID NO: 47984 - protein, 980 aa, synthetic construct
  REGION 1..980: note = engineered CasX variant
QEIKRINKIRRRLVKDSNTKKAGKTGPMKTLLVRVMTPDLRERLENLRKKPENIPQPISNTSRANLNKLLTDYTEMKKAILHVYWEEFQKDPVGLMSRVAQPASKKIDQNKLKPEMDEKGNLTTAGFACSQCGQPLFVYKLEQVSEKGKAYTNYFGRCNVAEHEKLILLAQLKPEKDSDEAVTYSLGKFGQRALDFYSIHVTKESTHPVKPLAQIAGNRYASYPVGKALSDACMGTIASFLSKYQDIIIEHQKVVKGNQKRLESLRELAGKENLEYPSVTLPPQPHTKEGVDAYNEVIARVRMWVNLNLWQKLKLSRDDAKPLLRLKGFPSFPLVERQANEVDWWDMVCNVKKLINEKKEDGKVFWQNLAGYKRQEALRPYLSSEEDRKKGKKFARYQLGDLLLHLEKKHGEYDWGKVYDEAWERIDKKVEGLSKHIKLEEERRSEDAQSKAALTDWLRAKASFVIEGLKEADKDEFCRCELKLQKWYGDLRGKPFAIEAENSILDISGFSKQYNCAFIWQKDGVKKLNLYLIINYFKGGKLRFKKIKPEAFEANRFYTVINKKSGEIVPMEVNFNFDDPNLIILPLAFGKRQGREFIWNDLLSLETGSLKLANGRVIEKTLYNRRTRQDEPALFVALTFERREVLDSSNIKPMNLIGVDRGENIPAVIALTDPEGCPLSRFKDSLGNPTHILRIGESYKEKQRTIQAKKEVEQRRAGGYSRKYASKAKNLADDMVRNTARDLLYYAVTQDAMLIFENLSRGFGRQGKRTFMAERQYTRMEDWLTAKLAYEGLPSKTYLSKTLAQYTSKTCSNCGFTITSADYDRVLEKLKKTATGWMTTINGKELKVEGQITYYNRYKRQNVVKDLSVELDRLSEESVNNDISSWTKGRSGEALSLLKKRFSHRPVQEKFVCLNCGFETHADEQAALNIARSWLFLRSQEYKKYQTNKTTGKNTDKRAFVETWQSFYRKKLKEVWKPAV

SEQ ID NO: 47985 - protein, 980 aa, synthetic construct
  REGION 1..980: note = engineered CasX variant
QEIKRINKIRRRLVKDSNTKKAGKTGPMKTLLVRVMTPDLRERLENLRKKPENIPQPISNTSRANLNKLLTDYTEMKKAILHVYWEEFQKDPVGLMSRVAQPASKKIDQNKLKPEMDEKGNLTTAGFACSQCGQPLFVYKLEQVSEKGKAYTNYFGRCNVAEHEKLILLAQLKPEKDSDEAVTYSLGKFGQRALDFYSIHVTKESTHPVKPLAQIAGNRYASHPVGKALSDACMGTIASFLSKYQDIIIEHQKVVKGNQKRLESLRELAGKENLEYPSVTLPPQPHTKEGVDAYNEVIARVRMWVNLNLWQKLKLSRDDAKPLLRLKGFPSFPLVERQANEVDWWDMVCNVKKLINEKKEDGKVFWQNLAGYKRQEALRPYLSSEEDRKKGKKFARYQLGDLLLHLEKKHGEYDWGKVYDEAWERIDKKVEGLSKHIKLEEERRSEDAQSKAALTDWLRAKASFVIEGLKEADKDEFCRCELKLQKWYGDLRGKPFAIEAENSILDISGFSKQYNCAFIWQKDGVKKLNLYLIINYFKGGKLRFKKIKPEAFEANRFYTVINKKSGEIVPMEVNFNFDDPNLIILPLAFGKRQGREFIWNDLLSLETGSLKLANGRVIEKTLYNRRTRQDEPALFVALTFERREVLDSSNIKPMNLIGVDRGENIPAVIALTDPEGCPLSRFKDSLGNPTHILRIGESYKEKQRTIQAKKEVEQRRAGGYSRKYASKAKNLADDMVRNTARDLLYYAVTQDAMLIFENLSRGFGRQGKRTFMAERQYTRMEDWLTAKLAYEGLPSKTYLSKTLAQYTSKTCSNCGFTITSADYDRVLEKLKKTATGWMTTINGKELKVEGQITYYNRYKRQNVVKDLSVELDRLSEESVNNDISSWTKGRSGEALSLLKKRFSHRPVQEKFVCLNCGFETHADEQAALNIARSWLFLRSQEYKKYQTNKTTGKNTDKRAFVETWQSFYRKKLKEVWKPAV

SEQ ID NO: 47986 - protein, 980 aa, synthetic construct
  REGION 1..980: note = engineered CasX variant
QEIKRINKIRRRLVKDSNTKKAGKTGPMKTLLVRVMTPDLRERLENLRKKPENIPQPISNTSRANLNKLLTDYTEMKKAILHVYWEEFQKDPVGLMSRVAQPASKKIDQNKLKPEMDEKGNLTTAGFACSQCGQPLFVYKLEQVSEKGKAYTNYFGRCNVAEHEKLILLAQLKPEKDSDEAVTYSLGKFGQRALDFYSIHVTKESTHPVKPLAQIAGNRYASSPVGKALSDACMGTIASFLSKYQDIIIEHQKVVKGNQKRLESLRELAGKENLEYPSVTLPPQPHTKEGVDAYNEVIARVRMWVNLNLWQKLKLSRDDAKPLLRLKGFPSFPLVERQANEVDWWDMVCNVKKLINEKKEDGKVFWQNLAGYKRQEALRPYLSSEEDRKKGKKFARYQLGDLLLHLEKKHGEYDWGKVYDEAWERIDKKVEGLSKHIKLEEERRSEDAQSKAALTDWLRAKASFVIEGLKEADKDEFCRCELKLQKWYGDLRGKPFAIEAENSILDISGFSKQYNCAFIWQKDGVKKLNLYLIINYFKGGKLRFKKIKPEAFEANRFYTVINKKSGEIVPMEVNFNFDDPNLIILPLAFGKRQGREFIWNDLLSLETGSLKLANGRVIEKTLYNRRTRQDEPALFVALTFERREVLDSSNIKPMNLIGVDRGENIPAVIALTDPEGCPLSRFKDSLGNPTHILRIGESYKEKQRTIQAKKEVEQRRAGGYSRKYASKAKNLADDMVRNTARDLLYYAVTQDAMLIFENLSRGFGRQGKRTFMAERQYTRMEDWLTAKLAYEGLPSKTYLSKTLAQYTSKTCSNCGFTITSADYDRVLEKLKKTATGWMTTINGKELKVEGQITYYNRYKRQNVVKDLSVELDRLSEESVNNDISSWTKGRSGEALSLLKKRFSHRPVQEKFVCLNCGFETHADEQAALNIARSWLFLRSQEYKKYQTNKTTGKNTDKRAFVETWQSFYRKKLKEVWKPAV

SEQ ID NO: 47987 - protein, 980 aa, synthetic construct
  REGION 1..980: note = engineered CasX variant
QEIKRINKIRRRLVKDSNTKKAGKTGPMKTLLVRVMTPDLRERLENLRKKPENIPQPISNTSRANLNKLLTDYTEMKKAILHVYWEEFQKDPVGLMSRVAQPASKKIDQNKLKPEMDEKGNLTTAGFACSQCGQPLFVYKLEQVSEKGKAYTNYFGRCNVAEHEKLILLAQLKPEKDSDEAVTYSLGKFGQRALDFYSIHVTKESTHPVKPLAQIAGNRYASTPVGKALSDACMGTIASFLSKYQDIIIEHQKVVKGNQKRLESLRELAGKENLEYPSVTLPPQPHTKEGVDAYNEVIARVRMWVNLNLWQKLKLSRDDAKPLLRLKGFPSFPLVERQANEVDWWDMVCNVKKLINEKKEDGKVFWQNLAGYKRQEALRPYLSSEEDRKKGKKFARYQLGDLLLHLEKKHGEYDWGKVYDEAWERIDKKVEGLSKHIKLEEERRSEDAQSKAALTDWLRAKASFVIEGLKEADKDEFCRCELKLQKWYGDLRGKPFAIEAENSILDISGFSKQYNCAFIWQKDGVKKLNLYLIINYFKGGKLRFKKIKPEAFEANRFYTVINKKSGEIVPMEVNFNFDDPNLIILPLAFGKRQGREFIWNDLLSLETGSLKLANGRVIEKTLYNRRTRQDEPALFVALTFERREVLDSSNIKPMNLIGVDRGENIPAVIALTDPEGCPLSRFKDSLGNPTHILRIGESYKEKQRTIQAKKEVEQRRAGGYSRKYASKAKNLADDMVRNTARDLLYYAVTQDAMLIFENLSRGFGRQGKRTFMAERQYTRMEDWLTAKLAYEGLPSKTYLSKTLAQYTSKTCSNCGFTITSADYDRVLEKLKKTATGWMTTINGKELKVEGQITYYNRYKRQNVVKDLSVELDRLSEESVNNDISSWTKGRSGEALSLLKKRFSHRPVQEKFVCLNCGFETHADEQAALNIARSWLFLRSQEYKKYQTNKTTGKNTDKRAFVETWQSFYRKKLKEVWKPAV

SEQ ID NO: 47988 - protein, 980 aa, synthetic construct
  REGION 1..980: note = engineered CasX variant
QEIKRINKIRRRLVKDSNTKKAGKTGPMKTLLVRVMTPDLRERLENLRKKPENIPQPISNTSRANLNKLLTDYTEMKKAILHVYWEEFQKDPVGLMSRVAQPASKKIDQNKLKPEMDEKGNLTTAGFACSQCGQPLFVYKLEQVSEKGKAYTNYFGRCNVAEHEKLILLAQLKPEKDSDEAVTYSLGKFGQRALDFYSIHVTKESTHPVKPLAQIAGNRYASAPVGKALSDACMGTIASFLSKYQDIIIEHQKVVKGNQKRLESLRELAGKENLEYPSVTLPPQPHTKEGVDAYNEVIARVRMWVNLNLWQKLKLSRDDAKPLLRLKGFPSFPLVERQANEVDWWDMVCNVKKLINEKKEDGKVFWQNLAGYKRQEALRPYLSSEEDRKKGKKFARYQLGDLLLHLEKKHGEYDWGKVYDEAWERIDKKVEGLSKHIKLEEERRSEDAQSKAALTDWLRAKASFVIEGLKEADKDEFCRCELKLQKWYGDLRGKPFAIEAENSILDISGFSKQYNCAFIWQKDGVKKLNLYLIINYFKGGKLRFKKIKPEAFEANRFYTVINKKSGEIVPMEVNFNFDDPNLIILPLAFGKRQGREFIWNDLLSLETGSLKLANGRVIEKTLYNRRTRQDEPALFVALTFERREVLDSSNIKPMNLIGVDRGENIPAVIALTDPEGCPLSRFKDSLGNPTHILRIGESYKEKQRTIQAKKEVEQRRAGGYSRKYASKAKNLADDMVRNTARDLLYYAVTQDAMLIFENLSRGFGRQGKRTFMAERQYTRMEDWLTAKLAYEGLPSKTYLSKTLAQYTSKTCSNCGFTITSADYDRVLEKLKKTATGWMTTINGKELKVEGQITYYNRYKRQNVVKDLSVELDRLSEESVNNDISSWTKGRSGEALSLLKKRFSHRPVQEKFVCLNCGFETHADEQAALNIARSWLFLRSQEYKKYQTNKTTGKNTDKRAFVETWQSFYRKKLKEVWKPAV

SEQ ID NO: 47989 - protein, 980 aa, synthetic construct
  REGION 1..980: note = engineered CasX variant
QEIKRINKIRRRLVKDSNTKKAGKTGPMKTLLVRVMTPDLRERLENLRKKPENIPQPISNTSRANLNKLLTDYTEMKKAILHVYWEEFQKDPVGLMSRVAQPASKKIDQNKLKPEMDEKGNLTTAGFACSQCGQPLFVYKLEQVSEKGKAYTNYFGRCNVAEHEKLILLAQLKPEKDSDEAVTYSLGKFGQRALDFYSIHVTKESTHPVKPLAQIAGNRYASVPVGKALSDACMGTIASFLSKYQDIIIEHQKVVKGNQKRLESLRELAGKENLEYPSVTLPPQPHTKEGVDAYNEVIARVRMWVNLNLWQKLKLSRDDAKPLLRLKGFPSFPLVERQANEVDWWDMVCNVKKLINEKKEDGKVFWQNLAGYKRQEALRPYLSSEEDRKKGKKFARYQLGDLLLHLEKKHGEYDWGKVYDEAWERIDKKVEGLSKHIKLEEERRSEDAQSKAALTDWLRAKASFVIEGLKEADKDEFCRCELKLQKWYGDLRGKPFAIEAENSILDISGFSKQYNCAFIWQKDGVKKLNLYLIINYFKGGKLRFKKIKPEAFEANRFYTVINKKSGEIVPMEVNFNFDDPNLIILPLAFGKRQGREFIWNDLLSLETGSLKLANGRVIEKTLYNRRTRQDEPALFVALTFERREVLDSSNIKPMNLIGVDRGENIPAVIALTDPEGCPLSRFKDSLGNPTHILRIGESYKEKQRTIQAKKEVEQRRAGGYSRKYASKAKNLADDMVRNTARDLLYYAVTQDAMLIFENLSRGFGRQGKRTFMAERQYTRMEDWLTAKLAYEGLPSKTYLSKTLAQYTSKTCSNCGFTITSADYDRVLEKLKKTATGWMTTINGKELKVEGQITYYNRYKRQNVVKDLSVELDRLSEESVNNDISSWTKGRSGEALSLLKKRFSHRPVQEKFVCLNCGFETHADEQAALNIARSWLFLRSQEYKKYQTNKTTGKNTDKRAFVETWQSFYRKKLKEVWKPAV

SEQ ID NO: 47990 - protein, 980 aa, synthetic construct
  REGION 1..980: note = engineered CasX variant
QEIKRINKIRRRLVKDSNTKKAGKTGPMKTLLVRVMTPDLRERLENLRKKPENIPQPISNTSRANLNKLLTDYTEMKKAILHVYWEEFQKDPVGLMSRVAQPASKKIDQNKLKPEMDEKGNLTTAGFACSQCGQPLFVYKLEQVSEKGKAYTNYFGRCNVAEHEKLIKLAQLKPEKDSDEAVTYSLGKFGQRALDFYSIHVTKESTHPVKPLAQIAGNRYASGPVGKALSDACMGTIASFLSKYQDIIIEHQKVVKGNQKRLESLRELAGKENLEYPSVTLPPQPHTKEGVDAYNEVIARVRMWVNLNLWQKLKLSRDDAKPLLRLKGFPSFPLVERQANEVDWWDMVCNVKKLINEKKEDGKVFWQNLAGYKRQEALRPYLSSEEDRKKGKKFARYQLGDLLLHLEKKHGEYDWGKVYDEAWERIDKKVEGLSKHIKLEEERRSEDAQSKAALTDWLRAKASFVIEGLKEADKDEFCRCELKLQKWYGDLRGKPFAIEAENSILDISGFSKQYNCAFIWQKDGVKKLNLYLIINYFKGGKLRFKKIKPEAFEANRFYTVINKKSGEIVPMEVNFNFDDPNLIILPLAFGKRQGREFIWNDLLSLETGSLKLANGRVIEKTLYNRRTRQDEPALFVALTFERREVLDSSNIKPMNLIGVDRGENIPAVIALTDPEGCPLSRFKDSLGNPTHILRIGESYKEKQRTIQAKKEVEQRRAGGYSRKYASKAKNLADDMVRNTARDLLYYAVTQDAMLIFENLSRGFGRQGKRTFMAERQYTRMEDWLTAKLAYEGLPSKTYLSKTLAQYTSKTCSNCGFTITSADYDRVLEKLKKTATGWMTTINGKELKVEGQITYYNRYKRQNVVKDLSVELDRLSEESVNNDISSWTKGRSGEALSLLKKRFSHRPVQEKFVCLNCGFETHADEQAALNIARSWLFLRSQEYKKYQTNKTTGKNTDKRAFVETWQSFYRKKLKEVWKPAV

SEQ ID NO: 47991 - protein, 979 aa, synthetic construct
  REGION 1..979: note = engineered CasX variant
QEIKRINKIRRRLVKDSNTKKAGKTGPMKTLLVRVMTPDLRERLENLRKKPENIPQPISNTSRANLNKLLTDYTEMKKAILHVYWEEFQKDPVGLMSRVAQPASKKIDQNKLKPEMDEKGNLTTAGFACSQCGQPLFVYKLEQVSEKGKAYTNYFGRCNVAEHEKLILLAQLKPEKDSDEAVTYSLGKFGQRALDFYSIHVTKESTHPVKPLAQIAGNRYASPVGKALSDACMGTIASFLSKYQDIIIEHQKVVKGNQKRLESLRELAGKENLEYPSVTLPPQPHTKEGVDAYNEVIARVRMWVNLNLWQKLKLSRDDAKPLLRLKGFPSFPLVERQANEVDWWDMVCNVKKLINEKKEDGKVFWQNLAGYKRQEALRPYLSSEEDRKKGKKFARYQLGDLLLHLEKKHGEYDWGKVYDEAWERIDKKVEGLSKHIKLEEERRSEDAQSKAALTDWLRAKASFVIEGLKEADKDEFCRCELKLQKWYGDLRGKPFAIEAENSILDISGFSKQYNCAFIWQKDGVKKLNLYLIINYFKGGKLRFKKIKPEAFEANRFYTVINKKSGEIVPMEVNFNFDDPNLIILPLAFGKRQGREFIWNDLLSLETGSLKLANGRVIEKTLYNRRTRQDEPALFVALTFERREVLDSSNIKPMNLIGVDRGENIPAVIALTDPEGCPLSRFKDSLGNPTHILRIGESYKEKQRTIQAKKEVEQRRAGGYSRKYASKAKNLADDMVRNTARDLLYYAVTQDAMLIFENLSRGFGRQGKRTFMAERQYTRMEDWLTAKLAYEGLPSKTYLSKTLAQYTSKTCSNCGFTITSADYDRVLEKLKKTATGWMTTINGKELKVEGQITYYNRYKRQNVVKDLSVELDRLSEESVNNDISSWTKGRSGEALSLLKKRFSHRPVQEKFVCLNCGFETHADEQAALNIARSWLFLRSQEYKKYQTNKTTGKNTDKRAFVETWQSFYRKKLKEVWKPAV

SEQ ID NO: 47992 - protein, 979 aa, synthetic construct
  REGION 1..979: note = engineered CasX variant
QEIKRINKIRRRLVKDSNTKKAGKTGPMKTLLVRVMTPDLRERLENLRKKPENIPQPISNTSRANLNKLLTDYTEMKKAILHVYWEEFQKDPVGLMSRVAQPASKKIDQNKLKPEMDEKGNLTTAGFACSQCGQPLFVYKLEQVSEKGKAYTNYFGRCNVAEHEKLILLAQLKPEKDSDEAVTYSLGKFGQRALDFYSIHVTKESTHPVKPLAQIAGNRYASYPVGKALSDACMGTIASFLSKYQDIIIEHQKVVKGNQKRLESLRELAGKENLEYPSVTLPPQPHTKEGVDAYNEVIARVRMWVNLNLWQKLKLSRDDAKPLLRLKGFPSFPLVERQANEVDWWDMVCNVKKLINEKKEDGKVFWQNLAGYKRQEALRPYLSSEEDRKKGKKFARYQLGDLLLHLEKKHGEDWGDVYDEAWERIDKKVEGLSKHIKLEEERRSEDAQSKAALTDWLRAKASFVIEGLKEADKDEFCRCELKLQKWYGDLRGKPFAIEAENSILDISGFSKQYNCAFIWQKDGVKKLNLYLIINYFKGGKLRFKKIKPEAFEANRFYTVINKKSGEIVPMEVNFNFDDPNLIILPLAFGKRQGREFIWNDLLSLETGSLKLANGRVIEKTLYNRRTRQDEPALFVALTFERREVLDSSNIKPMNLIGVDRGENIPAVIALTDPEGCPLSRFKDSLGNPTHILRIGESYKEKQRTIQAKKEVEQRRAGGYSRKYASKAKNLADDMVRNTARDLLYYAVTQDAMLIFENLSRGFGRQGKRTFMAERQYTRMEDWLTAKLAYEGLPSKTYLSKTLAQYTSKTCSNCGFTITSADYDRVLEKLKKTATGWMTTINGKELKVEGQITYYNRYKRQNVVKDLSVELDRLSEESVNNDISSWTKGRSGEALSLLKKRFSHRPVQEKFVCLNCGFETHADEQAALNIARSWLFLRSQEYKKYQTNKTTGKNTDKRAFVETWQSFYRKKLKEVWKPAV

SEQ ID NO: 47993 - protein, 979 aa, synthetic construct
  REGION 1..979: note = engineered CasX variant
QEIKRINKIRRRLVKDSNTKKAGKTGPMKTLLVRVMTPDLRERLENLRKKPENIPQPISNTSRANLNKLLTDYTEMKKAILHVYWEEFQKDPVGLMSRVAQPASKKIDQNKLKPEMDEKGNLTTAGFACSQCGQPLFVYKLEQVSEKGKAYTNYFGRCNVAEHEKLILLAQLKPEKDSDEAVTYSLGKFGQRALDFYSIHVTKESTHPVKPLAQIAGNRYASHPVGKALSDACMGTIASFLSKYQDIIIEHQKVVKGNQKRLESLRELAGKENLEYPSVTLPPQPHTKEGVDAYNEVIARVRMWVNLNLWQKLKLSRDDAKPLLRLKGFPSFPLVERQANEVDWWDMVCNVKKLINEKKEDGKVFWQNLAGYKRQEALRPYLSSEEDRKKGKKFARYQLGDLLLHLEKKHGEDWGDVYDEAWERIDKKVEGLSKHIKLEEERRSEDAQSKAALTDWLRAKASFVIEGLKEADKDEFCRCELKLQKWYGDLRGKPFAIEAENSILDISGFSKQYNCAFIWQKDGVKKLNLYLIINYFKGGKLRFKKIKPEAFEANRFYTVINKKSGEIVPMEVNFNFDDPNLIILPLAFGKRQGREFIWNDLLSLETGSLKLANGRVIEKTLYNRRTRQDEPALFVALTFERREVLDSSNIKPMNLIGVDRGENIPAVIALTDPEGCPLSRFKDSLGNPTHILRIGESYKEKQRTIQAKKEVEQRRAGGYSRKYASKAKNLADDMVRNTARDLLYYAVTQDAMLIFENLSRGFGRQGKRTFMAERQYTRMEDWLTAKLAYEGLPSKTYLSKTLAQYTSKTCSNCGFTITSADYDRVLEKLKKTATGWMTTINGKELKVEGQITYYNRYKRQNVVKDLSVELDRLSEESVNNDISSWTKGRSGEALSLLKKRFSHRPVQEKFVCLNCGFETHADEQAALNIARSWLFLRSQEYKKYQTNKTTGKNTDKRAFVETWQSFYRKKLKEVWKPAV

SEQ ID NO: 47994 - protein, 979 aa, synthetic construct
  REGION 1..979: note = engineered CasX variant
QEIKRINKIRRRLVKDSNTKKAGKTGPMKTLLVRVMTPDLRERLENLRKKPENIPQPISNTSRANLNKLLTDYTEMKKAILHVYWEEFQKDPVGLMSRVAQPASKKIDQNKLKPEMDEKGNLTTAGFACSQCGQPLFVYKLEQVSEKGKAYTNYFGRCNVAEHEKLILLAQLKPEKDSDEAVTYSLGKFGQRALDFYSIHVTKESTHPVKPLAQIAGNRYASSPVGKALSDACMGTIASFLSKYQDIIIEHQKVVKGNQKRLESLRELAGKENLEYPSVTLPPQPHTKEGVDAYNEVIARVRMWVNLNLWQKLKLSRDDAKPLLRLKGFPSFPLVERQANEVDWWDMVCNVKKLINEKKEDGKVFWQNLAGYKRQEALRPYLSSEEDRKKGKKFARYQLGDLLLHLEKKHGEDWGDVYDEAWERIDKKVEGLSKHIKLEEERRSEDAQSKAALTDWLRAKASFVIEGLKEADKDEFCRCELKLQKWYGDLRGKPFAIEAENSILDISGFSKQYNCAFIWQKDGVKKLNLYLIINYFKGGKLRFKKIKPEAFEANRFYTVINKKSGEIVPMEVNFNFDDPNLIILPLAFGKRQGREFIWNDLLSLETGSLKLANGRVIEKTLYNRRTRQDEPALFVALTFERREVLDSSNIKPMNLIGVDRGENIPAVIALTDPEGCPLSRFKDSLGNPTHILRIGESYKEKQRTIQAKKEVEQRRAGGYSRKYASKAKNLADDMVRNTARDLLYYAVTQDAMLIFENLSRGFGRQGKRTFMAERQYTRMEDWLTAKLAYEGLPSKTYLSKTLAQYTSKTCSNCGFTITSADYDRVLEKLKKTATGWMTTINGKELKVEGQITYYNRYKRQNVVKDLSVELDRLSEESVNNDISSWTKGRSGEALSLLKKRFSHRPVQEKFVCLNCGFETHADEQAALNIARSWLFLRSQEYKKYQTNKTTGKNTDKRAFVETWQSFYRKKLKEVWKPAV

SEQ ID NO: 47995 - protein, 979 aa, synthetic construct
  REGION 1..979: note = engineered CasX variant
QEIKRINKIRRRLVKDSNTKKAGKTGPMKTLLVRVMTPDLRERLENLRKKPENIPQPISNTSRANLNKLLTDYTEMKKAILHVYWEEFQKDPVGLMSRVAQPASKKIDQNKLKPEMDEKGNLTTAGFACSQCGQPLFVYKLEQVSEKGKAYTNYFGRCNVAEHEKLILLAQLKPEKDSDEAVTYSLGKFGQRALDFYSIHVTKESTHPVKPLAQIAGNRYASTPVGKALSDACMGTIASFLSKYQDIIIEHQKVVKGNQKRLESLRELAGKENLEYPSVTLPPQPHTKEGVDAYNEVIARVRMWVNLNLWQKLKLSRDDAKPLLRLKGFPSFPLVERQANEVDWWDMVCNVKKLINEKKEDGKVFWQNLAGYKRQEALRPYLSSEEDRKKGKKFARYQLGDLLLHLEKKHGEDWGDVYDEAWERIDKKVEGLSKHIKLEEERRSEDAQSKAALTDWLRAKASFVIEGLKEADKDEFCRCELKLQKWYGDLRGKPFAIEAENSILDISGFSKQYNCAFIWQKDGVKKLNLYLIINYFKGGKLRFKKIKPEAFEANRFYTVINKKSGEIVPMEVNFNFDDPNLIILPLAFGKRQGREFIWNDLLSLETGSLKLANGRVIEKTLYNRRTRQDEPALFVALTFERREVLDSSNIKPMNLIGVDRGENIPAVIALTDPEGCPLSRFKDSLGNPTHILRIGESYKEKQRTIQAKKEVEQRRAGGYSRKYASKAKNLADDMVRNTARDLLYYAVTQDAMLIFENLSRGFGRQGKRTFMAERQYTRMEDWLTAKLAYEGLPSKTYLSKTLAQYTSKTCSNCGFTITSADYDRVLEKLKKTATGWMTTINGKELKVEGQITYYNRYKRQNVVKDLSVELDRLSEESVNNDISSWTKGRSGEALSLLKKRFSHRPVQEKFVCLNCGFETHADEQAALNIARSWLFLRSQEYKKYQTNKTTGKNTDKRAFVETWQSFYRKKLKEVWKPAV

SEQ ID NO: 47996 - protein, 979 aa, synthetic construct
  REGION 1..979: note = engineered CasX variant
QEIKRINKIRRRLVKDSNTKKAGKTGPMKTLLVRVMTPDLRERLENLRKKPENIPQPISNTSRANLNKLLTDYTEMKKAILHVYWEEFQKDPVGLMSRVAQPASKKIDQNKLKPEMDEKGNLTTAGFACSQCGQPLFVYKLEQVSEKGKAYTNYFGRCNVAEHEKLILLAQLKPEKDSDEAVTYSLGKFGQRALDFYSIHVTKESTHPVKPLAQIAGNRYASAPVGKALSDACMGTIASFLSKYQDIIIEHQKVVKGNQKRLESLRELAGKENLEYPSVTLPPQPHTKEGVDAYNEVIARVRMWVNLNLWQKLKLSRDDAKPLLRLKGFPSFPLVERQANEVDWWDMVCNVKKLINEKKEDGKVFWQNLAGYKRQEALRPYLSSEEDRKKGKKFARYQLGDLLLHLEKKHGEDWGDVYDEAWERIDKKVEGLSKHIKLEEERRSEDAQSKAALTDWLRAKASFVIEGLKEADKDEFCRCELKLQKWYGDLRGKPFAIEAENSILDISGFSKQYNCAFIWQKDGVKKLNLYLIINYFKGGKLRFKKIKPEAFEANRFYTVINKKSGEIVPMEVNFNFDDPNLIILPLAFGKRQGREFIWNDLLSLETGSLKLANGRVIEKTLYNRRTRQDEPALFVALTFERREVLDSSNIKPMNLIGVDRGENIPAVIALTDPEGCPLSRFKDSLGNPTHILRIGESYKEKQRTIQAKKEVEQRRAGGYSRKYASKAKNLADDMVRNTARDLLYYAVTQDAMLIFENLSRGFGRQGKRTFMAERQYTRMEDWLTAKLAYEGLPSKTYLSKTLAQYTSKTCSNCGFTITSADYDRVLEKLKKTATGWMTTINGKELKVEGQITYYNRYKRQNVVKDLSVELDRLSEESVNNDISSWTKGRSGEALSLLKKRFSHRPVQEKFVCLNCGFETHADEQAALNIARSWLFLRSQEYKKYQTNKTTGKNTDKRAFVETWQSFYRKKLKEVWKPAV

SEQ ID NO: 47997 - protein, 979 aa, synthetic construct
  REGION 1..979: note = engineered CasX variant
QEIKRINKIRRRLVKDSNTKKAGKTGPMKTLLVRVMTPDLRERLENLRKKPENIPQPISNTSRANLNKLLTDYTEMKKAILHVYWEEFQKDPVGLMSRVAQPASKKIDQNKLKPEMDEKGNLTTAGFACSQCGQPLFVYKLEQVSEKGKAYTNYFGRCNVAEHEKLILLAQLKPEKDSDEAVTYSLGKFGQRALDFYSIHVTKESTHPVKPLAQIAGNRYASVPVGKALSDACMGTIASFLSKYQDIIIEHQKVVKGNQKRLESLRELAGKENLEYPSVTLPPQPHTKEGVDAYNEVIARVRMWVNLNLWQKLKLSRDDAKPLLRLKGFPSFPLVERQANEVDWWDMVCNVKKLINEKKEDGKVFWQNLAGYKRQEALRPYLSSEEDRKKGKKFARYQLGDLLLHLEKKHGEDWGDVYDEAWERIDKKVEGLSKHIKLEEERRSEDAQSKAALTDWLRAKASFVIEGLKEADKDEFCRCELKLQKWYGDLRGKPFAIEAENSILDISGFSKQYNCAFIWQKDGVKKLNLYLIINYFKGGKLRFKKIKPEAFEANRFYTVINKKSGEIVPMEVNFNFDDPNLIILPLAFGKRQGREFIWNDLLSLETGSLKLANGRVIEKTLYNRRTRQDEPALFVALTFERREVLDSSNIKPMNLIGVDRGENIPAVIALTDPEGCPLSRFKDSLGNPTHILRIGESYKEKQRTIQAKKEVEQRRAGGYSRKYASKAKNLADDMVRNTARDLLYYAVTQDAMLIFENLSRGFGRQGKRTFMAERQYTRMEDWLTAKLAYEGLPSKTYLSKTLAQYTSKTCSNCGFTITSADYDRVLEKLKKTATGWMTTINGKELKVEGQITYYNRYKRQNVVKDLSVELDRLSEESVNNDISSWTKGRSGEALSLLKKRFSHRPVQEKFVCLNCGFETHADEQAALNIARSWLFLRSQEYKKYQTNKTTGKNTDKRAFVETWQSFYRKKLKEVWKPAV

SEQ ID NO: 47998 - protein, 979 aa, synthetic construct
  REGION 1..979: note = engineered CasX variant
QEIKRINKIRRRLVKDSNTKKAGKTGPMKTLLVRVMTPDLRERLENLRKKPENIPQPISNTSRANLNKLLTDYTEMKKAILHVYWEEFQKDPVGLMSRVAQPASKKIDQNKLKPEMDEKGNLTTAGFACSQCGQPLFVYKLEQVSEKGKAYTNYFGRCNVAEHEKLIKLAQLKPEKDSDEAVTYSLGKFGQRALDFYSIHVTKESTHPVKPLAQIAGNRYASGPVGKALSDACMGTIASFLSKYQDIIIEHQKVVKGNQKRLESLRELAGKENLEYPSVTLPPQPHTKEGVDAYNEVIARVRMWVNLNLWQKLKLSRDDAKPLLRLKGFPSFPLVERQANEVDWWDMVCNVKKLINEKKEDGKVFWQNLAGYKRQEALRPYLSSEEDRKKGKKFARYQLGDLLLHLEKKHGEDWGDVYDEAWERIDKKVEGLSKHIKLEEERRSEDAQSKAALTDWLRAKASFVIEGLKEADKDEFCRCELKLQKWYGDLRGKPFAIEAENSILDISGFSKQYNCAFIWQKDGVKKLNLYLIINYFKGGKLRFKKIKPEAFEANRFYTVINKKSGEIVPMEVNFNFDDPNLIILPLAFGKRQGREFIWNDLLSLETGSLKLANGRVIEKTLYNRRTRQDEPALFVALTFERREVLDSSNIKPMNLIGVDRGENIPAVIALTDPEGCPLSRFKDSLGNPTHILRIGESYKEKQRTIQAKKEVEQRRAGGYSRKYASKAKNLADDMVRNTARDLLYYAVTQDAMLIFENLSRGFGRQGKRTFMAERQYTRMEDWLTAKLAYEGLPSKTYLSKTLAQYTSKTCSNCGFTITSADYDRVLEKLKKTATGWMTTINGKELKVEGQITYYNRYKRQNVVKDLSVELDRLSEESVNNDISSWTKGRSGEALSLLKKRFSHRPVQEKFVCLNCGFETHADEQAALNIARSWLFLRSQEYKKYQTNKTTGKNTDKRAFVETWQSFYRKKLKEVWKPAV

SEQ ID NO: 47999 - protein, 978 aa, synthetic construct
  REGION 1..978: note = engineered CasX variant
QEIKRINKIRRRLVKDSNTKKAGKTGPMKTLLVRVMTPDLRERLENLRKKPENIPQPISNTSRANLNKLLTDYTEMKKAILHVYWEEFQKDPVGLMSRVAQPASKKIDQNKLKPEMDEKGNLTTAGFACSQCGQPLFVYKLEQVSEKGKAYTNYFGRCNVAEHEKLILLAQLKPEKDSDEAVTYSLGKFGQRALDFYSIHVTKESTHPVKPLAQIAGNRYASPVGKALSDACMGTIASFLSKYQDIIIEHQKVVKGNQKRLESLRELAGKENLEYPSVTLPPQPHTKEGVDAYNEVIARVRMWVNLNLWQKLKLSRDDAKPLLRLKGFPSFPLVERQANEVDWWDMVCNVKKLINEKKEDGKVFWQNLAGYKRQEALRPYLSSEEDRKKGKKFARYQLGDLLLHLEKKHGEDWGDVYDEAWERIDKKVEGLSKHIKLEEERRSEDAQSKAALTDWLRAKASFVIEGLKEADKDEFCRCELKLQKWYGDLRGKPFAIEAENSILDISGFSKQYNCAFIWQKDGVKKLNLYLIINYFKGGKLRFKKIKPEAFEANRFYTVINKKSGEIVPMEVNFNFDDPNLIILPLAFGKRQGREFIWNDLLSLETGSLKLANGRVIEKTLYNRRTRQDEPALFVALTFERREVLDSSNIKPMNLIGVDRGENIPAVIALTDPEGCPLSRFKDSLGNPTHILRIGESYKEKQRTIQAKKEVEQRRAGGYSRKYASKAKNLADDMVRNTARDLLYYAVTQDAMLIFENLSRGFGRQGKRTFMAERQYTRMEDWLTAKLAYEGLPSKTYLSKTLAQYTSKTCSNCGFTITSADYDRVLEKLKKTATGWMTTINGKELKVEGQITYYNRYKRQNVVKDLSVELDRLSEESVNNDISSWTKGRSGEALSLLKKRFSHRPVQEKFVCLNCGFETHADEQAALNIARSWLFLRSQEYKKYQTNKTTGKNTDKRAFVETWQSFYRKKLKEVWKPAV

SEQ ID NO: 48000 - protein, 979 aa, synthetic construct
  REGION 1..979: note = engineered CasX variant
QEIKRINKIRRRLVKDSNTKKAGKTGPMKTLLVRVMTPDLRERLENLRKKPENIPQPISNTSRANLNKLLTDYTEMKKAILHVYWEEFQKDPVGLMSRVAQPASKKIDQNKLKPEMDEKGNLTTAGFACSQCGQPLFVYKLEQVSEKGKAYTNYFGRCNVAEHEKLILLAQLKPEKDSDEAVTYSLGKFGQRALDFYSIHVTKESTHPVKPLAQIAGNRYASYPVGKALSDACMGTIASFLSKYQDIIIEHQKVVKGNQKRLESLRELAGKENLEYPSVTLPPQPHTKEGVDAYNEVIARVRMWVNLNLWQKLKLSRDDAKPLLRLKGFPSFPLVERQANEVDWWDMVCNVKKLINEKKEDGKVFWQNLAGYKRQEALRPYLSSEEDRKKGKKFARYQLGDLLLHLEKKHGEDWGKVYGEAWERIDKKVEGLSKHIKLEEERRSEDAQSKAALTDWLRAKASFVIEGLKEADKDEFCRCELKLQKWYGDLRGKPFAIEAENSILDISGFSKQYNCAFIWQKDGVKKLNLYLIINYFKGGKLRFKKIKPEAFEANRFYTVINKKSGEIVPMEVNFNFDDPNLIILPLAFGKRQGREFIWNDLLSLETGSLKLANGRVIEKTLYNRRTRQDEPALFVALTFERREVLDSSNIKPMNLIGVDRGENIPAVIALTDPEGCPLSRFKDSLGNPTHILRIGESYKEKQRTIQAKKEVEQRRAGGYSRKYASKAKNLADDMVRNTARDLLYYAVTQDAMLIFENLSRGFGRQGKRTFMAERQYTRMEDWLTAKLAYEGLPSKTYLSKTLAQYTSKTCSNCGFTITSADYDRVLEKLKKTATGWMTTINGKELKVEGQITYYNRYKRQNVVKDLSVELDRLSEESVNNDISSWTKGRSGEALSLLKKRFSHRPVQEKFVCLNCGFETHADEQAALNIARSWLFLRSQEYKKYQTNKTTGKNTDKRAFVETWQSFYRKKLKEVWKPAV

SEQ ID NO: 48001 - protein, 979 aa, synthetic construct
  REGION 1..979: note = engineered CasX variant
QEIKRINKIRRRLVKDSNTKKAGKTGPMKTLLVRVMTPDLRERLENLRKKPENIPQPISNTSRANLNKLLTDYTEMKKAILHVYWEEFQKDPVGLMSRVAQPASKKIDQNKLKPEMDEKGNLTTAGFACSQCGQPLFVYKLEQVSEKGKAYTNYFGRCNVAEHEKLILLAQLKPEKDSDEAVTYSLGKFGQRALDFYSIHVTKESTHPVKPLAQIAGNRYASHPVGKALSDACMGTIASFLSKYQDIIIEHQKVVKGNQKRLESLRELAGKENLEYPSVTLPPQPHTKEGVDAYNEVIARVRMWVNLNLWQKLKLSRDDAKPLLRLKGFPSFPLVERQANEVDWWDMVCNVKKLINEKKEDGKVFWQNLAGYKRQEALRPYLSSEEDRKKGKKFARYQLGDLLLHLEKKHGEDWGKVYGEAWERIDKKVEGLSKHIKLEEERRSEDAQSKAALTDWLRAKASFVIEGLKEADKDEFCRCELKLQKWYGDLRGKPFAIEAENSILDISGFSKQYNCAFIWQKDGVKKLNLYLIINYFKGGKLRFKKIKPEAFEANRFYTVINKKSGEIVPMEVNFNFDDPNLIILPLAFGKRQGREFIWNDLLSLETGSLKLANGRVIEKTLYNRRTRQDEPALFVALTFERREVLDSSNIKPMNLIGVDRGENIPAVIALTDPEGCPLSRFKDSLGNPTHILRIGESYKEKQRTIQAKKEVEQRRAGGYSRKYASKAKNLADDMVRNTARDLLYYAVTQDAMLIFENLSRGFGRQGKRTFMAERQYTRMEDWLTAKLAYEGLPSKTYLSKTLAQYTSKTCSNCGFTITSADYDRVLEKLKKTATGWMTTINGKELKVEGQITYYNRYKRQNVVKDLSVELDRLSEESVNNDISSWTKGRSGEALSLLKKRFSHRPVQEKFVCLNCGFETHADEQAALNIARSWLFLRSQEYKKYQTNKTTGKNTDKRAFVETWQSFYRKKLKEVWKPAV

SEQ ID NO: 48002 - protein, 979 aa, synthetic construct
  REGION 1..979: note = engineered CasX variant
QEIKRINKIRRRLVKDSNTKKAGKTGPMKTLLVRVMTPDLRERLENLRKKPENIPQPISNTSRANLNKLLTDYTEMKKAILHVYWEEFQKDPVGLMSRVAQPASKKIDQNKLKPEMDEKGNLTTAGFACSQCGQPLFVYKLEQVSEKGKAYTNYFGRCNVAEHEKLILLAQLKPEKDSDEAVTYSLGKFGQRALDFYSIHVTKESTHPVKPLAQIAGNRYASSPVGKALSDACMGTIASFLSKYQDIIIEHQKVVKGNQKRLESLRELAGKENLEYPSVTLPPQPHTKEGVDAYNEVIARVRMWVNLNLWQKLKLSRDDAKPLLRLKGFPSFPLVERQANEVDWWDMVCNVKKLINEKKEDGKVFWQNLAGYKRQEALRPYLSSEEDRKKGKKFARYQLGDLLLHLEKKHGEDWGKVYGEAWERIDKKVEGLSKHIKLEEERRSEDAQSKAALTDWLRAKASFVIEGLKEADKDEFCRCELKLQKWYGDLRGKPFAIEAENSILDISGFSKQYNCAFIWQKDGVKKLNLYLIINYFKGGKLRFKKIKPEAFEANRFYTVINKKSGEIVPMEVNFNFDDPNLIILPLAFGKRQGREFIWNDLLSLETGSLKLANGRVIEKTLYNRRTRQDEPALFVALTFERREVLDSSNIKPMNLIGVDRGENIPAVIALTDPEGCPLSRFKDSLGNPTHILRIGESYKEKQRTIQAKKEVEQRRAGGYSRKYASKAKNLADDMVRNTARDLLYYAVTQDAMLIFENLSRGFGRQGKRTFMAERQYTRMEDWLTAKLAYEGLPSKTYLSKTLAQYTSKTCSNCGFTITSADYDRVLEKLKKTATGWMTTINGKELKVEGQITYYNRYKRQNVVKDLSVELDRLSEESVNNDISSWTKGRSGEALSLLKKRFSHRPVQEKFVCLNCGFETHADEQAALNIARSWLFLRSQEYKKYQTNKTTGKNTDKRAFVETWQSFYRKKLKEVWKPAV

SEQ ID NO: 48003 - protein, 979 aa, synthetic construct
  REGION 1..979: note = engineered CasX variant
QEIKRINKIRRRLVKDSNTKKAGKTGPMKTLLVRVMTPDLRERLENLRKKPENIPQPISNTSRANLNKLLTDYTEMKKAILHVYWEEFQKDPVGLMSRVAQPASKKIDQNKLKPEMDEKGNLTTAGFACSQCGQPLFVYKLEQVSEKGKAYTNYFGRCNVAEHEKLILLAQLKPEKDSDEAVTYSLGKFGQRALDFYSIHVTKESTHPVKPLAQIAGNRYASTPVGKALSDACMGTIASFLSKYQDIIIEHQKVVKGNQKRLESLRELAGKENLEYPSVTLPPQPHTKEGVDAYNEVIARVRMWVNLNLWQKLKLSRDDAKPLLRLKGFPSFPLVERQANEVDWWDMVCNVKKLINEKKEDGKVFWQNLAGYKRQEALRPYLSSEEDRKKGKKFARYQLGDLLLHLEKKHGEDWGKVYGEAWERIDKKVEGLSKHIKLEEERRSEDAQSKAALTDWLRAKASFVIEGLKEADKDEFCRCELKLQKWYGDLRGKPFAIEAENSILDISGFSKQYNCAFIWQKDGVKKLNLYLIINYFKGGKLRFKKIKPEAFEANRFYTVINKKSGEIVPMEVNFNFDDPNLIILPLAFGKRQGREFIWNDLLSLETGSLKLANGRVIEKTLYNRRTRQDEPALFVALTFERREVLDSSNIKPMNLIGVDRGENIPAVIALTDPEGCPLSRFKDSLGNPTHILRIGESYKEKQRTIQAKKEVEQRRAGGYSRKYASKAKNLADDMVRNTARDLLYYAVTQDAMLIFENLSRGFGRQGKRTFMAERQYTRMEDWLTAKLAYEGLPSKTYLSKTLAQYTSKTCSNCGFTITSADYDRVLEKLKKTATGWMTTINGKELKVEGQITYYNRYKRQNVVKDLSVELDRLSEESVNNDISSWTKGRSGEALSLLKKRFSHRPVQEKFVCLNCGFETHADEQAALNIARSWLFLRSQEYKKYQTNKTTGKNTDKRAFVETWQSFYRKKLKEVWKPAV

SEQ ID NO: 48004 - protein, 979 aa, synthetic construct
  REGION 1..979: note = engineered CasX variant
QEIKRINKIRRRLVKDSNTKKAGKTGPMKTLLVRVMTPDLRERLENLRKKPENIPQPISNTSRANLNKLLTDYTEMKKAILHVYWEEFQKDPVGLMSRVAQPASKKIDQNKLKPEMDEKGNLTTAGFACSQCGQPLFVYKLEQVSEKGKAYTNYFGRCNVAEHEKLILLAQLKPEKDSDEAVTYSLGKFGQRALDFYSIHVTKESTHPVKPLAQIAGNRYASAPVGKALSDACMGTIASFLSKYQDIIIEHQKVVKGNQKRLESLRELAGKENLEYPSVTLPPQPHTKEGVDAYNEVIARVRMWVNLNLWQKLKLSRDDAKPLLRLKGFPSFPLVERQANEVDWWDMVCNVKKLINEKKEDGKVFWQNLAGYKRQEALRPYLSSEEDRKKGKKFARYQLGDLLLHLEKKHGEDWGKVYGEAWERIDKKVEGLSKHIKLEEERRSEDAQSKAALTDWLRAKASFVIEGLKEADKDEFCRCELKLQKWYGDLRGKPFAIEAENSILDISGFSKQYNCAFIWQKDGVKKLNLYLIINYFKGGKLRFKKIKPEAFEANRFYTVINKKSGEIVPMEVNFNFDDPNLIILPLAFGKRQGREFIWNDLLSLETGSLKLANGRVIEKTLYNRRTRQDEPALFVALTFERREVLDSSNIKPMNLIGVDRGENIPAVIALTDPEGCPLSRFKDSLGNPTHILRIGESYKEKQRTIQAKKEVEQRRAGGYSRKYASKAKNLADDMVRNTARDLLYYAVTQDAMLIFENLSRGFGRQGKRTFMAERQYTRMEDWLTAKLAYEGLPSKTYLSKTLAQYTSKTCSNCGFTITSADYDRVLEKLKKTATGWMTTINGKELKVEGQITYYNRYKRQNVVKDLSVELDRLSEESVNNDISSWTKGRSGEALSLLKKRFSHRPVQEKFVCLNCGFETHADEQAALNIARSWLFLRSQEYKKYQTNKTTGKNTDKRAFVETWQSFYRKKLKEVWKPAV

SEQ ID NO: 48005 - protein, 979 aa, synthetic construct
  REGION 1..979: note = engineered CasX variant
QEIKRINKIRRRLVKDSNTKKAGKTGPMKTLLVRVMTPDLRERLENLRKKPENIPQPISNTSRANLNKLLTDYTEMKKAILHVYWEEFQKDPVGLMSRVAQPASKKIDQNKLKPEMDEKGNLTTAGFACSQCGQPLFVYKLEQVSEKGKAYTNYFGRCNVAEHEKLILLAQLKPEKDSDEAVTYSLGKFGQRALDFYSIHVTKESTHPVKPLAQIAGNRYASVPVGKALSDACMGTIASFLSKYQDIIIEHQKVVKGNQKRLESLRELAGKENLEYPSVTLPPQPHTKEGVDAYNEVIARVRMWVNLNLWQKLKLSRDDAKPLLRLKGFPSFPLVERQANEVDWWDMVCNVKKLINEKKEDGKVFWQNLAGYKRQEALRPYLSSEEDRKKGKKFARYQLGDLLLHLEKKHGEDWGKVYGEAWERIDKKVEGLSKHIKLEEERRSEDAQSKAALTDWLRAKASFVIEGLKEADKDEFCRCELKLQKWYGDLRGKPFAIEAENSILDISGFSKQYNCAFIWQKDGVKKLNLYLIINYFKGGKLRFKKIKPEAFEANRFYTVINKKSGEIVPMEVNFNFDDPNLIILPLAFGKRQGREFIWNDLLSLETGSLKLANGRVIEKTLYNRRTRQDEPALFVALTFERREVLDSSNIKPMNLIGVDRGENIPAVIALTDPEGCPLSRFKDSLGNPTHILRIGESYKEKQRTIQAKKEVEQRRAGGYSRKYASKAKNLADDMVRNTARDLLYYAVTQDAMLIFENLSRGFGRQGKRTFMAERQYTRMEDWLTAKLAYEGLPSKTYLSKTLAQYTSKTCSNCGFTITSADYDRVLEKLKKTATGWMTTINGKELKVEGQITYYNRYKRQNVVKDLSVELDRLSEESVNNDISSWTKGRSGEALSLLKKRFSHRPVQEKFVCLNCGFETHADEQAALNIARSWLFLRSQEYKKYQTNKTTGKNTDKRAFVETWQSFYRKKLKEVWKPAV

SEQ ID NO: 48006 - protein, 979 aa, synthetic construct
  REGION 1..979: note = engineered CasX variant
QEIKRINKIRRRLVKDSNTKKAGKTGPMKTLLVRVMTPDLRERLENLRKKPENIPQPISNTSRANLNKLLTDYTEMKKAILHVYWEEFQKDPVGLMSRVAQPASKKIDQNKLKPEMDEKGNLTTAGFACSQCGQPLFVYKLEQVSEKGKAYTNYFGRCNVAEHEKLIKLAQLKPEKDSDEAVTYSLGKFGQRALDFYSIHVTKESTHPVKPLAQIAGNRYASGPVGKALSDACMGTIASFLSKYQDIIIEHQKVVKGNQKRLESLRELAGKENLEYPSVTLPPQPHTKEGVDAYNEVIARVRMWVNLNLWQKLKLSRDDAKPLLRLKGFPSFPLVERQANEVDWWDMVCNVKKLINEKKEDGKVFWQNLAGYKRQEALRPYLSSEEDRKKGKKFARYQLGDLLLHLEKKHGEDWGKVYGEAWERIDKKVEGLSKHIKLEEERRSEDAQSKAALTDWLRAKASFVIEGLKEADKDEFCRCELKLQKWYGDLRGKPFAIEAENSILDISGFSKQYNCAFIWQKDGVKKLNLYLIINYFKGGKLRFKKIKPEAFEANRFYTVINKKSGEIVPMEVNFNFDDPNLIILPLAFGKRQGREFIWNDLLSLETGSLKLANGRVIEKTLYNRRTRQDEPALFVALTFERREVLDSSNIKPMNLIGVDRGENIPAVIALTDPEGCPLSRFKDSLGNPTHILRIGESYKEKQRTIQAKKEVEQRRAGGYSRKYASKAKNLADDMVRNTARDLLYYAVTQDAMLIFENLSRGFGRQGKRTFMAERQYTRMEDWLTAKLAYEGLPSKTYLSKTLAQYTSKTCSNCGFTITSADYDRVLEKLKKTATGWMTTINGKELKVEGQITYYNRYKRQNVVKDLSVELDRLSEESVNNDISSWTKGRSGEALSLLKKRFSHRPVQEKFVCLNCGFETHADEQAALNIARSWLFLRSQEYKKYQTNKTTGKNTDKRAFVETWQSFYRKKLKEVWKPAV

SEQ ID NO: 48007 - protein, 978 aa, synthetic construct
  REGION 1..978: note = engineered CasX variant
QEIKRINKIRRRLVKDSNTKKAGKTGPMKTLLVRVMTPDLRERLENLRKKPENIPQPISNTSRANLNKLLTDYTEMKKAILHVYWEEFQKDPVGLMSRVAQPASKKIDQNKLKPEMDEKGNLTTAGFACSQCGQPLFVYKLEQVSEKGKAYTNYFGRCNVAEHEKLILLAQLKPEKDSDEAVTYSLGKFGQRALDFYSIHVTKESTHPVKPLAQIAGNRYASPVGKALSDACMGTIASFLSKYQDIIIEHQKVVKGNQKRLESLRELAGKENLEYPSVTLPPQPHTKEGVDAYNEVIARVRMWVNLNLWQKLKLSRDDAKPLLRLKGFPSFPLVERQANEVDWWDMVCNVKKLINEKKEDGKVFWQNLAGYKRQEALRPYLSSEEDRKKGKKFARYQLGDLLLHLEKKHGEDWGKVYGEAWERIDKKVEGLSKHIKLEEERRSEDAQSKAALTDWLRAKASFVIEGLKEADKDEFCRCELKLQKWYGDLRGKPFAIEAENSILDISGFSKQYNCAFIWQKDGVKKLNLYLIINYFKGGKLRFKKIKPEAFEANRFYTVINKKSGEIVPMEVNFNFDDPNLIILPLAFGKRQGREFIWNDLLSLETGSLKLANGRVIEKTLYNRRTRQDEPALFVALTFERREVLDSSNIKPMNLIGVDRGENIPAVIALTDPEGCPLSRFKDSLGNPTHILRIGESYKEKQRTIQAKKEVEQRRAGGYSRKYASKAKNLADDMVRNTARDLLYYAVTQDAMLIFENLSRGFGRQGKRTFMAERQYTRMEDWLTAKLAYEGLPSKTYLSKTLAQYTSKTCSNCGFTITSADYDRVLEKLKKTATGWMTTINGKELKVEGQITYYNRYKRQNVVKDLSVELDRLSEESVNNDISSWTKGRSGEALSLLKKRFSHRPVQEKFVCLNCGFETHADEQAALNIARSWLFLRSQEYKKYQTNKTTGKNTDKRAFVETWQSFYRKKLKEVWKPAV

SEQ ID NO: 48008 - protein, 979 aa, synthetic construct
  REGION 1..979: note = engineered CasX variant
QEIKRINKIRRRLVKDSNTKKAGKTGPMKTLLVRVMTPDLRERLENLRKKPENIPQPISNTSRANLNKLLTDYTEMKKAILHVYWEEFQKDPVGLMSRVAQPASKKIDQNKLKPEMDEKGNLTTAGFACSQCGQPLFVYKLEQVSEKGKAYTNYFGRCNVAEHEKLILLAQLKPEKDSDEAVTYSLGKFGQRALDFYSIHVTKESTHPVKPLAQIAGNRYASYPVGKALSDACMGTIASFLSKYQDIIIEHQKVVKGNQKRLESLRELAGKENLEYPSVTLPPQPHTKEGVDAYNEVIARVRMWVNLNLWQKLKLSRDDAKPLLRLKGFPSFPLVERQANEVDWWDMVCNVKKLINEKKEDGKVFWQNLAGYKRQEALRPYLSSEEDRKKGKKFARYQLGDLLLHLEKKHGEDWGKVYDEAWERIDKKVEGLSKHIKLEEERRSEDAQSKAALTDWLRAKASFVIEGKKEADKDEFCRCELKLQKWYGDLRGKPFAIEAENSILDISGFSKQYNCAFIWQKDGVKKLNLYLIINYFKGGKLRFKKIKPEAFEANRFYTVINKKSGEIVPMEVNFNFDDPNLIILPLAFGKRQGREFIWNDLLSLETGSLKLANGRVIEKTLYNRRTRQDEPALFVALTFERREVLDSSNIKPMNLIGVDRGENIPAVIALTDPEGCPLSRFKDSLGNPTHILRIGESYKEKQRTIQAKKEVEQRRAGGYSRKYASKAKNLADDMVRNTARDLLYYAVTQDAMLIFENLSRGFGRQGKRTFMAERQYTRMEDWLTAKLAYEGLPSKTYLSKTLAQYTSKTCSNCGFTITSADYDRVLEKLKKTATGWMTTINGKELKVEGQITYYNRYKRQNVVKDLSVELDRLSEESVNNDISSWTKGRSGEALSLLKKRFSHRPVQEKFVCLNCGFETHADEQAALNIARSWLFLRSQEYKKYQTNKTTGKNTDKRAFVETWQSFYRKKLKEVWKPAV

SEQ ID NO: 48009 - protein, 979 aa, synthetic construct
  REGION 1..979: note = engineered CasX variant
QEIKRINKIRRRLVKDSNTKKAGKTGPMKTLLVRVMTPDLRERLENLRKKPENIPQPISNTSRANLNKLLTDYTEMKKAILHVYWEEFQKDPVGLMSRVAQPASKKIDQNKLKPEMDEKGNLTTAGFACSQCGQPLFVYKLEQVSEKGKAYTNYFGRCNVAEHEKLILLAQLKPEKDSDEAVTYSLGKFGQRALDFYSIHVTKESTHPVKPLAQIAGNRYASHPVGKALSDACMGTIASFLSKYQDIIIEHQKVVKGNQKRLESLRELAGKENLEYPSVTLPPQPHTKEGVDAYNEVIARVRMWVNLNLWQKLKLSRDDAKPLLRLKGFPSFPLVERQANEVDWWDMVCNVKKLINEKKEDGKVFWQNLAGYKRQEALRPYLSSEEDRKKGKKFARYQLGDLLLHLEKKHGEDWGKVYDEAWERIDKKVEGLSKHIKLEEERRSEDAQSKAALTDWLRAKASFVIEGKKEADKDEFCRCELKLQKWYGDLRGKPFAIEAENSILDISGFSKQYNCAFIWQKDGVKKLNLYLIINYFKGGKLRFKKIKPEAFEANRFYTVINKKSGEIVPMEVNFNFDDPNLIILPLAFGKRQGREFIWNDLLSLETGSLKLANGRVIEKTLYNRRTRQDEPALFVALTFERREVLDSSNIKPMNLIGVDRGENIPAVIALTDPEGCPLSRFKDSLGNPTHILRIGESYKEKQRTIQAKKEVEQRRAGGYSRKYASKAKNLADDMVRNTARDLLYYAVTQDAMLIFENLSRGFGRQGKRTFMAERQYTRMEDWLTAKLAYEGLPSKTYLSKTLAQYTSKTCSNCGFTITSADYDRVLEKLKKTATGWMTTINGKELKVEGQITYYNRYKRQNVVKDLSVELDRLSEESVNNDISSWTKGRSGEALSLLKKRFSHRPVQEKFVCLNCGFETHADEQAALNIARSWLFLRSQEYKKYQTNKTTGKNTDKRAFVETWQSFYRKKLKEVWKPAV

SEQ ID NO: 48010 - protein, 979 aa, synthetic construct
  REGION 1..979: note = engineered CasX variant
QEIKRINKIRRRLVKDSNTKKAGKTGPMKTLLVRVMTPDLRERLENLRKKPENIPQPISNTSRANLNKLLTDYTEMKKAILHVYWEEFQKDPVGLMSRVAQPASKKIDQNKLKPEMDEKGNLTTAGFACSQCGQPLFVYKLEQVSEKGKAYTNYFGRCNVAEHEKLILLAQLKPEKDSDEAVTYSLGKFGQRALDFYSIHVTKESTHPVKPLAQIAGNRYASSPVGKALSDACMGTIASFLSKYQDIIIEHQKVVKGNQKRLESLRELAGKENLEYPSVTLPPQPHTKEGVDAYNEVIARVRMWVNLNLWQKLKLSRDDAKPLLRLKGFPSFPLVERQANEVDWWDMVCNVKKLINEKKEDGKVFWQNLAGYKRQEALRPYLSSEEDRKKGKKFARYQLGDLLLHLEKKHGEDWGKVYDEAWERIDKKVEGLSKHIKLEEERRSEDAQSKAALTDWLRAKASFVIEGKKEADKDEFCRCELKLQKWYGDLRGKPFAIEAENSILDISGFSKQYNCAFIWQKDGVKKLNLYLIINYFKGGKLRFKKIKPEAFEANRFYTVINKKSGEIVPMEVNFNFDDPNLIILPLAFGKRQGREFIWNDLLSLETGSLKLANGRVIEKTLYNRRTRQDEPALFVALTFERREVLDSSNIKPMNLIGVDRGENIPAVIALTDPEGCPLSRFKDSLGNPTHILRIGESYKEKQRTIQAKKEVEQRRAGGYSRKYASKAKNLADDMVRNTARDLLYYAVTQDAMLIFENLSRGFGRQGKRTFMAERQYTRMEDWLTAKLAYEGLPSKTYLSKTLAQYTSKTCSNCGFTITSADYDRVLEKLKKTATGWMTTINGKELKVEGQITYYNRYKRQNVVKDLSVELDRLSEESVNNDISSWTKGRSGEALSLLKKRFSHRPVQEKFVCLNCGFETHADEQAALNIARSWLFLRSQEYKKYQTNKTTGKNTDKRAFVETWQSFYRKKLKEVWKPAV

SEQ ID NO: 48011 - protein, 979 aa, synthetic construct
  REGION 1..979: note = engineered CasX variant
QEIKRINKIRRRLVKDSNTKKAGKTGPMKTLLVRVMTPDLRERLENLRKKPENIPQPISNTSRANLNKLLTDYTEMKKAILHVYWEEFQKDPVGLMSRVAQPASKKIDQNKLKPEMDEKGNLTTAGFACSQCGQPLFVYKLEQVSEKGKAYTNYFGRCNVAEHEKLILLAQLKPEKDSDEAVTYSLGKFGQRALDFYSIHVTKESTHPVKPLAQIAGNRYASTPVGKALSDACMGTIASFLSKYQDIIIEHQKVVKGNQKRLESLRELAGKENLEYPSVTLPPQPHTKEGVDAYNEVIARVRMWVNLNLWQKLKLSRDDAKPLLRLKGFPSFPLVERQANEVDWWDMVCNVKKLINEKKEDGKVFWQNLAGYKRQEALRPYLSSEEDRKKGKKFARYQLGDLLLHLEKKHGEDWGKVYDEAWERIDKKVEGLSKHIKLEEERRSEDAQSKAALTDWLRAKASFVIEGKKEADKDEFCRCELKLQKWYGDLRGKPFAIEAENSILDISGFSKQYNCAFIWQKDGVKKLNLYLIINYFKGGKLRFKKIKPEAFEANRFYTVINKKSGEIVPMEVNFNFDDPNLIILPLAFGKRQGREFIWNDLLSLETGSLKLANGRVIEKTLYNRRTRQDEPALFVALTFERREVLDSSNIKPMNLIGVDRGENIPAVIALTDPEGCPLSRFKDSLGNPTHILRIGESYKEKQRTIQAKKEVEQRRAGGYSRKYASKAKNLADDMVRNTARDLLYYAVTQDAMLIFENLSRGFGRQGKRTFMAERQYTRMEDWLTAKLAYEGLPSKTYLSKTLAQYTSKTCSNCGFTITSADYDRVLEKLKKTATGWMTTINGKELKVEGQITYYNRYKRQNVVKDLSVELDRLSEESVNNDISSWTKGRSGEALSLLKKRFSHRPVQEKFVCLNCGFETHADEQAALNIARSWLFLRSQEYKKYQTNKTTGKNTDKRAFVETWQSFYRKKLKEVWKPAV

SEQ ID NO: 48012 - protein, 979 aa, synthetic construct
  REGION 1..979: note = engineered CasX variant
QEIKRINKIRRRLVKDSNTKKAGKTGPMKTLLVRVMTPDLRERLENLRKKPENIPQPISNTSRANLNKLLTDYTEMKKAILHVYWEEFQKDPVGLMSRVAQPASKKIDQNKLKPEMDEKGNLTTAGFACSQCGQPLFVYKLEQVSEKGKAYTNYFGRCNVAEHEKLILLAQLKPEKDSDEAVTYSLGKFGQRALDFYSIHVTKESTHPVKPLAQIAGNRYASAPVGKALSDACMGTIASFLSKYQDIIIEHQKVVKGNQKRLESLRELAGKENLEYPSVTLPPQPHTKEGVDAYNEVIARVRMWVNLNLWQKLKLSRDDAKPLLRLKGFPSFPLVERQANEVDWWDMVCNVKKLINEKKEDGKVFWQNLAGYKRQEALRPYLSSEEDRKKGKKFARYQLGDLLLHLEKKHGEDWGKVYDEAWERIDKKVEGLSKHIKLEEERRSEDAQSKAALTDWLRAKASFVIEGKKEADKDEFCRCELKLQKWYGDLRGKPFAIEAENSILDISGFSKQYNCAFIWQKDGVKKLNLYLIINYFKGGKLRFKKIKPEAFEANRFYTVINKKSGEIVPMEVNFNFDDPNLIILPLAFGKRQGREFIWNDLLSLETGSLKLANGRVIEKTLYNRRTRQDEPALFVALTFERREVLDSSNIKPMNLIGVDRGENIPAVIALTDPEGCPLSRFKDSLGNPTHILRIGESYKEKQRTIQAKKEVEQRRAGGYSRKYASKAKNLADDMVRNTARDLLYYAVTQDAMLIFENLSRGFGRQGKRTFMAERQYTRMEDWLTAKLAYEGLPSKTYLSKTLAQYTSKTCSNCGFTITSADYDRVLEKLKKTATGWMTTINGKELKVEGQITYYNRYKRQNVVKDLSVELDRLSEESVNNDISSWTKGRSGEALSLLKKRFSHRPVQEKFVCLNCGFETHADEQAALNIARSWLFLRSQEYKKYQTNKTTGKNTDKRAFVETWQSFYRKKLKEVWKPAV

SEQ ID NO: 48013 - protein, 979 aa, synthetic construct
  REGION 1..979: note = engineered CasX variant
QEIKRINKIRRRLVKDSNTKKAGKTGPMKTLLVRVMTPDLRERLENLRKKPENIPQPISNTSRANLNKLLTDYTEMKKAILHVYWEEFQKDPVGLMSRVAQPASKKIDQNKLKPEMDEKGNLTTAGFACSQCGQPLFVYKLEQVSEKGKAYTNYFGRCNVAEHEKLILLAQLKPEKDSDEAVTYSLGKFGQRALDFYSIHVTKESTHPVKPLAQIAGNRYASVPVGKALSDACMGTIASFLSKYQDIIIEHQKVVKGNQKRLESLRELAGKENLEYPSVTLPPQPHTKEGVDAYNEVIARVRMWVNLNLWQKLKLSRDDAKPLLRLKGFPSFPLVERQANEVDWWDMVCNVKKLINEKKEDGKVFWQNLAGYKRQEALRPYLSSEEDRKKGKKFARYQLGDLLLHLEKKHGEDWGKVYDEAWERIDKKVEGLSKHIKLEEERRSEDAQSKAALTDWLRAKASFVIEGKKEADKDEFCRCELKLQKWYGDLRGKPFAIEAENSILDISGFSKQYNCAFIWQKDGVKKLNLYLIINYFKGGKLRFKKIKPEAFEANRFYTVINKKSGEIVPMEVNFNFDDPNLIILPLAFGKRQGREFIWNDLLSLETGSLKLANGRVIEKTLYNRRTRQDEPALFVALTFERREVLDSSNIKPMNLIGVDRGENIPAVIALTDPEGCPLSRFKDSLGNPTHILRIGESYKEKQRTIQAKKEVEQRRAGGYSRKYASKAKNLADDMVRNTARDLLYYAVTQDAMLIFENLSRGFGRQGKRTFMAERQYTRMEDWLTAKLAYEGLPSKTYLSKTLAQYTSKTCSNCGFTITSADYDRVLEKLKKTATGWMTTINGKELKVEGQITYYNRYKRQNVVKDLSVELDRLSEESVNNDISSWTKGRSGEALSLLKKRFSHRPVQEKFVCLNCGFETHADEQAALNIARSWLFLRSQEYKKYQTNKTTGKNTDKRAFVETWQSFYRKKLKEVWKPAV

SEQ ID NO: 48014 - protein, 979 aa, synthetic construct
  REGION 1..979: note = engineered CasX variant
QEIKRINKIRRRLVKDSNTKKAGKTGPMKTLLVRVMTPDLRERLENLRKKPENIPQPISNTSRANLNKLLTDYTEMKKAILHVYWEEFQKDPVGLMSRVAQPASKKIDQNKLKPEMDEKGNLTTAGFACSQCGQPLFVYKLEQVSEKGKAYTNYFGRCNVAEHEKLIKLAQLKPEKDSDEAVTYSLGKFGQRALDFYSIHVTKESTHPVKPLAQIAGNRYASGPVGKALSDACMGTIASFLSKYQDIIIEHQKVVKGNQKRLESLRELAGKENLEYPSVTLPPQPHTKEGVDAYNEVIARVRMWVNLNLWQKLKLSRDDAKPLLRLKGFPSFPLVERQANEVDWWDMVCNVKKLINEKKEDGKVFWQNLAGYKRQEALRPYLSSEEDRKKGKKFARYQLGDLLLHLEKKHGEDWGKVYDEAWERIDKKVEGLSKHIKLEEERRSEDAQSKAALTDWLRAKASFVIEGKKEADKDEFCRCELKLQKWYGDLRGKPFAIEAENSILDISGFSKQYNCAFIWQKDGVKKLNLYLIINYFKGGKLRFKKIKPEAFEANRFYTVINKKSGEIVPMEVNFNFDDPNLIILPLAFGKRQGREFIWNDLLSLETGSLKLANGRVIEKTLYNRRTRQDEPALFVALTFERREVLDSSNIKPMNLIGVDRGENIPAVIALTDPEGCPLSRFKDSLGNPTHILRIGESYKEKQRTIQAKKEVEQRRAGGYSRKYASKAKNLADDMVRNTARDLLYYAVTQDAMLIFENLSRGFGRQGKRTFMAERQYTRMEDWLTAKLAYEGLPSKTYLSKTLAQYTSKTCSNCGFTITSADYDRVLEKLKKTATGWMTTINGKELKVEGQITYYNRYKRQNVVKDLSVELDRLSEESVNNDISSWTKGRSGEALSLLKKRFSHRPVQEKFVCLNCGFETHADEQAALNIARSWLFLRSQEYKKYQTNKTTGKNTDKRAFVETWQSFYRKKLKEVWKPAV

SEQ ID NO: 48015 - protein, 978 aa, synthetic construct
  REGION 1..978: note = engineered CasX variant
QEIKRINKIRRRLVKDSNTKKAGKTGPMKTLLVRVMTPDLRERLENLRKKPENIPQPISNTSRANLNKLLTDYTEMKKAILHVYWEEFQKDPVGLMSRVAQPASKKIDQNKLKPEMDEKGNLTTAGFACSQCGQPLFVYKLEQVSEKGKAYTNYFGRCNVAEHEKLILLAQLKPEKDSDEAVTYSLGKFGQRALDFYSIHVTKESTHPVKPLAQIAGNRYASPVGKALSDACMGTIASFLSKYQDIIIEHQKVVKGNQKRLESLRELAGKENLEYPSVTLPPQPHTKEGVDAYNEVIARVRMWVNLNLWQKLKLSRDDAKPLLRLKGFPSFPLVERQANEVDWWDMVCNVKKLINEKKEDGKVFWQNLAGYKRQEALRPYLSSEEDRKKGKKFARYQLGDLLLHLEKKHGEDWGKVYDEAWERIDKKVEGLSKHIKLEEERRSEDAQSKAALTDWLRAKASFVIEGKKEADKDEFCRCELKLQKWYGDLRGKPFAIEAENSILDISGFSKQYNCAFIWQKDGVKKLNLYLIINYFKGGKLRFKKIKPEAFEANRFYTVINKKSGEIVPMEVNFNFDDPNLIILPLAFGKRQGREFIWNDLLSLETGSLKLANGRVIEKTLYNRRTRQDEPALFVALTFERREVLDSSNIKPMNLIGVDRGENIPAVIALTDPEGCPLSRFKDSLGNPTHILRIGESYKEKQRTIQAKKEVEQRRAGGYSRKYASKAKNLADDMVRNTARDLLYYAVTQDAMLIFENLSRGFGRQGKRTFMAERQYTRMEDWLTAKLAYEGLPSKTYLSKTLAQYTSKTCSNCGFTITSADYDRVLEKLKKTATGWMTTINGKELKVEGQITYYNRYKRQNVVKDLSVELDRLSEESVNNDISSWTKGRSGEALSLLKKRFSHRPVQEKFVCLNCGFETHADEQAALNIARSWLFLRSQEYKKYQTNKTTGKNTDKRAFVETWQSFYRKKLKEVWKPAV

SEQ ID NO: 48016 - protein, 979 aa, synthetic construct
  REGION 1..979: note = engineered CasX variant
QEIKRINKIRRRLVKDSNTKKAGKTGPMKTLLVRVMTPDLRERLENLRKKPENIPQPISNTSRANLNKLLTDYTEMKKAILHVYWEEFQKDPVGLMSRVAQPASKKIDQNKLKPEMDEKGNLTTAGFACSQCGQPLFVYKLEQVSEKGKAYTNYFGRCNVAEHEKLILLAQLKPEKDSDEAVTYSLGKFGQRALDFYSIHVTKESTHPVKPLAQIAGNRYASYPVGKALSDACMGTIASFLSKYQDIIIEHQKVVKGNQKRLESLRELAGKENLEYPSVTLPPQPHTKEGVDAYNEVIARVRMWVNLNLWQKLKLSRDDAKPLLRLKGFPSFPLVERQANEVDWWDMVCNVKKLINEKKEDGKVFWQNLAGYKRQEALRPYLSSEEDRKKGKKFARYQLGDLLLHLEKKHGEDWGKVYDEAWERIDKKVEGLSKHIKLEEERRSEDAQSKAALTDWLRAKASFVIEGSKEADKDEFCRCELKLQKWYGDLRGKPFAIEAENSILDISGFSKQYNCAFIWQKDGVKKLNLYLIINYFKGGKLRFKKIKPEAFEANRFYTVINKKSGEIVPMEVNFNFDDPNLIILPLAFGKRQGREFIWNDLLSLETGSLKLANGRVIEKTLYNRRTRQDEPALFVALTFERREVLDSSNIKPMNLIGVDRGENIPAVIALTDPEGCPLSRFKDSLGNPTHILRIGESYKEKQRTIQAKKEVEQRRAGGYSRKYASKAKNLADDMVRNTARDLLYYAVTQDAMLIFENLSRGFGRQGKRTFMAERQYTRMEDWLTAKLAYEGLPSKTYLSKTLAQYTSKTCSNCGFTITSADYDRVLEKLKKTATGWMTTINGKELKVEGQITYYNRYKRQNVVKDLSVELDRLSEESVNNDISSWTKGRSGEALSLLKKRFSHRPVQEKFVCLNCGFETHADEQAALNIARSWLFLRSQEYKKYQTNKTTGKNTDKRAFVETWQSFYRKKLKEVWKPAV

SEQ ID NO: 48017 - protein, 979 aa, synthetic construct
  REGION 1..979: note = engineered CasX variant
QEIKRINKIRRRLVKDSNTKKAGKTGPMKTLLVRVMTPDLRERLENLRKKPENIPQPISNTSRANLNKLLTDYTEMKKAILHVYWEEFQKDPVGLMSRVAQPASKKIDQNKLKPEMDEKGNLTTAGFACSQCGQPLFVYKLEQVSEKGKAYTNYFGRCNVAEHEKLILLAQLKPEKDSDEAVTYSLGKFGQRALDFYSIHVTKESTHPVKPLAQIAGNRYASHPVGKALSDACMGTIASFLSKYQDIIIEHQKVVKGNQKRLESLRELAGKENLEYPSVTLPPQPHTKEGVDAYNEVIARVRMWVNLNLWQKLKLSRDDAKPLLRLKGFPSFPLVERQANEVDWWDMVCNVKKLINEKKEDGKVFWQNLAGYKRQEALRPYLSSEEDRKKGKKFARYQLGDLLLHLEKKHGEDWGKVYDEAWERIDKKVEGLSKHIKLEEERRSEDAQSKAALTDWLRAKASFVIEGSKEADKDEFCRCELKLQKWYGDLRGKPFAIEAENSILDISGFSKQYNCAFIWQKDGVKKLNLYLIINYFKGGKLRFKKIKPEAFEANRFYTVINKKSGEIVPMEVNFNFDDPNLIILPLAFGKRQGREFIWNDLLSLETGSLKLANGRVIEKTLYNRRTRQDEPALFVALTFERREVLDSSNIKPMNLIGVDRGENIPAVIALTDPEGCPLSRFKDSLGNPTHILRIGESYKEKQRTIQAKKEVEQRRAGGYSRKYASKAKNLADDMVRNTARDLLYYAVTQDAMLIFENLSRGFGRQGKRTFMAERQYTRMEDWLTAKLAYEGLPSKTYLSKTLAQYTSKTCSNCGFTITSADYDRVLEKLKKTATGWMTTINGKELKVEGQITYYNRYKRQNVVKDLSVELDRLSEESVNNDISSWTKGRSGEALSLLKKRFSHRPVQEKFVCLNCGFETHADEQAALNIARSWLFLRSQEYKKYQTNKTTGKNTDKRAFVETWQSFYRKKLKEVWKPAV

SEQ ID NO: 48018 - protein, 979 aa, synthetic construct
  REGION 1..979: note = engineered CasX variant
QEIKRINKIRRRLVKDSNTKKAGKTGPMKTLLVRVMTPDLRERLENLRKKPENIPQPISNTSRANLNKLLTDYTEMKKAILHVYWEEFQKDPVGLMSRVAQPASKKIDQNKLKPEMDEKGNLTTAGFACSQCGQPLFVYKLEQVSEKGKAYTNYFGRCNVAEHEKLILLAQLKPEKDSDEAVTYSLGKFGQRALDFYSIHVTKESTHPVKPLAQIAGNRYASSPVGKALSDACMGTIASFLSKYQDIIIEHQKVVKGNQKRLESLRELAGKENLEYPSVTLPPQPHTKEGVDAYNEVIARVRMWVNLNLWQKLKLSRDDAKPLLRLKGFPSFPLVERQANEVDWWDMVCNVKKLINEKKEDGKVFWQNLAGYKRQEALRPYLSSEEDRKKGKKFARYQLGDLLLHLEKKHGEDWGKVYDEAWERIDKKVEGLSKHIKLEEERRSEDAQSKAALTDWLRAKASFVIEGSKEADKDEFCRCELKLQKWYGDLRGKPFAIEAENSILDISGFSKQYNCAFIWQKDGVKKLNLYLIINYFKGGKLRFKKIKPEAFEANRFYTVINKKSGEIVPMEVNFNFDDPNLIILPLAFGKRQGREFIWNDLLSLETGSLKLANGRVIEKTLYNRRTRQDEPALFVALTFERREVLDSSNIKPMNLIGVDRGENIPAVIALTDPEGCPLSRFKDSLGNPTHILRIGESYKEKQRTIQAKKEVEQRRAGGYSRKYASKAKNLADDMVRNTARDLLYYAVTQDAMLIFENLSRGFGRQGKRTFMAERQYTRMEDWLTAKLAYEGLPSKTYLSKTLAQYTSKTCSNCGFTITSADYDRVLEKLKKTATGWMTTINGKELKVEGQITYYNRYKRQNVVKDLSVELDRLSEESVNNDISSWTKGRSGEALSLLKKRFSHRPVQEKFVCLNCGFETHADEQAALNIARSWLFLRSQEYKKYQTNKTTGKNTDKRAFVETWQSFYRKKLKEVWKPAV

SEQ ID NO: 48019 - protein, 979 aa, synthetic construct
  REGION 1..979: note = engineered CasX variant
QEIKRINKIRRRLVKDSNTKKAGKTGPMKTLLVRVMTPDLRERLENLRKKPENIPQPISNTSRANLNKLLTDYTEMKKAILHVYWEEFQKDPVGLMSRVAQPASKKIDQNKLKPEMDEKGNLTTAGFACSQCGQPLFVYKLEQVSEKGKAYTNYFGRCNVAEHEKLILLAQLKPEKDSDEAVTYSLGKFGQRALDFYSIHVTKESTHPVKPLAQIAGNRYASTPVGKALSDACMGTIASFLSKYQDIIIEHQKVVKGNQKRLESLRELAGKENLEYPSVTLPPQPHTKEGVDAYNEVIARVRMWVNLNLWQKLKLSRDDAKPLLRLKGFPSFPLVERQANEVDWWDMVCNVKKLINEKKEDGKVFWQNLAGYKRQEALRPYLSSEEDRKKGKKFARYQLGDLLLHLEKKHGEDWGKVYDEAWERIDKKVEGLSKHIKLEEERRSEDAQSKAALTDWLRAKASFVIEGSKEADKDEFCRCELKLQKWYGDLRGKPFAIEAENSILDISGFSKQYNCAFIWQKDGVKKLNLYLIINYFKGGKLRFKKIKPEAFEANRFYTVINKKSGEIVPMEVNFNFDDPNLIILPLAFGKRQGREFIWNDLLSLETGSLKLANGRVIEKTLYNRRTRQDEPALFVALTFERREVLDSSNIKPMNLIGVDRGENIPAVIALTDPEGCPLSRFKDSLGNPTHILRIGESYKEKQRTIQAKKEVEQRRAGGYSRKYASKAKNLADDMVRNTARDLLYYAVTQDAMLIFENLSRGFGRQGKRTFMAERQYTRMEDWLTAKLAYEGLPSKTYLSKTLAQYTSKTCSNCGFTITSADYDRVLEKLKKTATGWMTTINGKELKVEGQITYYNRYKRQNVVKDLSVELDRLSEESVNNDISSWTKGRSGEALSLLKKRFSHRPVQEKFVCLNCGFETHADEQAALNIARSWLFLRSQEYKKYQTNKTTGKNTDKRAFVETWQSFYRKKLKEVWKPAV

SEQ ID NO: 48020 - protein, 979 aa, synthetic construct
  REGION 1..979: note = engineered CasX variant
QEIKRINKIRRRLVKDSNTKKAGKTGPMKTLLVRVMTPDLRERLENLRKKPENIPQPISNTSRANLNKLLTDYTEMKKAILHVYWEEFQKDPVGLMSRVAQPASKKIDQNKLKPEMDEKGNLTTAGFACSQCGQPLFVYKLEQVSEKGKAYTNYFGRCNVAEHEKLILLAQLKPEKDSDEAVTYSLGKFGQRALDFYSIHVTKESTHPVKPLAQIAGNRYASAPVGKALSDACMGTIASFLSKYQDIIIEHQKVVKGNQKRLESLRELAGKENLEYPSVTLPPQPHTKEGVDAYNEVIARVRMWVNLNLWQKLKLSRDDAKPLLRLKGFPSFPLVERQANEVDWWDMVCNVKKLINEKKEDGKVFWQNLAGYKRQEALRPYLSSEEDRKKGKKFARYQLGDLLLHLEKKHGEDWGKVYDEAWERIDKKVEGLSKHIKLEEERRSEDAQSKAALTDWLRAKASFVIEGSKEADKDEFCRCELKLQKWYGDLRGKPFAIEAENSILDISGFSKQYNCAFIWQKDGVKKLNLYLIINYFKGGKLRFKKIKPEAFEANRFYTVINKKSGEIVPMEVNFNFDDPNLIILPLAFGKRQGREFIWNDLLSLETGSLKLANGRVIEKTLYNRRTRQDEPALFVALTFERREVLDSSNIKPMNLIGVDRGENIPAVIALTDPEGCPLSRFKDSLGNPTHILRIGESYKEKQRTIQAKKEVEQRRAGGYSRKYASKAKNLADDMVRNTARDLLYYAVTQDAMLIFENLSRGFGRQGKRTFMAERQYTRMEDWLTAKLAYEGLPSKTYLSKTLAQYTSKTCSNCGFTITSADYDRVLEKLKKTATGWMTTINGKELKVEGQITYYNRYKRQNVVKDLSVELDRLSEESVNNDISSWTKGRSGEALSLLKKRFSHRPVQEKFVCLNCGFETHADEQAALNIARSWLFLRSQEYKKYQTNKTTGKNTDKRAFVETWQSFYRKKLKEVWKPAV

SEQ ID NO: 48021 - protein, 979 aa, synthetic construct
  REGION 1..979: note = engineered CasX variant
QEIKRINKIRRRLVKDSNTKKAGKTGPMKTLLVRVMTPDLRERLENLRKKPENIPQPISNTSRANLNKLLTDYTEMKKAILHVYWEEFQKDPVGLMSRVAQPASKKIDQNKLKPEMDEKGNLTTAGFACSQCGQPLFVYKLEQVSEKGKAYTNYFGRCNVAEHEKLILLAQLKPEKDSDEAVTYSLGKFGQRALDFYSIHVTKESTHPVKPLAQIAGNRYASVPVGKALSDACMGTIASFLSKYQDIIIEHQKVVKGNQKRLESLRELAGKENLEYPSVTLPPQPHTKEGVDAYNEVIARVRMWVNLNLWQKLKLSRDDAKPLLRLKGFPSFPLVERQANEVDWWDMVCNVKKLINEKKEDGKVFWQNLAGYKRQEALRPYLSSEEDRKKGKKFARYQLGDLLLHLEKKHGEDWGKVYDEAWERIDKKVEGLSKHIKLEEERRSEDAQSKAALTDWLRAKASFVIEGSKEADKDEFCRCELKLQKWYGDLRGKPFAIEAENSILDISGFSKQYNCAFIWQKDGVKKLNLYLIINYFKGGKLRFKKIKPEAFEANRFYTVINKKSGEIVPMEVNFNFDDPNLIILPLAFGKRQGREFIWNDLLSLETGSLKLANGRVIEKTLYNRRTRQDEPALFVALTFERREVLDSSNIKPMNLIGVDRGENIPAVIALTDPEGCPLSRFKDSLGNPTHILRIGESYKEKQRTIQAKKEVEQRRAGGYSRKYASKAKNLADDMVRNTARDLLYYAVTQDAMLIFENLSRGFGRQGKRTFMAERQYTRMEDWLTAKLAYEGLPSKTYLSKTLAQYTSKTCSNCGFTITSADYDRVLEKLKKTATGWMTTINGKELKVEGQITYYNRYKRQNVVKDLSVELDRLSEESVNNDISSWTKGRSGEALSLLKKRFSHRPVQEKFVCLNCGFETHADEQAALNIARSWLFLRSQEYKKYQTNKTTGKNTDKRAFVETWQSFYRKKLKEVWKPAV

SEQ ID NO: 48022 - protein, 979 aa, synthetic construct
  REGION 1..979: note = engineered CasX variant
QEIKRINKIRRRLVKDSNTKKAGKTGPMKTLLVRVMTPDLRERLENLRKKPENIPQPISNTSRANLNKLLTDYTEMKKAILHVYWEEFQKDPVGLMSRVAQPASKKIDQNKLKPEMDEKGNLTTAGFACSQCGQPLFVYKLEQVSEKGKAYTNYFGRCNVAEHEKLIKLAQLKPEKDSDEAVTYSLGKFGQRALDFYSIHVTKESTHPVKPLAQIAGNRYASGPVGKALSDACMGTIASFLSKYQDIIIEHQKVVKGNQKRLESLRELAGKENLEYPSVTLPPQPHTKEGVDAYNEVIARVRMWVNLNLWQKLKLSRDDAKPLLRLKGFPSFPLVERQANEVDWWDMVCNVKKLINEKKEDGKVFWQNLAGYKRQEALRPYLSSEEDRKKGKKFARYQLGDLLLHLEKKHGEDWGKVYDEAWERIDKKVEGLSKHIKLEEERRSEDAQSKAALTDWLRAKASFVIEGSKEADKDEFCRCELKLQKWYGDLRGKPFAIEAENSILDISGFSKQYNCAFIWQKDGVKKLNLYLIINYFKGGKLRFKKIKPEAFEANRFYTVINKKSGEIVPMEVNFNFDDPNLIILPLAFGKRQGREFIWNDLLSLETGSLKLANGRVIEKTLYNRRTRQDEPALFVALTFERREVLDSSNIKPMNLIGVDRGENIPAVIALTDPEGCPLSRFKDSLGNPTHILRIGESYKEKQRTIQAKKEVEQRRAGGYSRKYASKAKNLADDMVRNTARDLLYYAVTQDAMLIFENLSRGFGRQGKRTFMAERQYTRMEDWLTAKLAYEGLPSKTYLSKTLAQYTSKTCSNCGFTITSADYDRVLEKLKKTATGWMTTINGKELKVEGQITYYNRYKRQNVVKDLSVELDRLSEESVNNDISSWTKGRSGEALSLLKKRFSHRPVQEKFVCLNCGFETHADEQAALNIARSWLFLRSQEYKKYQTNKTTGKNTDKRAFVETWQSFYRKKLKEVWKPAV

SEQ ID NO: 48023 - protein, 978 aa, synthetic construct
  REGION 1..978: note = engineered CasX variant
QEIKRINKIRRRLVKDSNTKKAGKTGPMKTLLVRVMTPDLRERLENLRKKPENIPQPISNTSRANLNKLLTDYTEMKKAILHVYWEEFQKDPVGLMSRVAQPASKKIDQNKLKPEMDEKGNLTTAGFACSQCGQPLFVYKLEQVSEKGKAYTNYFGRCNVAEHEKLILLAQLKPEKDSDEAVTYSLGKFGQRALDFYSIHVTKESTHPVKPLAQIAGNRYASPVGKALSDACMGTIASFLSKYQDIIIEHQKVVKGNQKRLESLRELAGKENLEYPSVTLPPQPHTKEGVDAYNEVIARVRMWVNLNLWQKLKLSRDDAKPLLRLKGFPSFPLVERQANEVDWWDMVCNVKKLINEKKEDGKVFWQNLAGYKRQEALRPYLSSEEDRKKGKKFARYQLGDLLLHLEKKHGEDWGKVYDEAWERIDKKVEGLSKHIKLEEERRSEDAQSKAALTDWLRAKASFVIEGSKEADKDEFCRCELKLQKWYGDLRGKPFAIEAENSILDISGFSKQYNCAFIWQKDGVKKLNLYLIINYFKGGKLRFKKIKPEAFEANRFYTVINKKSGEIVPMEVNFNFDDPNLIILPLAFGKRQGREFIWNDLLSLETGSLKLANGRVIEKTLYNRRTRQDEPALFVALTFERREVLDSSNIKPMNLIGVDRGENIPAVIALTDPEGCPLSRFKDSLGNPTHILRIGESYKEKQRTIQAKKEVEQRRAGGYSRKYASKAKNLADDMVRNTARDLLYYAVTQDAMLIFENLSRGFGRQGKRTFMAERQYTRMEDWLTAKLAYEGLPSKTYLSKTLAQYTSKTCSNCGFTITSADYDRVLEKLKKTATGWMTTINGKELKVEGQITYYNRYKRQNVVKDLSVELDRLSEESVNNDISSWTKGRSGEALSLLKKRFSHRPVQEKFVCLNCGFETHADEQAALNIARSWLFLRSQEYKKYQTNKTTGKNTDKRAFVETWQSFYRKKLKEVWKPAV

SEQ ID NO: 48024 - protein, 980 aa, synthetic construct
  REGION 1..980: note = engineered CasX variant
QEIKRINKIRRRLVKDSNTKKAGKTGPMKTLLVRVMTPDLRERLENLRKKPENIPQPISNTSRANLNKLLTDYTEMKKAILHVYWEEFQKDPVGLMSRVAQPASKKIDQNKLKPEMDEKGNLTTAGFACSQCGQPLFVYKLEQVSEKGKAYTNYFGRCNVAEHEKLILLAQLKPEKDSDEAVTYSLGKFGQRALDFYSIHVTKESTHPVKPLAQIAGNRYASYPVGKALSDACMGTIASFLSKYQDIIIEHQKVVKGNQKRLESLRELAGKENLEYPSVTLPPQPHTKEGVDAYNEVIARVRMWVNLNLWQKLKLSRDDAKPLLRLKGFPSFPLVERQANEVDWWDMVCNVKKLINEKKEDGKVFWQNLAGYKRQEALRPYLSSEEDRKKGKKFARYQLGDLLLHLEKKHGEDWGKVYDEAWERIDKKVEGLSKHIKLEEERRSEDAQSKAALTDWLRAKASFVIEGLKEADDKDEFCRCELKLQKWYGDLRGKPFAIEAENSILDISGFSKQYNCAFIWQKDGVKKLNLYLIINYFKGGKLRFKKIKPEAFEANRFYTVINKKSGEIVPMEVNFNFDDPNLIILPLAFGKRQGREFIWNDLLSLETGSLKLANGRVIEKTLYNRRTRQDEPALFVALTFERREVLDSSNIKPMNLIGVDRGENIPAVIALTDPEGCPLSRFKDSLGNPTHILRIGESYKEKQRTIQAKKEVEQRRAGGYSRKYASKAKNLADDMVRNTARDLLYYAVTQDAMLIFENLSRGFGRQGKRTFMAERQYTRMEDWLTAKLAYEGLPSKTYLSKTLAQYTSKTCSNCGFTITSADYDRVLEKLKKTATGWMTTINGKELKVEGQITYYNRYKRQNVVKDLSVELDRLSEESVNNDISSWTKGRSGEALSLLKKRFSHRPVQEKFVCLNCGFETHADEQAALNIARSWLFLRSQEYKKYQTNKTTGKNTDKRAFVETWQSFYRKKLKEVWKPAV

SEQ ID NO: 48025 - protein, 980 aa, synthetic construct
  REGION 1..980: note = engineered CasX variant
QEIKRINKIRRRLVKDSNTKKAGKTGPMKTLLVRVMTPDLRERLENLRKKPENIPQPISNTSRANLNKLLTDYTEMKKAILHVYWEEFQKDPVGLMSRVAQPASKKIDQNKLKPEMDEKGNLTTAGFACSQCGQPLFVYKLEQVSEKGKAYTNYFGRCNVAEHEKLILLAQLKPEKDSDEAVTYSLGKFGQRALDFYSIHVTKESTHPVKPLAQIAGNRYASHPVGKALSDACMGTIASFLSKYQDIIIEHQKVVKGNQKRLESLRELAGKENLEYPSVTLPPQPHTKEGVDAYNEVIARVRMWVNLNLWQKLKLSRDDAKPLLRLKGFPSFPLVERQANEVDWWDMVCNVKKLINEKKEDGKVFWQNLAGYKRQEALRPYLSSEEDRKKGKKFARYQLGDLLLHLEKKHGEDWGKVYDEAWERIDKKVEGLSKHIKLEEERRSEDAQSKAALTDWLRAKASFVIEGLKEADDKDEFCRCELKLQKWYGDLRGKPFAIEAENSILDISGFSKQYNCAFIWQKDGVKKLNLYLIINYFKGGKLRFKKIKPEAFEANRFYTVINKKSGEIVPMEVNFNFDDPNLIILPLAFGKRQGREFIWNDLLSLETGSLKLANGRVIEKTLYNRRTRQDEPALFVALTFERREVLDSSNIKPMNLIGVDRGENIPAVIALTDPEGCPLSRFKDSLGNPTHILRIGESYKEKQRTIQAKKEVEQRRAGGYSRKYASKAKNLADDMVRNTARDLLYYAVTQDAMLIFENLSRGFGRQGKRTFMAERQYTRMEDWLTAKLAYEGLPSKTYLSKTLAQYTSKTCSNCGFTITSADYDRVLEKLKKTATGWMTTINGKELKVEGQITYYNRYKRQNVVKDLSVELDRLSEESVNNDISSWTKGRSGEALSLLKKRFSHRPVQEKFVCLNCGFETHADEQAALNIARSWLFLRSQEYKKYQTNKTTGKNTDKRAFVETWQSFYRKKLKEVWKPAV

SEQ ID NO: 48026 - protein, 980 aa, synthetic construct
  REGION 1..980: note = engineered CasX variant
QEIKRINKIRRRLVKDSNTKKAGKTGPMKTLLVRVMTPDLRERLENLRKKPENIPQPISNTSRANLNKLLTDYTEMKKAILHVYWEEFQKDPVGLMSRVAQPASKKIDQNKLKPEMDEKGNLTTAGFACSQCGQPLFVYKLEQVSEKGKAYTNYFGRCNVAEHEKLILLAQLKPEKDSDEAVTYSLGKFGQRALDFYSIHVTKESTHPVKPLAQIAGNRYASSPVGKALSDACMGTIASFLSKYQDIIIEHQKVVKGNQKRLESLRELAGKENLEYPSVTLPPQPHTKEGVDAYNEVIARVRMWVNLNLWQKLKLSRDDAKPLLRLKGFPSFPLVERQANEVDWWDMVCNVKKLINEKKEDGKVFWQNLAGYKRQEALRPYLSSEEDRKKGKKFARYQLGDLLLHLEKKHGEDWGKVYDEAWERIDKKVEGLSKHIKLEEERRSEDAQSKAALTDWLRAKASFVIEGLKEADDKDEFCRCELKLQKWYGDLRGKPFAIEAENSILDISGFSKQYNCAFIWQKDGVKKLNLYLIINYFKGGKLRFKKIKPEAFEANRFYTVINKKSGEIVPMEVNFNFDDPNLIILPLAFGKRQGREFIWNDLLSLETGSLKLANGRVIEKTLYNRRTRQDEPALFVALTFERREVLDSSNIKPMNLIGVDRGENIPAVIALTDPEGCPLSRFKDSLGNPTHILRIGESYKEKQRTIQAKKEVEQRRAGGYSRKYASKAKNLADDMVRNTARDLLYYAVTQDAMLIFENLSRGFGRQGKRTFMAERQYTRMEDWLTAKLAYEGLPSKTYLSKTLAQYTSKTCSNCGFTITSADYDRVLEKLKKTATGWMTTINGKELKVEGQITYYNRYKRQNVVKDLSVELDRLSEESVNNDISSWTKGRSGEALSLLKKRFSHRPVQEKFVCLNCGFETHADEQAALNIARSWLFLRSQEYKKYQTNKTTGKNTDKRAFVETWQSFYRKKLKEVWKPAV

SEQ ID NO: 48027 - protein, 980 aa, synthetic construct
  REGION 1..980: note = engineered CasX variant
QEIKRINKIRRRLVKDSNTKKAGKTGPMKTLLVRVMTPDLRERLENLRKKPENIPQPISNTSRANLNKLLTDYTEMKKAILHVYWEEFQKDPVGLMSRVAQPASKKIDQNKLKPEMDEKGNLTTAGFACSQCGQPLFVYKLEQVSEKGKAYTNYFGRCNVAEHEKLILLAQLKPEKDSDEAVTYSLGKFGQRALDFYSIHVTKESTHPVKPLAQIAGNRYASTPVGKALSDACMGTIASFLSKYQDIIIEHQKVVKGNQKRLESLRELAGKENLEYPSVTLPPQPHTKEGVDAYNEVIARVRMWVNLNLWQKLKLSRDDAKPLLRLKGFPSFPLVERQANEVDWWDMVCNVKKLINEKKEDGKVFWQNLAGYKRQEALRPYLSSEEDRKKGKKFARYQLGDLLLHLEKKHGEDWGKVYDEAWERIDKKVEGLSKHIKLEEERRSEDAQSKAALTDWLRAKASFVIEGLKEADDKDEFCRCELKLQKWYGDLRGKPFAIEAENSILDISGFSKQYNCAFIWQKDGVKKLNLYLIINYFKGGKLRFKKIKPEAFEANRFYTVINKKSGEIVPMEVNFNFDDPNLIILPLAFGKRQGREFIWNDLLSLETGSLKLANGRVIEKTLYNRRTRQDEPALFVALTFERREVLDSSNIKPMNLIGVDRGENIPAVIALTDPEGCPLSRFKDSLGNPTHILRIGESYKEKQRTIQAKKEVEQRRAGGYSRKYASKAKNLADDMVRNTARDLLYYAVTQDAMLIFENLSRGFGRQGKRTFMAERQYTRMEDWLTAKLAYEGLPSKTYLSKTLAQYTSKTCSNCGFTITSADYDRVLEKLKKTATGWMTTINGKELKVEGQITYYNRYKRQNVVKDLSVELDRLSEESVNNDISSWTKGRSGEALSLLKKRFSHRPVQEKFVCLNCGFETHADEQAALNIARSWLFLRSQEYKKYQTNKTTGKNTDKRAFVETWQSFYRKKLKEVWKPAV

SEQ ID NO: 48028 - protein, 980 aa, synthetic construct
  REGION 1..980: note = engineered CasX variant
QEIKRINKIRRRLVKDSNTKKAGKTGPMKTLLVRVMTPDLRERLENLRKKPENIPQPISNTSRANLNKLLTDYTEMKKAILHVYWEEFQKDPVGLMSRVAQPASKKIDQNKLKPEMDEKGNLTTAGFACSQCGQPLFVYKLEQVSEKGKAYTNYFGRCNVAEHEKLILLAQLKPEKDSDEAVTYSLGKFGQRALDFYSIHVTKESTHPVKPLAQIAGNRYASAPVGKALSDACMGTIASFLSKYQDIIIEHQKVVKGNQKRLESLRELAGKENLEYPSVTLPPQPHTKEGVDAYNEVIARVRMWVNLNLWQKLKLSRDDAKPLLRLKGFPSFPLVERQANEVDWWDMVCNVKKLINEKKEDGKVFWQNLAGYKRQEALRPYLSSEEDRKKGKKFARYQLGDLLLHLEKKHGEDWGKVYDEAWERIDKKVEGLSKHIKLEEERRSEDAQSKAALTDWLRAKASFVIEGLKEADDKDEFCRCELKLQKWYGDLRGKPFAIEAENSILDISGFSKQYNCAFIWQKDGVKKLNLYLIINYFKGGKLRFKKIKPEAFEANRFYTVINKKSGEIVPMEVNFNFDDPNLIILPLAFGKRQGREFIWNDLLSLETGSLKLANGRVIEKTLYNRRTRQDEPALFVALTFERREVLDSSNIKPMNLIGVDRGENIPAVIALTDPEGCPLSRFKDSLGNPTHILRIGESYKEKQRTIQAKKEVEQRRAGGYSRKYASKAKNLADDMVRNTARDLLYYAVTQDAMLIFENLSRGFGRQGKRTFMAERQYTRMEDWLTAKLAYEGLPSKTYLSKTLAQYTSKTCSNCGFTITSADYDRVLEKLKKTATGWMTTINGKELKVEGQITYYNRYKRQNVVKDLSVELDRLSEESVNNDISSWTKGRSGEALSLLKKRFSHRPVQEKFVCLNCGFETHADEQAALNIARSWLFLRSQEYKKYQTNKTTGKNTDKRAFVETWQSFYRKKLKEVWKPAV

SEQ ID NO: 48029 - protein, 980 aa, synthetic construct
  REGION 1..980: note = engineered CasX variant
QEIKRINKIRRRLVKDSNTKKAGKTGPMKTLLVRVMTPDLRERLENLRKKPENIPQPISNTSRANLNKLLTDYTEMKKAILHVYWEEFQKDPVGLMSRVAQPASKKIDQNKLKPEMDEKGNLTTAGFACSQCGQPLFVYKLEQVSEKGKAYTNYFGRCNVAEHEKLILLAQLKPEKDSDEAVTYSLGKFGQRALDFYSIHVTKESTHPVKPLAQIAGNRYASVPVGKALSDACMGTIASFLSKYQDIIIEHQKVVKGNQKRLESLRELAGKENLEYPSVTLPPQPHTKEGVDAYNEVIARVRMWVNLNLWQKLKLSRDDAKPLLRLKGFPSFPLVERQANEVDWWDMVCNVKKLINEKKEDGKVFWQNLAGYKRQEALRPYLSSEEDRKKGKKFARYQLGDLLLHLEKKHGEDWGKVYDEAWERIDKKVEGLSKHIKLEEERRSEDAQSKAALTDWLRAKASFVIEGLKEADDKDEFCRCELKLQKWYGDLRGKPFAIEAENSILDISGFSKQYNCAFIWQKDGVKKLNLYLIINYFKGGKLRFKKIKPEAFEANRFYTVINKKSGEIVPMEVNFNFDDPNLIILPLAFGKRQGREFIWNDLLSLETGSLKLANGRVIEKTLYNRRTRQDEPALFVALTFERREVLDSSNIKPMNLIGVDRGENIPAVIALTDPEGCPLSRFKDSLGNPTHILRIGESYKEKQRTIQAKKEVEQRRAGGYSRKYASKAKNLADDMVRNTARDLLYYAVTQDAMLIFENLSRGFGRQGKRTFMAERQYTRMEDWLTAKLAYEGLPSKTYLSKTLAQYTSKTCSNCGFTITSADYDRVLEKLKKTATGWMTTINGKELKVEGQITYYNRYKRQNVVKDLSVELDRLSEESVNNDISSWTKGRSGEALSLLKKRFSHRPVQEKFVCLNCGFETHADEQAALNIARSWLFLRSQEYKKYQTNKTTGKNTDKRAFVETWQSFYRKKLKEVWKPAV

SEQ ID NO: 48030 - protein, 980 aa, synthetic construct
  REGION 1..980: note = engineered CasX variant
QEIKRINKIRRRLVKDSNTKKAGKTGPMKTLLVRVMTPDLRERLENLRKKPENIPQPISNTSRANLNKLLTDYTEMKKAILHVYWEEFQKDPVGLMSRVAQPASKKIDQNKLKPEMDEKGNLTTAGFACSQCGQPLFVYKLEQVSEKGKAYTNYFGRCNVAEHEKLIKLAQLKPEKDSDEAVTYSLGKFGQRALDFYSIHVTKESTHPVKPLAQIAGNRYASGPVGKALSDACMGTIASFLSKYQDIIIEHQKVVKGNQKRLESLRELAGKENLEYPSVTLPPQPHTKEGVDAYNEVIARVRMWVNLNLWQKLKLSRDDAKPLLRLKGFPSFPLVERQANEVDWWDMVCNVKKLINEKKEDGKVFWQNLAGYKRQEALRPYLSSEEDRKKGKKFARYQLGDLLLHLEKKHGEDWGKVYDEAWERIDKKVEGLSKHIKLEEERRSEDAQSKAALTDWLRAKASFVIEGLKEADDKDEFCRCELKLQKWYGDLRGKPFAIEAENSILDISGFSKQYNCAFIWQKDGVKKLNLYLIINYFKGGKLRFKKIKPEAFEANRFYTVINKKSGEIVPMEVNFNFDDPNLIILPLAFGKRQGREFIWNDLLSLETGSLKLANGRVIEKTLYNRRTRQDEPALFVALTFERREVLDSSNIKPMNLIGVDRGENIPAVIALTDPEGCPLSRFKDSLGNPTHILRIGESYKEKQRTIQAKKEVEQRRAGGYSRKYASKAKNLADDMVRNTARDLLYYAVTQDAMLIFENLSRGFGRQGKRTFMAERQYTRMEDWLTAKLAYEGLPSKTYLSKTLAQYTSKTCSNCGFTITSADYDRVLEKLKKTATGWMTTINGKELKVEGQITYYNRYKRQNVVKDLSVELDRLSEESVNNDISSWTKGRSGEALSLLKKRFSHRPVQEKFVCLNCGFETHADEQAALNIARSWLFLRSQEYKKYQTNKTTGKNTDKRAFVETWQSFYRKKLKEVWKPAV

SEQ ID NO: 48031 - protein, 979 aa, synthetic construct
  REGION 1..979: note = engineered CasX variant
QEIKRINKIRRRLVKDSNTKKAGKTGPMKTLLVRVMTPDLRERLENLRKKPENIPQPISNTSRANLNKLLTDYTEMKKAILHVYWEEFQKDPVGLMSRVAQPASKKIDQNKLKPEMDEKGNLTTAGFACSQCGQPLFVYKLEQVSEKGKAYTNYFGRCNVAEHEKLILLAQLKPEKDSDEAVTYSLGKFGQRALDFYSIHVTKESTHPVKPLAQIAGNRYASPVGKALSDACMGTIASFLSKYQDIIIEHQKVVKGNQKRLESLRELAGKENLEYPSVTLPPQPHTKEGVDAYNEVIARVRMWVNLNLWQKLKLSRDDAKPLLRLKGFPSFPLVERQANEVDWWDMVCNVKKLINEKKEDGKVFWQNLAGYKRQEALRPYLSSEEDRKKGKKFARYQLGDLLLHLEKKHGEDWGKVYDEAWERIDKKVEGLSKHIKLEEERRSEDAQSKAALTDWLRAKASFVIEGLKEADDKDEFCRCELKLQKWYGDLRGKPFAIEAENSILDISGFSKQYNCAFIWQKDGVKKLNLYLIINYFKGGKLRFKKIKPEAFEANRFYTVINKKSGEIVPMEVNFNFDDPNLIILPLAFGKRQGREFIWNDLLSLETGSLKLANGRVIEKTLYNRRTRQDEPALFVALTFERREVLDSSNIKPMNLIGVDRGENIPAVIALTDPEGCPLSRFKDSLGNPTHILRIGESYKEKQRTIQAKKEVEQRRAGGYSRKYASKAKNLADDMVRNTARDLLYYAVTQDAMLIFENLSRGFGRQGKRTFMAERQYTRMEDWLTAKLAYEGLPSKTYLSKTLAQYTSKTCSNCGFTITSADYDRVLEKLKKTATGWMTTINGKELKVEGQITYYNRYKRQNVVKDLSVELDRLSEESVNNDISSWTKGRSGEALSLLKKRFSHRPVQEKFVCLNCGFETHADEQAALNIARSWLFLRSQEYKKYQTNKTTGKNTDKRAFVETWQSFYRKKLKEVWKPAV

SEQ ID NO: 48032 - protein, 980 aa, synthetic construct
  REGION 1..980: note = engineered CasX variant
QEIKRINKIRRRLVKDSNTKKAGKTGPMKTLLVRVMTPDLRERLENLRKKPENIPQPISNTSRANLNKLLTDYTEMKKAILHVYWEEFQKDPVGLMSRVAQPASKKIDQNKLKPEMDEKGNLTTAGFACSQCGQPLFVYKLEQVSEKGKAYTNYFGRCNVAEHEKLILLAQLKPEKDSDEAVTYSLGKFGQRALDFYSIHVTKESTHPVKPLAQIAGNRYASYPVGKALSDACMGTIASFLSKYQDIIIEHQKVVKGNQKRLESLRELAGKENLEYPSVTLPPQPHTKEGVDAYNEVIARVRMWVNLNLWQKLKLSRDDAKPLLRLKGFPSFPLVERQANEVDWWDMVCNVKKLINEKKEDGKVFWQNLAGYKRQEALRPYLSSEEDRKKGKKFARYQLGDLLLHLEKKHGEDWGKVYDEAWERIDKKVEGLSKHIKLEEERRSEDAQSKAALTDWLRAKASFVIEGLKEADKDEFCRCELKLQKWYGDLRGKPFAIEAENSILDISGFSKQYNCAFIWQKDGVKKLNLYLIINYFKGGKLRFKKIKPEAFEANRFYTVINKKSGEIVPMEVNFNFDDPNLIILPLAFGKRQGREFIWNDLLSLETGSLKLANGRVIEKTLYNRRTRQDEPALFVALTFERREVLDSSNIKPMNLIGVDRGENIPAVIALTDPEGCPLSRFKDSLGNPTHILRIGESYKEKQRTIQAKKEVEQRRAGGYSRKYASKAKNLADDMVRNTARDLLYYAVTQDAMLIFENLSRGFGRQGKRTFMAERQYTRMEDWLTAKLAYEGLPSKTYLSKTLAQYTSKTCSNCGFTITSADYDRVLEKLKKTATGWMTTINGKELKVEGQITYYNRYKRQNVVKDLSVELDRLSEESVNNDISSWTKGRSGNEALSLLKKRFSHRPVQEKFVCLNCGFETHADEQAALNIARSWLFLRSQEYKKYQTNKTTGKNTDKRAFVETWQSFYRKKLKEVWKPAV

SEQ ID NO: 48033 - protein, 980 aa, synthetic construct
  REGION 1..980: note = engineered CasX variant
QEIKRINKIRRRLVKDSNTKKAGKTGPMKTLLVRVMTPDLRERLENLRKKPENIPQPISNTSRANLNKLLTDYTEMKKAILHVYWEEFQKDPVGLMSRVAQPASKKIDQNKLKPEMDEKGNLTTAGFACSQCGQPLFVYKLEQVSEKGKAYTNYFGRCNVAEHEKLILLAQLKPEKDSDEAVTYSLGKFGQRALDFYSIHVTKESTHPVKPLAQIAGNRYASHPVGKALSDACMGTIASFLSKYQDIIIEHQKVVKGNQKRLESLRELAGKENLEYPSVTLPPQPHTKEGVDAYNEVIARVRMWVNLNLWQKLKLSRDDAKPLLRLKGFPSFPLVERQANEVDWWDMVCNVKKLINEKKEDGKVFWQNLAGYKRQEALRPYLSSEEDRKKGKKFARYQLGDLLLHLEKKHGEDWGKVYDEAWERIDKKVEGLSKHIKLEEERRSEDAQSKAALTDWLRAKASFVIEGLKEADKDEFCRCELKLQKWYGDLRGKPFAIEAENSILDISGFSKQYNCAFIWQKDGVKKLNLYLIINYFKGGKLRFKKIKPEAFEANRFYTVINKKSGEIVPMEVNFNFDDPNLIILPLAFGKRQGREFIWNDLLSLETGSLKLANGRVIEKTLYNRRTRQDEPALFVALTFERREVLDSSNIKPMNLIGVDRGENIPAVIALTDPEGCPLSRFKDSLGNPTHILRIGESYKEKQRTIQAKKEVEQRRAGGYSRKYASKAKNLADDMVRNTARDLLYYAVTQDAMLIFENLSRGFGRQGKRTFMAERQYTRMEDWLTAKLAYEGLPSKTYLSKTLAQYTSKTCSNCGFTITSADYDRVLEKLKKTATGWMTTINGKELKVEGQITYYNRYKRQNVVKDLSVELDRLSEESVNNDISSWTKGRSGNEALSLLKKRFSHRPVQEKFVCLNCGFETHADEQAALNIARSWLFLRSQEYKKYQTNKTTGKNTDKRAFVETWQSFYRKKLKEVWKPAV

SEQ ID NO: 48034 - protein, 980 aa, synthetic construct
  REGION 1..980: note = engineered CasX variant
QEIKRINKIRRRLVKDSNTKKAGKTGPMKTLLVRVMTPDLRERLENLRKKPENIPQPISNTSRANLNKLLTDYTEMKKAILHVYWEEFQKDPVGLMSRVAQPASKKIDQNKLKPEMDEKGNLTTAGFACSQCGQPLFVYKLEQVSEKGKAYTNYFGRCNVAEHEKLILLAQLKPEKDSDEAVTYSLGKFGQRALDFYSIHVTKESTHPVKPLAQIAGNRYASSPVGKALSDACMGTIASFLSKYQDIIIEHQKVVKGNQKRLESLRELAGKENLEYPSVTLPPQPHTKEGVDAYNEVIARVRMWVNLNLWQKLKLSRDDAKPLLRLKGFPSFPLVERQANEVDWWDMVCNVKKLINEKKEDGKVFWQNLAGYKRQEALRPYLSSEEDRKKGKKFARYQLGDLLLHLEKKHGEDWGKVYDEAWERIDKKVEGLSKHIKLEEERRSEDAQSKAALTDWLRAKASFVIEGLKEADKDEFCRCELKLQKWYGDLRGKPFAIEAENSILDISGFSKQYNCAFIWQKDGVKKLNLYLIINYFKGGKLRFKKIKPEAFEANRFYTVINKKSGEIVPMEVNFNFDDPNLIILPLAFGKRQGREFIWNDLLSLETGSLKLANGRVIEKTLYNRRTRQDEPALFVALTFERREVLDSSNIKPMNLIGVDRGENIPAVIALTDPEGCPLSRFKDSLGNPTHILRIGESYKEKQRTIQAKKEVEQRRAGGYSRKYASKAKNLADDMVRNTARDLLYYAVTQDAMLIFENLSRGFGRQGKRTFMAERQYTRMEDWLTAKLAYEGLPSKTYLSKTLAQYTSKTCSNCGFTITSADYDRVLEKLKKTATGWMTTINGKELKVEGQITYYNRYKRQNVVKDLSVELDRLSEESVNNDISSWTKGRSGNEALSLLKKRFSHRPVQEKFVCLNCGFETHADEQAALNIARSWLFLRSQEYKKYQTNKTTGKNTDKRAFVETWQSFYRKKLKEVWKPAV

SEQ ID NO: 48035 - protein, 980 aa, synthetic construct
  REGION 1..980: note = engineered CasX variant
QEIKRINKIRRRLVKDSNTKKAGKTGPMKTLLVRVMTPDLRERLENLRKKPENIPQPISNTSRANLNKLLTDYTEMKKAILHVYWEEFQKDPVGLMSRVAQPASKKIDQNKLKPEMDEKGNLTTAGFACSQCGQPLFVYKLEQVSEKGKAYTNYFGRCNVAEHEKLILLAQLKPEKDSDEAVTYSLGKFGQRALDFYSIHVTKESTHPVKPLAQIAGNRYASTPVGKALSDACMGTIASFLSKYQDIIIEHQKVVKGNQKRLESLRELAGKENLEYPSVTLPPQPHTKEGVDAYNEVIARVRMWVNLNLWQKLKLSRDDAKPLLRLKGFPSFPLVERQANEVDWWDMVCNVKKLINEKKEDGKVFWQNLAGYKRQEALRPYLSSEEDRKKGKKFARYQLGDLLLHLEKKHGEDWGKVYDEAWERIDKKVEGLSKHIKLEEERRSEDAQSKAALTDWLRAKASFVIEGLKEADKDEFCRCELKLQKWYGDLRGKPFAIEAENSILDISGFSKQYNCAFIWQKDGVKKLNLYLIINYFKGGKLRFKKIKPEAFEANRFYTVINKKSGEIVPMEVNFNFDDPNLIILPLAFGKRQGREFIWNDLLSLETGSLKLANGRVIEKTLYNRRTRQDEPALFVALTFERREVLDSSNIKPMNLIGVDRGENIPAVIALTDPEGCPLSRFKDSLGNPTHILRIGESYKEKQRTIQAKKEVEQRRAGGYSRKYASKAKNLADDMVRNTARDLLYYAVTQDAMLIFENLSRGFGRQGKRTFMAERQYTRMEDWLTAKLAYEGLPSKTYLSKTLAQYTSKTCSNCGFTITSADYDRVLEKLKKTATGWMTTINGKELKVEGQITYYNRYKRQNVVKDLSVELDRLSEESVNNDISSWTKGRSGNEALSLLKKRFSHRPVQEKFVCLNCGFETHADEQAALNIARSWLFLRSQEYKKYQTNKTTGKNTDKRAFVETWQSFYRKKLKEVWKPAV

SEQ ID NO: 48036 - protein, 980 aa, synthetic construct
  REGION 1..980: note = engineered CasX variant
QEIKRINKIRRRLVKDSNTKKAGKTGPMKTLLVRVMTPDLRERLENLRKKPENIPQPISNTSRANLNKLLTDYTEMKKAILHVYWEEFQKDPVGLMSRVAQPASKKIDQNKLKPEMDEKGNLTTAGFACSQCGQPLFVYKLEQVSEKGKAYTNYFGRCNVAEHEKLILLAQLKPEKDSDEAVTYSLGKFGQRALDFYSIHVTKESTHPVKPLAQIAGNRYASAPVGKALSDACMGTIASFLSKYQDIIIEHQKVVKGNQKRLESLRELAGKENLEYPSVTLPPQPHTKEGVDAYNEVIARVRMWVNLNLWQKLKLSRDDAKPLLRLKGFPSFPLVERQANEVDWWDMVCNVKKLINEKKEDGKVFWQNLAGYKRQEALRPYLSSEEDRKKGKKFARYQLGDLLLHLEKKHGEDWGKVYDEAWERIDKKVEGLSKHIKLEEERRSEDAQSKAALTDWLRAKASFVIEGLKEADKDEFCRCELKLQKWYGDLRGKPFAIEAENSILDISGFSKQYNCAFIWQKDGVKKLNLYLIINYFKGGKLRFKKIKPEAFEANRFYTVINKKSGEIVPMEVNFNFDDPNLIILPLAFGKRQGREFIWNDLLSLETGSLKLANGRVIEKTLYNRRTRQDEPALFVALTFERREVLDSSNIKPMNLIGVDRGENIPAVIALTDPEGCPLSRFKDSLGNPTHILRIGESYKEKQRTIQAKKEVEQRRAGGYSRKYASKAKNLADDMVRNTARDLLYYAVTQDAMLIFENLSRGFGRQGKRTFMAERQYTRMEDWLTAKLAYEGLPSKTYLSKTLAQYTSKTCSNCGFTITSADYDRVLEKLKKTATGWMTTINGKELKVEGQITYYNRYKRQNVVKDLSVELDRLSEESVNNDISSWTKGRSGNEALSLLKKRFSHRPVQEKFVCLNCGFETHADEQAALNIARSWLFLRSQEYKKYQTNKTTGKNTDKRAFVETWQSFYRKKLKEVWKPAV

SEQ ID NO: 48037 - protein, 980 aa, synthetic construct
  REGION 1..980: note = engineered CasX variant
QEIKRINKIRRRLVKDSNTKKAGKTGPMKTLLVRVMTPDLRERLENLRKKPENIPQPISNTSRANLNKLLTDYTEMKKAILHVYWEEFQKDPVGLMSRVAQPASKKIDQNKLKPEMDEKGNLTTAGFACSQCGQPLFVYKLEQVSEKGKAYTNYFGRCNVAEHEKLILLAQLKPEKDSDEAVTYSLGKFGQRALDFYSIHVTKESTHPVKPLAQIAGNRYASVPVGKALSDACMGTIASFLSKYQDIIIEHQKVVKGNQKRLESLRELAGKENLEYPSVTLPPQPHTKEGVDAYNEVIARVRMWVNLNLWQKLKLSRDDAKPLLRLKGFPSFPLVERQANEVDWWDMVCNVKKLINEKKEDGKVFWQNLAGYKRQEALRPYLSSEEDRKKGKKFARYQLGDLLLHLEKKHGEDWGKVYDEAWERIDKKVEGLSKHIKLEEERRSEDAQSKAALTDWLRAKASFVIEGLKEADKDEFCRCELKLQKWYGDLRGKPFAIEAENSILDISGFSKQYNCAFIWQKDGVKKLNLYLIINYFKGGKLRFKKIKPEAFEANRFYTVINKKSGEIVPMEVNFNFDDPNLIILPLAFGKRQGREFIWNDLLSLETGSLKLANGRVIEKTLYNRRTRQDEPALFVALTFERREVLDSSNIKPMNLIGVDRGENIPAVIALTDPEGCPLSRFKDSLGNPTHILRIGESYKEKQRTIQAKKEVEQRRAGGYSRKYASKAKNLADDMVRNTARDLLYYAVTQDAMLIFENLSRGFGRQGKRTFMAERQYTRMEDWLTAKLAYEGLPSKTYLSKTLAQYTSKTCSNCGFTITSADYDRVLEKLKKTATGWMTTINGKELKVEGQITYYNRYKRQNVVKDLSVELDRLSEESVNNDISSWTKGRSGNEALSLLKKRFSHRPVQEKFVCLNCGFETHADEQAALNIARSWLFLRSQEYKKYQTNKTTGKNTDKRAFVETWQSFYRKKLKEVWKPAV

SEQ ID NO: 48038 - protein, 980 aa, synthetic construct
  REGION 1..980: note = engineered CasX variant
QEIKRINKIRRRLVKDSNTKKAGKTGPMKTLLVRVMTPDLRERLENLRKKPENIPQPISNTSRANLNKLLTDYTEMKKAILHVYWEEFQKDPVGLMSRVAQPASKKIDQNKLKPEMDEKGNLTTAGFACSQCGQPLFVYKLEQVSEKGKAYTNYFGRCNVAEHEKLIKLAQLKPEKDSDEAVTYSLGKFGQRALDFYSIHVTKESTHPVKPLAQIAGNRYASGPVGKALSDACMGTIASFLSKYQDIIIEHQKVVKGNQKRLESLRELAGKENLEYPSVTLPPQPHTKEGVDAYNEVIARVRMWVNLNLWQKLKLSRDDAKPLLRLKGFPSFPLVERQANEVDWWDMVCNVKKLINEKKEDGKVFWQNLAGYKRQEALRPYLSSEEDRKKGKKFARYQLGDLLLHLEKKHGEDWGKVYDEAWERIDKKVEGLSKHIKLEEERRSEDAQSKAALTDWLRAKASFVIEGLKEADKDEFCRCELKLQKWYGDLRGKPFAIEAENSILDISGFSKQYNCAFIWQKDGVKKLNLYLIINYFKGGKLRFKKIKPEAFEANRFYTVINKKSGEIVPMEVNFNFDDPNLIILPLAFGKRQGREFIWNDLLSLETGSLKLANGRVIEKTLYNRRTRQDEPALFVALTFERREVLDSSNIKPMNLIGVDRGENIPAVIALTDPEGCPLSRFKDSLGNPTHILRIGESYKEKQRTIQAKKEVEQRRAGGYSRKYASKAKNLADDMVRNTARDLLYYAVTQDAMLIFENLSRGFGRQGKRTFMAERQYTRMEDWLTAKLAYEGLPSKTYLSKTLAQYTSKTCSNCGFTITSADYDRVLEKLKKTATGWMTTINGKELKVEGQITYYNRYKRQNVVKDLSVELDRLSEESVNNDISSWTKGRSGNEALSLLKKRFSHRPVQEKFVCLNCGFETHADEQAALNIARSWLFLRSQEYKKYQTNKTTGKNTDKRAFVETWQSFYRKKLKEVWKPAV

SEQ ID NO: 48039 - protein, 979 aa, synthetic construct
  REGION 1..979: note = engineered CasX variant
QEIKRINKIRRRLVKDSNTKKAGKTGPMKTLLVRVMTPDLRERLENLRKKPENIPQPISNTSRANLNKLLTDYTEMKKAILHVYWEEFQKDPVGLMSRVAQPASKKIDQNKLKPEMDEKGNLTTAGFACSQCGQPLFVYKLEQVSEKGKAYTNYFGRCNVAEHEKLILLAQLKPEKDSDEAVTYSLGKFGQRALDFYSIHVTKESTHPVKPLAQIAGNRYASPVGKALSDACMGTIASFLSKYQDIIIEHQKVVKGNQKRLESLRELAGKENLEYPSVTLPPQPHTKEGVDAYNEVIARVRMWVNLNLWQKLKLSRDDAKPLLRLKGFPSFPLVERQANEVDWWDMVCNVKKLINEKKEDGKVFWQNLAGYKRQEALRPYLSSEEDRKKGKKFARYQLGDLLLHLEKKHGEDWGKVYDEAWERIDKKVEGLSKHIKLEEERRSEDAQSKAALTDWLRAKASFVIEGLKEADKDEFCRCELKLQKWYGDLRGKPFAIEAENSILDISGFSKQYNCAFIWQKDGVKKLNLYLIINYFKGGKLRFKKIKPEAFEANRFYTVINKKSGEIVPMEVNFNFDDPNLIILPLAFGKRQGREFIWNDLLSLETGSLKLANGRVIEKTLYNRRTRQDEPALFVALTFERREVLDSSNIKPMNLIGVDRGENIPAVIALTDPEGCPLSRFKDSLGNPTHILRIGESYKEKQRTIQAKKEVEQRRAGGYSRKYASKAKNLADDMVRNTARDLLYYAVTQDAMLIFENLSRGFGRQGKRTFMAERQYTRMEDWLTAKLAYEGLPSKTYLSKTLAQYTSKTCSNCGFTITSADYDRVLEKLKKTATGWMTTINGKELKVEGQITYYNRYKRQNVVKDLSVELDRLSEESVNNDISSWTKGRSGNEALSLLKKRFSHRPVQEKFVCLNCGFETHADEQAALNIARSWLFLRSQEYKKYQTNKTTGKNTDKRAFVETWQSFYRKKLKEVWKPAV

SEQ ID NO: 48040 - protein, 979 aa, synthetic construct
  REGION 1..979: note = engineered CasX variant
QEIKRINKIRRRLVKDSNTKKAGKTGPMKTLLVRVMTPDLRERLENLRKKPENIPQPISNTSRANLNKLLTDYTEMKKAILHVYWEEFQKDPVGLMSRVAQPASKKIDQNKLKPEMDEKGNLTTAGFACSQCGQPLFVYKLEQVSEKGKAYTNYFGRCNVAEHEKLILLAQLKPEKDSDEAVTYSLGKFGQRALDFYSIHVTKESTHPVKPLAQIAGNRYASYPVGKALSDACMGTIASFLSKYQDIIIEHQKVVKGNQKRLESLRELAGKENLEYPSVTLPPQPHTKEGVDAYNEVIARVRMWVNLNLWQKLKLSRDDAKPLLRLKGFPSFPLVERQANEVDWWDMVCNVKKLINEKKEDGKVFWQNLAGYKRQEALRPYLSSEEDRQKGKKFARYQLGDLLLHLEKKHGEDWGKVYDEAWERIDKKVEGLSKHIKLEEERRSEDAQSKAALTDWLRAKASFVIEGLKEADKDEFCRCELKLQKWYGDLRGKPFAIEAENSILDISGFSKQYNCAFIWQKDGVKKLNLYLIINYFKGGKLRFKKIKPEAFEANRFYTVINKKSGEIVPMEVNFNFDDPNLIILPLAFGKRQGREFIWNDLLSLETGSLKLANGRVIEKTLYNRRTRQDEPALFVALTFERREVLDSSNIKPMNLIGVDRGENIPAVIALTDPEGCPLSRFKDSLGNPTHILRIGESYKEKQRTIQAKKEVEQRRAGGYSRKYASKAKNLADDMVRNTARDLLYYAVTQDAMLIFENLSRGFGRQGKRTFMAERQYTRMEDWLTAKLAYEGLPSKTYLSKTLAQYTSKTCSNCGFTITSADYDRVLEKLKKTATGWMTTINGKELKVEGQITYYNRYKRQNVVKDLSVELDRLSEESVNNDISSWTKGRSGEALSLLKKRFSHRPVQEKFVCLNCGFETHADEQAALNIARSWLFLRSQEYKKYQTNKTTGKNTDKRAFVETWQSFYRKKLKEVWKPAV

SEQ ID NO: 48041 - protein, 979 aa, synthetic construct
  REGION 1..979: note = engineered CasX variant
QEIKRINKIRRRLVKDSNTKKAGKTGPMKTLLVRVMTPDLRERLENLRKKPENIPQPISNTSRANLNKLLTDYTEMKKAILHVYWEEFQKDPVGLMSRVAQPASKKIDQNKLKPEMDEKGNLTTAGFACSQCGQPLFVYKLEQVSEKGKAYTNYFGRCNVAEHEKLILLAQLKPEKDSDEAVTYSLGKFGQRALDFYSIHVTKESTHPVKPLAQIAGNRYASHPVGKALSDACMGTIASFLSKYQDIIIEHQKVVKGNQKRLESLRELAGKENLEYPSVTLPPQPHTKEGVDAYNEVIARVRMWVNLNLWQKLKLSRDDAKPLLRLKGFPSFPLVERQANEVDWWDMVCNVKKLINEKKEDGKVFWQNLAGYKRQEALRPYLSSEEDRQKGKKFARYQLGDLLLHLEKKHGEDWGKVYDEAWERIDKKVEGLSKHIKLEEERRSEDAQSKAALTDWLRAKASFVIEGLKEADKDEFCRCELKLQKWYGDLRGKPFAIEAENSILDISGFSKQYNCAFIWQKDGVKKLNLYLIINYFKGGKLRFKKIKPEAFEANRFYTVINKKSGEIVPMEVNFNFDDPNLIILPLAFGKRQGREFIWNDLLSLETGSLKLANGRVIEKTLYNRRTRQDEPALFVALTFERREVLDSSNIKPMNLIGVDRGENIPAVIALTDPEGCPLSRFKDSLGNPTHILRIGESYKEKQRTIQAKKEVEQRRAGGYSRKYASKAKNLADDMVRNTARDLLYYAVTQDAMLIFENLSRGFGRQGKRTFMAERQYTRMEDWLTAKLAYEGLPSKTYLSKTLAQYTSKTCSNCGFTITSADYDRVLEKLKKTATGWMTTINGKELKVEGQITYYNRYKRQNVVKDLSVELDRLSEESVNNDISSWTKGRSGEALSLLKKRFSHRPVQEKFVCLNCGFETHADEQAALNIARSWLFLRSQEYKKYQTNKTTGKNTDKRAFVETWQSFYRKKLKEVWKPAV

SEQ ID NO: 48042 - protein, 979 aa, synthetic construct
  REGION 1..979: note = engineered CasX variant
QEIKRINKIRRRLVKDSNTKKAGKTGPMKTLLVRVMTPDLRERLENLRKKPENIPQPISNTSRANLNKLLTDYTEMKKAILHVYWEEFQKDPVGLMSRVAQPASKKIDQNKLKPEMDEKGNLTTAGFACSQCGQPLFVYKLEQVSEKGKAYTNYFGRCNVAEHEKLILLAQLKPEKDSDEAVTYSLGKFGQRALDFYSIHVTKESTHPVKPLAQIAGNRYASSPVGKALSDACMGTIASFLSKYQDIIIEHQKVVKGNQKRLESLRELAGKENLEYPSVTLPPQPHTKEGVDAYNEVIARVRMWVNLNLWQKLKLSRDDAKPLLRLKGFPSFPLVERQANEVDWWDMVCNVKKLINEKKEDGKVFWQNLAGYKRQEALRPYLSSEEDRQKGKKFARYQLGDLLLHLEKKHGEDWGKVYDEAWERIDKKVEGLSKHIKLEEERRSEDAQSKAALTDWLRAKASFVIEGLKEADKDEFCRCELKLQKWYGDLRGKPFAIEAENSILDISGFSKQYNCAFIWQKDGVKKLNLYLIINYFKGGKLRFKKIKPEAFEANRFYTVINKKSGEIVPMEVNFNFDDPNLIILPLAFGKRQGREFIWNDLLSLETGSLKLANGRVIEKTLYNRRTRQDEPALFVALTFERREVLDSSNIKPMNLIGVDRGENIPAVIALTDPEGCPLSRFKDSLGNPTHILRIGESYKEKQRTIQAKKEVEQRRAGGYSRKYASKAKNLADDMVRNTARDLLYYAVTQDAMLIFENLSRGFGRQGKRTFMAERQYTRMEDWLTAKLAYEGLPSKTYLSKTLAQYTSKTCSNCGFTITSADYDRVLEKLKKTATGWMTTINGKELKVEGQITYYNRYKRQNVVKDLSVELDRLSEESVNNDISSWTKGRSGEALSLLKKRFSHRPVQEKFVCLNCGFETHADEQAALNIARSWLFLRSQEYKKYQTNKTTGKNTDKRAFVETWQSFYRKKLKEVWKPAV

SEQ ID NO: 48043 - protein, 979 aa, synthetic construct
  REGION 1..979: note = engineered CasX variant
QEIKRINKIRRRLVKDSNTKKAGKTGPMKTLLVRVMTPDLRERLENLRKKPENIPQPISNTSRANLNKLLTDYTEMKKAILHVYWEEFQKDPVGLMSRVAQPASKKIDQNKLKPEMDEKGNLTTAGFACSQCGQPLFVYKLEQVSEKGKAYTNYFGRCNVAEHEKLILLAQLKPEKDSDEAVTYSLGKFGQRALDFYSIHVTKESTHPVKPLAQIAGNRYASTPVGKALSDACMGTIASFLSKYQDIIIEHQKVVKGNQKRLESLRELAGKENLEYPSVTLPPQPHTKEGVDAYNEVIARVRMWVNLNLWQKLKLSRDDAKPLLRLKGFPSFPLVERQANEVDWWDMVCNVKKLINEKKEDGKVFWQNLAGYKRQEALRPYLSSEEDRQKGKKFARYQLGDLLLHLEKKHGEDWGKVYDEAWERIDKKVEGLSKHIKLEEERRSEDAQSKAALTDWLRAKASFVIEGLKEADKDEFCRCELKLQKWYGDLRGKPFAIEAENSILDISGFSKQYNCAFIWQKDGVKKLNLYLIINYFKGGKLRFKKIKPEAFEANRFYTVINKKSGEIVPMEVNFNFDDPNLIILPLAFGKRQGREFIWNDLLSLETGSLKLANGRVIEKTLYNRRTRQDEPALFVALTFERREVLDSSNIKPMNLIGVDRGENIPAVIALTDPEGCPLSRFKDSLGNPTHILRIGESYKEKQRTIQAKKEVEQRRAGGYSRKYASKAKNLADDMVRNTARDLLYYAVTQDAMLIFENLSRGFGRQGKRTFMAERQYTRMEDWLTAKLAYEGLPSKTYLSKTLAQYTSKTCSNCGFTITSADYDRVLEKLKKTATGWMTTINGKELKVEGQITYYNRYKRQNVVKDLSVELDRLSEESVNNDISSWTKGRSGEALSLLKKRFSHRPVQEKFVCLNCGFETHADEQAALNIARSWLFLRSQEYKKYQTNKTTGKNTDKRAFVETWQSFYRKKLKEVWKPAV

SEQ ID NO: 48044 - protein, 979 aa, synthetic construct
  REGION 1..979: note = engineered CasX variant
QEIKRINKIRRRLVKDSNTKKAGKTGPMKTLLVRVMTPDLRERLENLRKKPENIPQPISNTSRANLNKLLTDYTEMKKAILHVYWEEFQKDPVGLMSRVAQPASKKIDQNKLKPEMDEKGNLTTAGFACSQCGQPLFVYKLEQVSEKGKAYTNYFGRCNVAEHEKLILLAQLKPEKDSDEAVTYSLGKFGQRALDFYSIHVTKESTHPVKPLAQIAGNRYASAPVGKALSDACMGTIASFLSKYQDIIIEHQKVVKGNQKRLESLRELAGKENLEYPSVTLPPQPHTKEGVDAYNEVIARVRMWVNLNLWQKLKLSRDDAKPLLRLKGFPSFPLVERQANEVDWWDMVCNVKKLINEKKEDGKVFWQNLAGYKRQEALRPYLSSEEDRQKGKKFARYQLGDLLLHLEKKHGEDWGKVYDEAWERIDKKVEGLSKHIKLEEERRSEDAQSKAALTDWLRAKASFVIEGLKEADKDEFCRCELKLQKWYGDLRGKPFAIEAENSILDISGFSKQYNCAFIWQKDGVKKLNLYLIINYFKGGKLRFKKIKPEAFEANRFYTVINKKSGEIVPMEVNFNFDDPNLIILPLAFGKRQGREFIWNDLLSLETGSLKLANGRVIEKTLYNRRTRQDEPALFVALTFERREVLDSSNIKPMNLIGVDRGENIPAVIALTDPEGCPLSRFKDSLGNPTHILRIGESYKEKQRTIQAKKEVEQRRAGGYSRKYASKAKNLADDMVRNTARDLLYYAVTQDAMLIFENLSRGFGRQGKRTFMAERQYTRMEDWLTAKLAYEGLPSKTYLSKTLAQYTSKTCSNCGFTITSADYDRVLEKLKKTATGWMTTINGKELKVEGQITYYNRYKRQNVVKDLSVELDRLSEESVNNDISSWTKGRSGEALSLLKKRFSHRPVQEKFVCLNCGFETHADEQAALNIARSWLFLRSQEYKKYQTNKTTGKNTDKRAFVETWQSFYRKKLKEVWKPAV

SEQ ID NO: 48045 - protein, 979 aa, synthetic construct
  REGION 1..979: note = engineered CasX variant
QEIKRINKIRRRLVKDSNTKKAGKTGPMKTLLVRVMTPDLRERLENLRKKPENIPQPISNTSRANLNKLLTDYTEMKKAILHVYWEEFQKDPVGLMSRVAQPASKKIDQNKLKPEMDEKGNLTTAGFACSQCGQPLFVYKLEQVSEKGKAYTNYFGRCNVAEHEKLILLAQLKPEKDSDEAVTYSLGKFGQRALDFYSIHVTKESTHPVKPLAQIAGNRYASVPVGKALSDACMGTIASFLSKYQDIIIEHQKVVKGNQKRLESLRELAGKENLEYPSVTLPPQPHTKEGVDAYNEVIARVRMWVNLNLWQKLKLSRDDAKPLLRLKGFPSFPLVERQANEVDWWDMVCNVKKLINEKKEDGKVFWQNLAGYKRQEALRPYLSSEEDRQKGKKFARYQLGDLLLHLEKKHGEDWGKVYDEAWERIDKKVEGLSKHIKLEEERRSEDAQSKAALTDWLRAKASFVIEGLKEADKDEFCRCELKLQKWYGDLRGKPFAIEAENSILDISGFSKQYNCAFIWQKDGVKKLNLYLIINYFKGGKLRFKKIKPEAFEANRFYTVINKKSGEIVPMEVNFNFDDPNLIILPLAFGKRQGREFIWNDLLSLETGSLKLANGRVIEKTLYNRRTRQDEPALFVALTFERREVLDSSNIKPMNLIGVDRGENIPAVIALTDPEGCPLSRFKDSLGNPTHILRIGESYKEKQRTIQAKKEVEQRRAGGYSRKYASKAKNLADDMVRNTARDLLYYAVTQDAMLIFENLSRGFGRQGKRTFMAERQYTRMEDWLTAKLAYEGLPSKTYLSKTLAQYTSKTCSNCGFTITSADYDRVLEKLKKTATGWMTTINGKELKVEGQITYYNRYKRQNVVKDLSVELDRLSEESVNNDISSWTKGRSGEALSLLKKRFSHRPVQEKFVCLNCGFETHADEQAALNIARSWLFLRSQEYKKYQTNKTTGKNTDKRAFVETWQSFYRKKLKEVWKPAV

SEQ ID NO: 48046 - protein, 979 aa, synthetic construct
  REGION 1..979: note = engineered CasX variant
QEIKRINKIRRRLVKDSNTKKAGKTGPMKTLLVRVMTPDLRERLENLRKKPENIPQPISNTSRANLNKLLTDYTEMKKAILHVYWEEFQKDPVGLMSRVAQPASKKIDQNKLKPEMDEKGNLTTAGFACSQCGQPLFVYKLEQVSEKGKAYTNYFGRCNVAEHEKLIKLAQLKPEKDSDEAVTYSLGKFGQRALDFYSIHVTKESTHPVKPLAQIAGNRYASGPVGKALSDACMGTIASFLSKYQDIIIEHQKVVKGNQKRLESLRELAGKENLEYPSVTLPPQPHTKEGVDAYNEVIARVRMWVNLNLWQKLKLSRDDAKPLLRLKGFPSFPLVERQANEVDWWDMVCNVKKLINEKKEDGKVFWQNLAGYKRQEALRPYLSSEEDRQKGKKFARYQLGDLLLHLEKKHGEDWGKVYDEAWERIDKKVEGLSKHIKLEEERRSEDAQSKAALTDWLRAKASFVIEGLKEADKDEFCRCELKLQKWYGDLRGKPFAIEAENSILDISGFSKQYNCAFIWQKDGVKKLNLYLIINYFKGGKLRFKKIKPEAFEANRFYTVINKKSGEIVPMEVNFNFDDPNLIILPLAFGKRQGREFIWNDLLSLETGSLKLANGRVIEKTLYNRRTRQDEPALFVALTFERREVLDSSNIKPMNLIGVDRGENIPAVIALTDPEGCPLSRFKDSLGNPTHILRIGESYKEKQRTIQAKKEVEQRRAGGYSRKYASKAKNLADDMVRNTARDLLYYAVTQDAMLIFENLSRGFGRQGKRTFMAERQYTRMEDWLTAKLAYEGLPSKTYLSKTLAQYTSKTCSNCGFTITSADYDRVLEKLKKTATGWMTTINGKELKVEGQITYYNRYKRQNVVKDLSVELDRLSEESVNNDISSWTKGRSGEALSLLKKRFSHRPVQEKFVCLNCGFETHADEQAALNIARSWLFLRSQEYKKYQTNKTTGKNTDKRAFVETWQSFYRKKLKEVWKPAV

SEQ ID NO: 48047 - protein, 978 aa, synthetic construct
  REGION 1..978: note = engineered CasX variant
QEIKRINKIRRRLVKDSNTKKAGKTGPMKTLLVRVMTPDLRERLENLRKKPENIPQPISNTSRANLNKLLTDYTEMKKAILHVYWEEFQKDPVGLMSRVAQPASKKIDQNKLKPEMDEKGNLTTAGFACSQCGQPLFVYKLEQVSEKGKAYTNYFGRCNVAEHEKLILLAQLKPEKDSDEAVTYSLGKFGQRALDFYSIHVTKESTHPVKPLAQIAGNRYASPVGKALSDACMGTIASFLSKYQDIIIEHQKVVKGNQKRLESLRELAGKENLEYPSVTLPPQPHTKEGVDAYNEVIARVRMWVNLNLWQKLKLSRDDAKPLLRLKGFPSFPLVERQANEVDWWDMVCNVKKLINEKKEDGKVFWQNLAGYKRQEALRPYLSSEEDRQKGKKFARYQLGDLLLHLEKKHGEDWGKVYDEAWERIDKKVEGLSKHIKLEEERRSEDAQSKAALTDWLRAKASFVIEGLKEADKDEFCRCELKLQKWYGDLRGKPFAIEAENSILDISGFSKQYNCAFIWQKDGVKKLNLYLIINYFKGGKLRFKKIKPEAFEANRFYTVINKKSGEIVPMEVNFNFDDPNLIILPLAFGKRQGREFIWNDLLSLETGSLKLANGRVIEKTLYNRRTRQDEPALFVALTFERREVLDSSNIKPMNLIGVDRGENIPAVIALTDPEGCPLSRFKDSLGNPTHILRIGESYKEKQRTIQAKKEVEQRRAGGYSRKYASKAKNLADDMVRNTARDLLYYAVTQDAMLIFENLSRGFGRQGKRTFMAERQYTRMEDWLTAKLAYEGLPSKTYLSKTLAQYTSKTCSNCGFTITSADYDRVLEKLKKTATGWMTTINGKELKVEGQITYYNRYKRQNVVKDLSVELDRLSEESVNNDISSWTKGRSGEALSLLKKRFSHRPVQEKFVCLNCGFETHADEQAALNIARSWLFLRSQEYKKYQTNKTTGKNTDKRAFVETWQSFYRKKLKEVWKPAV

SEQ ID NO: 48048 - protein, 979 aa, synthetic construct
  REGION 1..979: note = engineered CasX variant
QEIKRINKIRRRLVKDSNTKKAGKTGPMKTLLVRVMTPDLRERLENLRKKPENIPQPISNTSRANLNKLLTDYTEMKKAILHVYWEEFQKDPVGLMSRVAQPASKKIDQNKLKPEMDEKGNLTTAGFACSQCGQPLFVYKLEQVSEKGKAYTNYFGRCNVAEHEKLILLAQLKPEKDSDEAVTYSLGKFGQRALDFYSIHVTKESTHPVKPLAQIAGNRYASYPVGKALSDACMGTIASFLSKYQDIIIEHQKVVKGNQKRLESLRELAGKENLEYPSVTLPPQPHTKEGVDAYNEVIARVRMWVNLNLWQKLKLSRDDAKPLLRLKGFPSFPLVERQANEVDWWDMVCNVKKLINEKKEDGKVFWQNLAGYKRQEALRPYLSSEEDRKKGKKFARYQLGDLLLHLEKKHGEDWGKVYDEAWERIDKKVEGLSKHIKLEEERRSEDAQSKAALTDWLRAKASFVIEGLKEADKDEFCRCELKLQKWYGDLRGKPFAIEAENSILDISGFSKQYNCAFIWQKDGVKKLNLYLIINYFKGGKLRFKKIKPEAFEANRFYTVINKKSGEIVPMEVNFNFDDPNLIILPLAFGKRQGREFIWNDLLSLETGSLKLANGRVIEKTLYNRRTRQDEPALFVALTFERREVLDSSNIKPMNLIGVDRGENIPAVIALTDPEGCPLSRFKDSLGNPTHILRIGESYKEKQRTIQAKKEVEQRRAGGYSRKYASKAKNLADDMVRNTARDLLYYAVTQDAMLIFENLSRGFGRQGKRTFMAERQYTRMEDWLTAKLAYEGLPSQTYLSKTLAQYTSKTCSNCGFTITSADYDRVLEKLKKTATGWMTTINGKELKVEGQITYYNRYKRQNVVKDLSVELDRLSEESVNNDISSWTKGRSGEALSLLKKRFSHRPVQEKFVCLNCGFETHADEQAALNIARSWLFLRSQEYKKYQTNKTTGKNTDKRAFVETWQSFYRKKLKEVWKPAV

SEQ ID NO: 48049 - protein, 979 aa, synthetic construct
  REGION 1..979: note = engineered CasX variant
QEIKRINKIRRRLVKDSNTKKAGKTGPMKTLLVRVMTPDLRERLENLRKKPENIPQPISNTSRANLNKLLTDYTEMKKAILHVYWEEFQKDPVGLMSRVAQPASKKIDQNKLKPEMDEKGNLTTAGFACSQCGQPLFVYKLEQVSEKGKAYTNYFGRCNVAEHEKLILLAQLKPEKDSDEAVTYSLGKFGQRALDFYSIHVTKESTHPVKPLAQIAGNRYASHPVGKALSDACMGTIASFLSKYQDIIIEHQKVVKGNQKRLESLRELAGKENLEYPSVTLPPQPHTKEGVDAYNEVIARVRMWVNLNLWQKLKLSRDDAKPLLRLKGFPSFPLVERQANEVDWWDMVCNVKKLINEKKEDGKVFWQNLAGYKRQEALRPYLSSEEDRKKGKKFARYQLGDLLLHLEKKHGEDWGKVYDEAWERIDKKVEGLSKHIKLEEERRSEDAQSKAALTDWLRAKASFVIEGLKEADKDEFCRCELKLQKWYGDLRGKPFAIEAENSILDISGFSKQYNCAFIWQKDGVKKLNLYLIINYFKGGKLRFKKIKPEAFEANRFYTVINKKSGEIVPMEVNFNFDDPNLIILPLAFGKRQGREFIWNDLLSLETGSLKLANGRVIEKTLYNRRTRQDEPALFVALTFERREVLDSSNIKPMNLIGVDRGENIPAVIALTDPEGCPLSRFKDSLGNPTHILRIGESYKEKQRTIQAKKEVEQRRAGGYSRKYASKAKNLADDMVRNTARDLLYYAVTQDAMLIFENLSRGFGRQGKRTFMAERQYTRMEDWLTAKLAYEGLPSQTYLSKTLAQYTSKTCSNCGFTITSADYDRVLEKLKKTATGWMTTINGKELKVEGQITYYNRYKRQNVVKDLSVELDRLSEESVNNDISSWTKGRSGEALSLLKKRFSHRPVQEKFVCLNCGFETHADEQAALNIARSWLFLRSQEYKKYQTNKTTGKNTDKRAFVETWQSFYRKKLKEVWKPAV

SEQ ID NO: 48050 - protein, 979 aa, synthetic construct
  REGION 1..979: note = engineered CasX variant
QEIKRINKIRRRLVKDSNTKKAGKTGPMKTLLVRVMTPDLRERLENLRKKPENIPQPISNTSRANLNKLLTDYTEMKKAILHVYWEEFQKDPVGLMSRVAQPASKKIDQNKLKPEMDEKGNLTTAGFACSQCGQPLFVYKLEQVSEKGKAYTNYFGRCNVAEHEKLILLAQLKPEKDSDEAVTYSLGKFGQRALDFYSIHVTKESTHPVKPLAQIAGNRYASSPVGKALSDACMGTIASFLSKYQDIIIEHQKVVKGNQKRLESLRELAGKENLEYPSVTLPPQPHTKEGVDAYNEVIARVRMWVNLNLWQKLKLSRDDAKPLLRLKGFPSFPLVERQANEVDWWDMVCNVKKLINEKKEDGKVFWQNLAGYKRQEALRPYLSSEEDRKKGKKFARYQLGDLLLHLEKKHGEDWGKVYDEAWERIDKKVEGLSKHIKLEEERRSEDAQSKAALTDWLRAKASFVIEGLKEADKDEFCRCELKLQKWYGDLRGKPFAIEAENSILDISGFSKQYNCAFIWQKDGVKKLNLYLIINYFKGGKLRFKKIKPEAFEANRFYTVINKKSGEIVPMEVNFNFDDPNLIILPLAFGKRQGREFIWNDLLSLETGSLKLANGRVIEKTLYNRRTRQDEPALFVALTFERREVLDSSNIKPMNLIGVDRGENIPAVIALTDPEGCPLSRFKDSLGNPTHILRIGESYKEKQRTIQAKKEVEQRRAGGYSRKYASKAKNLADDMVRNTARDLLYYAVTQDAMLIFENLSRGFGRQGKRTFMAERQYTRMEDWLTAKLAYEGLPSQTYLSKTLAQYTSKTCSNCGFTITSADYDRVLEKLKKTATGWMTTINGKELKVEGQITYYNRYKRQNVVKDLSVELDRLSEESVNNDISSWTKGRSGEALSLLKKRFSHRPVQEKFVCLNCGFETHADEQAALNIARSWLFLRSQEYKKYQTNKTTGKNTDKRAFVETWQSFYRKKLKEVWKPAV

SEQ ID NO: 48051 - protein, 979 aa, synthetic construct
  REGION 1..979: note = engineered CasX variant
QEIKRINKIRRRLVKDSNTKKAGKTGPMKTLLVRVMTPDLRERLENLRKKPENIPQPISNTSRANLNKLLTDYTEMKKAILHVYWEEFQKDPVGLMSRVAQPASKKIDQNKLKPEMDEKGNLTTAGFACSQCGQPLFVYKLEQVSEKGKAYTNYFGRCNVAEHEKLILLAQLKPEKDSDEAVTYSLGKFGQRALDFYSIHVTKESTHPVKPLAQIAGNRYASTPVGKALSDACMGTIASFLSKYQDIIIEHQKVVKGNQKRLESLRELAGKENLEYPSVTLPPQPHTKEGVDAYNEVIARVRMWVNLNLWQKLKLSRDDAKPLLRLKGFPSFPLVERQANEVDWWDMVCNVKKLINEKKEDGKVFWQNLAGYKRQEALRPYLSSEEDRKKGKKFARYQLGDLLLHLEKKHGEDWGKVYDEAWERIDKKVEGLSKHIKLEEERRSEDAQSKAALTDWLRAKASFVIEGLKEADKDEFCRCELKLQKWYGDLRGKPFAIEAENSILDISGFSKQYNCAFIWQKDGVKKLNLYLIINYFKGGKLRFKKIKPEAFEANRFYTVINKKSGEIVPMEVNFNFDDPNLIILPLAFGKRQGREFIWNDLLSLETGSLKLANGRVIEKTLYNRRTRQDEPALFVALTFERREVLDSSNIKPMNLIGVDRGENIPAVIALTDPEGCPLSRFKDSLGNPTHILRIGESYKEKQRTIQAKKEVEQRRAGGYSRKYASKAKNLADDMVRNTARDLLYYAVTQDAMLIFENLSRGFGRQGKRTFMAERQYTRMEDWLTAKLAYEGLPSQTYLSKTLAQYTSKTCSNCGFTITSADYDRVLEKLKKTATGWMTTINGKELKVEGQITYYNRYKRQNVVKDLSVELDRLSEESVNNDISSWTKGRSGEALSLLKKRFSHRPVQEKFVCLNCGFETHADEQAALNIARSWLFLRSQEYKKYQTNKTTGKNTDKRAFVETWQSFYRKKLKEVWKPAV

SEQ ID NO: 48052 - protein, 979 aa, synthetic construct
  REGION 1..979: note = engineered CasX variant
QEIKRINKIRRRLVKDSNTKKAGKTGPMKTLLVRVMTPDLRERLENLRKKPENIPQPISNTSRANLNKLLTDYTEMKKAILHVYWEEFQKDPVGLMSRVAQPASKKIDQNKLKPEMDEKGNLTTAGFACSQCGQPLFVYKLEQVSEKGKAYTNYFGRCNVAEHEKLILLAQLKPEKDSDEAVTYSLGKFGQRALDFYSIHVTKESTHPVKPLAQIAGNRYASAPVGKALSDACMGTIASFLSKYQDIIIEHQKVVKGNQKRLESLRELAGKENLEYPSVTLPPQPHTKEGVDAYNEVIARVRMWVNLNLWQKLKLSRDDAKPLLRLKGFPSFPLVERQANEVDWWDMVCNVKKLINEKKEDGKVFWQNLAGYKRQEALRPYLSSEEDRKKGKKFARYQLGDLLLHLEKKHGEDWGKVYDEAWERIDKKVEGLSKHIKLEEERRSEDAQSKAALTDWLRAKASFVIEGLKEADKDEFCRCELKLQKWYGDLRGKPFAIEAENSILDISGFSKQYNCAFIWQKDGVKKLNLYLIINYFKGGKLRFKKIKPEAFEANRFYTVINKKSGEIVPMEVNFNFDDPNLIILPLAFGKRQGREFIWNDLLSLETGSLKLANGRVIEKTLYNRRTRQDEPALFVALTFERREVLDSSNIKPMNLIGVDRGENIPAVIALTDPEGCPLSRFKDSLGNPTHILRIGESYKEKQRTIQAKKEVEQRRAGGYSRKYASKAKNLADDMVRNTARDLLYYAVTQDAMLIFENLSRGFGRQGKRTFMAERQYTRMEDWLTAKLAYEGLPSQTYLSKTLAQYTSKTCSNCGFTITSADYDRVLEKLKKTATGWMTTINGKELKVEGQITYYNRYKRQNVVKDLSVELDRLSEESVNNDISSWTKGRSGEALSLLKKRFSHRPVQEKFVCLNCGFETHADEQAALNIARSWLFLRSQEYKKYQTNKTTGKNTDKRAFVETWQSFYRKKLKEVWKPAV

SEQ ID NO: 48053 - protein, 979 aa, synthetic construct
  REGION 1..979: note = engineered CasX variant
QEIKRINKIRRRLVKDSNTKKAGKTGPMKTLLVRVMTPDLRERLENLRKKPENIPQPISNTSRANLNKLLTDYTEMKKAILHVYWEEFQKDPVGLMSRVAQPASKKIDQNKLKPEMDEKGNLTTAGFACSQCGQPLFVYKLEQVSEKGKAYTNYFGRCNVAEHEKLILLAQLKPEKDSDEAVTYSLGKFGQRALDFYSIHVTKESTHPVKPLAQIAGNRYASVPVGKALSDACMGTIASFLSKYQDIIIEHQKVVKGNQKRLESLRELAGKENLEYPSVTLPPQPHTKEGVDAYNEVIARVRMWVNLNLWQKLKLSRDDAKPLLRLKGFPSFPLVERQANEVDWWDMVCNVKKLINEKKEDGKVFWQNLAGYKRQEALRPYLSSEEDRKKGKKFARYQLGDLLLHLEKKHGEDWGKVYDEAWERIDKKVEGLSKHIKLEEERRSEDAQSKAALTDWLRAKASFVIEGLKEADKDEFCRCELKLQKWYGDLRGKPFAIEAENSILDISGFSKQYNCAFIWQKDGVKKLNLYLIINYFKGGKLRFKKIKPEAFEANRFYTVINKKSGEIVPMEVNFNFDDPNLIILPLAFGKRQGREFIWNDLLSLETGSLKLANGRVIEKTLYNRRTRQDEPALFVALTFERREVLDSSNIKPMNLIGVDRGENIPAVIALTDPEGCPLSRFKDSLGNPTHILRIGESYKEKQRTIQAKKEVEQRRAGGYSRKYASKAKNLADDMVRNTARDLLYYAVTQDAMLIFENLSRGFGRQGKRTFMAERQYTRMEDWLTAKLAYEGLPSQTYLSKTLAQYTSKTCSNCGFTITSADYDRVLEKLKKTATGWMTTINGKELKVEGQITYYNRYKRQNVVKDLSVELDRLSEESVNNDISSWTKGRSGEALSLLKKRFSHRPVQEKFVCLNCGFETHADEQAALNIARSWLFLRSQEYKKYQTNKTTGKNTDKRAFVETWQSFYRKKLKEVWKPAV

SEQ ID NO: 48054 - protein, 979 aa, synthetic construct
  REGION 1..979: note = engineered CasX variant
QEIKRINKIRRRLVKDSNTKKAGKTGPMKTLLVRVMTPDLRERLENLRKKPENIPQPISNTSRANLNKLLTDYTEMKKAILHVYWEEFQKDPVGLMSRVAQPASKKIDQNKLKPEMDEKGNLTTAGFACSQCGQPLFVYKLEQVSEKGKAYTNYFGRCNVAEHEKLIKLAQLKPEKDSDEAVTYSLGKFGQRALDFYSIHVTKESTHPVKPLAQIAGNRYASGPVGKALSDACMGTIASFLSKYQDIIIEHQKVVKGNQKRLESLRELAGKENLEYPSVTLPPQPHTKEGVDAYNEVIARVRMWVNLNLWQKLKLSRDDAKPLLRLKGFPSFPLVERQANEVDWWDMVCNVKKLINEKKEDGKVFWQNLAGYKRQEALRPYLSSEEDRKKGKKFARYQLGDLLLHLEKKHGEDWGKVYDEAWERIDKKVEGLSKHIKLEEERRSEDAQSKAALTDWLRAKASFVIEGLKEADKDEFCRCELKLQKWYGDLRGKPFAIEAENSILDISGFSKQYNCAFIWQKDGVKKLNLYLIINYFKGGKLRFKKIKPEAFEANRFYTVINKKSGEIVPMEVNFNFDDPNLIILPLAFGKRQGREFIWNDLLSLETGSLKLANGRVIEKTLYNRRTRQDEPALFVALTFERREVLDSSNIKPMNLIGVDRGENIPAVIALTDPEGCPLSRFKDSLGNPTHILRIGESYKEKQRTIQAKKEVEQRRAGGYSRKYASKAKNLADDMVRNTARDLLYYAVTQDAMLIFENLSRGFGRQGKRTFMAERQYTRMEDWLTAKLAYEGLPSQTYLSKTLAQYTSKTCSNCGFTITSADYDRVLEKLKKTATGWMTTINGKELKVEGQITYYNRYKRQNVVKDLSVELDRLSEESVNNDISSWTKGRSGEALSLLKKRFSHRPVQEKFVCLNCGFETHADEQAALNIARSWLFLRSQEYKKYQTNKTTGKNTDKRAFVETWQSFYRKKLKEVWKPAV

SEQ ID NO: 48055 - protein, 978 aa, synthetic construct
  REGION 1..978: note = engineered CasX variant
QEIKRINKIRRRLVKDSNTKKAGKTGPMKTLLVRVMTPDLRERLENLRKKPENIPQPISNTSRANLNKLLTDYTEMKKAILHVYWEEFQKDPVGLMSRVAQPASKKIDQNKLKPEMDEKGNLTTAGFACSQCGQPLFVYKLEQVSEKGKAYTNYFGRCNVAEHEKLILLAQLKPEKDSDEAVTYSLGKFGQRALDFYSIHVTKESTHPVKPLAQIAGNRYASPVGKALSDACMGTIASFLSKYQDIIIEHQKVVKGNQKRLESLRELAGKENLEYPSVTLPPQPHTKEGVDAYNEVIARVRMWVNLNLWQKLKLSRDDAKPLLRLKGFPSFPLVERQANEVDWWDMVCNVKKLINEKKEDGKVFWQNLAGYKRQEALRPYLSSEEDRKKGKKFARYQLGDLLLHLEKKHGEDWGKVYDEAWERIDKKVEGLSKHIKLEEERRSEDAQSKAALTDWLRAKASFVIEGLKEADKDEFCRCELKLQKWYGDLRGKPFAIEAENSILDISGFSKQYNCAFIWQKDGVKKLNLYLIINYFKGGKLRFKKIKPEAFEANRFYTVINKKSGEIVPMEVNFNFDDPNLIILPLAFGKRQGREFIWNDLLSLETGSLKLANGRVIEKTLYNRRTRQDEPALFVALTFERREVLDSSNIKPMNLIGVDRGENIPAVIALTDPEGCPLSRFKDSLGNPTHILRIGESYKEKQRTIQAKKEVEQRRAGGYSRKYASKAKNLADDMVRNTARDLLYYAVTQDAMLIFENLSRGFGRQGKRTFMAERQYTRMEDWLTAKLAYEGLPSQTYLSKTLAQYTSKTCSNCGFTITSADYDRVLEKLKKTATGWMTTINGKELKVEGQITYYNRYKRQNVVKDLSVELDRLSEESVNNDISSWTKGRSGEALSLLKKRFSHRPVQEKFVCLNCGFETHADEQAALNIARSWLFLRSQEYKKYQTNKTTGKNTDKRAFVETWQSFYRKKLKEVWKPAV

SEQ ID NO: 48056 - protein, 979 aa, synthetic construct
  REGION 1..979: note = engineered CasX variant
QEIKRINKIRRRLVKDSNTKKAGKTGPMKTLLVRVMTPDLRERLENLRKKPENIPQPISNTSRANLNKLLTDYTEMKKAILHVYWEEFQKDPVGLMSRVAQPASKKIDQNKLKPEMDEKGNLTTAGFACSQCGQPLFVYKLEQVSEKGKAYTNYFGRCNVAEHEKLILLAQLKPEKDSDEAVTYSLGKFGQRALDFYSIHVTKESTHPVKPLAQIAGNRYASYPVGKALSDACMGTIASFLSKYQDIIIEHQKVVKGNQKRLESLRELAGKENLEYPSVTLPPQPHTKEGVDAYNEVIARVRMWVNLNLWQKLKLSRDDAKPLLRLKGFPSFPLVERQANEVDWWDMVCNVKKLINEKKEDGKVFWQNLAGYKRQEALRPYLSSEEDRKKGKKFARYQLGDLLLHLEKKHGEDWGKVYDEAWERIDKKVEGLSKHIKLEEERRSEDAQSKAALTDWLRAKASFVIEGLKEADKDEFCRCELKLQKWYGDLRGKPFAIEAENSILDISGFSKQYNCAFIWQKDGVKKLNLYLIINYFKGGKLRFKKIKPEAFEANRFYTVINKKSGEIVPMEVNFNFDDPNLIILPLAFGKRQGREFIWNDLLSLETGSLKLANGRVIEKTLYNRRTRQDEPALFVALTFERREVLDSSNIKPMNLIGVDRGENIPAVIALTDPEGCPLSRFKDSLGNPTHILRIGESYKEKQRTIQAKKEVEQRRAGGYSRKYASKAKNLADDMVRNTARDLLYYAVTQDAMLIFENLSRGFGRQGKRTFMAERQYTRMEDWLTAKLAYNGLPSKTYLSKTLAQYTSKTCSNCGFTITSADYDRVLEKLKKTATGWMTTINGKELKVEGQITYYNRYKRQNVVKDLSVELDRLSEESVNNDISSWTKGRSGEALSLLKKRFSHRPVQEKFVCLNCGFETHADEQAALNIARSWLFLRSQEYKKYQTNKTTGKNTDKRAFVETWQSFYRKKLKEVWKPAV

SEQ ID NO: 48057 - protein, 979 aa, synthetic construct
  REGION 1..979: note = engineered CasX variant
QEIKRINKIRRRLVKDSNTKKAGKTGPMKTLLVRVMTPDLRERLENLRKKPENIPQPISNTSRANLNKLLTDYTEMKKAILHVYWEEFQKDPVGLMSRVAQPASKKIDQNKLKPEMDEKGNLTTAGFACSQCGQPLFVYKLEQVSEKGKAYTNYFGRCNVAEHEKLILLAQLKPEKDSDEAVTYSLGKFGQRALDFYSIHVTKESTHPVKPLAQIAGNRYASHPVGKALSDACMGTIASFLSKYQDIIIEHQKVVKGNQKRLESLRELAGKENLEYPSVTLPPQPHTKEGVDAYNEVIARVRMWVNLNLWQKLKLSRDDAKPLLRLKGFPSFPLVERQANEVDWWDMVCNVKKLINEKKEDGKVFWQNLAGYKRQEALRPYLSSEEDRKKGKKFARYQLGDLLLHLEKKHGEDWGKVYDEAWERIDKKVEGLSKHIKLEEERRSEDAQSKAALTDWLRAKASFVIEGLKEADKDEFCRCELKLQKWYGDLRGKPFAIEAENSILDISGFSKQYNCAFIWQKDGVKKLNLYLIINYFKGGKLRFKKIKPEAFEANRFYTVINKKSGEIVPMEVNFNFDDPNLIILPLAFGKRQGREFIWNDLLSLETGSLKLANGRVIEKTLYNRRTRQDEPALFVALTFERREVLDSSNIKPMNLIGVDRGENIPAVIALTDPEGCPLSRFKDSLGNPTHILRIGESYKEKQRTIQAKKEVEQRRAGGYSRKYASKAKNLADDMVRNTARDLLYYAVTQDAMLIFENLSRGFGRQGKRTFMAERQYTRMEDWLTAKLAYNGLPSKTYLSKTLAQYTSKTCSNCGFTITSADYDRVLEKLKKTATGWMTTINGKELKVEGQITYYNRYKRQNVVKDLSVELDRLSEESVNNDISSWTKGRSGEALSLLKKRFSHRPVQEKFVCLNCGFETHADEQAALNIARSWLFLRSQEYKKYQTNKTTGKNTDKRAFVETWQSFYRKKLKEVWKPAV

SEQ ID NO: 48058 - protein, 979 aa, synthetic construct
  REGION 1..979: note = engineered CasX variant
QEIKRINKIRRRLVKDSNTKKAGKTGPMKTLLVRVMTPDLRERLENLRKKPENIPQPISNTSRANLNKLLTDYTEMKKAILHVYWEEFQKDPVGLMSRVAQPASKKIDQNKLKPEMDEKGNLTTAGFACSQCGQPLFVYKLEQVSEKGKAYTNYFGRCNVAEHEKLILLAQLKPEKDSDEAVTYSLGKFGQRALDFYSIHVTKESTHPVKPLAQIAGNRYASSPVGKALSDACMGTIASFLSKYQDIIIEHQKVVKGNQKRLESLRELAGKENLEYPSVTLPPQPHTKEGVDAYNEVIARVRMWVNLNLWQKLKLSRDDAKPLLRLKGFPSFPLVERQANEVDWWDMVCNVKKLINEKKEDGKVFWQNLAGYKRQEALRPYLSSEEDRKKGKKFARYQLGDLLLHLEKKHGEDWGKVYDEAWERIDKKVEGLSKHIKLEEERRSEDAQSKAALTDWLRAKASFVIEGLKEADKDEFCRCELKLQKWYGDLRGKPFAIEAENSILDISGFSKQYNCAFIWQKDGVKKLNLYLIINYFKGGKLRFKKIKPEAFEANRFYTVINKKSGEIVPMEVNFNFDDPNLIILPLAFGKRQGREFIWNDLLSLETGSLKLANGRVIEKTLYNRRTRQDEPALFVALTFERREVLDSSNIKPMNLIGVDRGENIPAVIALTDPEGCPLSRFKDSLGNPTHILRIGESYKEKQRTIQAKKEVEQRRAGGYSRKYASKAKNLADDMVRNTARDLLYYAVTQDAMLIFENLSRGFGRQGKRTFMAERQYTRMEDWLTAKLAYNGLPSKTYLSKTLAQYTSKTCSNCGFTITSADYDRVLEKLKKTATGWMTTINGKELKVEGQITYYNRYKRQNVVKDLSVELDRLSEESVNNDISSWTKGRSGEALSLLKKRFSHRPVQEKFVCLNCGFETHADEQAALNIARSWLFLRSQEYKKYQTNKTTGKNTDKRAFVETWQSFYRKKLKEVWKPAV

SEQ ID NO: 48059 - protein, 979 aa, synthetic construct
  REGION 1..979: note = engineered CasX variant
QEIKRINKIRRRLVKDSNTKKAGKTGPMKTLLVRVMTPDLRERLENLRKKPENIPQPISNTSRANLNKLLTDYTEMKKAILHVYWEEFQKDPVGLMSRVAQPASKKIDQNKLKPEMDEKGNLTTAGFACSQCGQPLFVYKLEQVSEKGKAYTNYFGRCNVAEHEKLILLAQLKPEKDSDEAVTYSLGKFGQRALDFYSIHVTKESTHPVKPLAQIAGNRYASTPVGKALSDACMGTIASFLSKYQDIIIEHQKVVKGNQKRLESLRELAGKENLEYPSVTLPPQPHTKEGVDAYNEVIARVRMWVNLNLWQKLKLSRDDAKPLLRLKGFPSFPLVERQANEVDWWDMVCNVKKLINEKKEDGKVFWQNLAGYKRQEALRPYLSSEEDRKKGKKFARYQLGDLLLHLEKKHGEDWGKVYDEAWERIDKKVEGLSKHIKLEEERRSEDAQSKAALTDWLRAKASFVIEGLKEADKDEFCRCELKLQKWYGDLRGKPFAIEAENSILDISGFSKQYNCAFIWQKDGVKKLNLYLIINYFKGGKLRFKKIKPEAFEANRFYTVINKKSGEIVPMEVNFNFDDPNLIILPLAFGKRQGREFIWNDLLSLETGSLKLANGRVIEKTLYNRRTRQDEPALFVALTFERREVLDSSNIKPMNLIGVDRGENIPAVIALTDPEGCPLSRFKDSLGNPTHILRIGESYKEKQRTIQAKKEVEQRRAGGYSRKYASKAKNLADDMVRNTARDLLYYAVTQDAMLIFENLSRGFGRQGKRTFMAERQYTRMEDWLTAKLAYNGLPSKTYLSKTLAQYTSKTCSNCGFTITSADYDRVLEKLKKTATGWMTTINGKELKVEGQITYYNRYKRQNVVKDLSVELDRLSEESVNNDISSWTKGRSGEALSLLKKRFSHRPVQEKFVCLNCGFETHADEQAALNIARSWLFLRSQEYKKYQTNKTTGKNTDKRAFVETWQSFYRKKLKEVWKPAV

SEQ ID NO: 48060 - protein, 979 aa, synthetic construct
  REGION 1..979: note = engineered CasX variant
QEIKRINKIRRRLVKDSNTKKAGKTGPMKTLLVRVMTPDLRERLENLRKKPENIPQPISNTSRANLNKLLTDYTEMKKAILHVYWEEFQKDPVGLMSRVAQPASKKIDQNKLKPEMDEKGNLTTAGFACSQCGQPLFVYKLEQVSEKGKAYTNYFGRCNVAEHEKLILLAQLKPEKDSDEAVTYSLGKFGQRALDFYSIHVTKESTHPVKPLAQIAGNRYASAPVGKALSDACMGTIASFLSKYQDIIIEHQKVVKGNQKRLESLRELAGKENLEYPSVTLPPQPHTKEGVDAYNEVIARVRMWVNLNLWQKLKLSRDDAKPLLRLKGFPSFPLVERQANEVDWWDMVCNVKKLINEKKEDGKVFWQNLAGYKRQEALRPYLSSEEDRKKGKKFARYQLGDLLLHLEKKHGEDWGKVYDEAWERIDKKVEGLSKHIKLEEERRSEDAQSKAALTDWLRAKASFVIEGLKEADKDEFCRCELKLQKWYGDLRGKPFAIEAENSILDISGFSKQYNCAFIWQKDGVKKLNLYLIINYFKGGKLRFKKIKPEAFEANRFYTVINKKSGEIVPMEVNFNFDDPNLIILPLAFGKRQGREFIWNDLLSLETGSLKLANGRVIEKTLYNRRTRQDEPALFVALTFERREVLDSSNIKPMNLIGVDRGENIPAVIALTDPEGCPLSRFKDSLGNPTHILRIGESYKEKQRTIQAKKEVEQRRAGGYSRKYASKAKNLADDMVRNTARDLLYYAVTQDAMLIFENLSRGFGRQGKRTFMAERQYTRMEDWLTAKLAYNGLPSKTYLSKTLAQYTSKTCSNCGFTITSADYDRVLEKLKKTATGWMTTINGKELKVEGQITYYNRYKRQNVVKDLSVELDRLSEESVNNDISSWTKGRSGEALSLLKKRFSHRPVQEKFVCLNCGFETHADEQAALNIARSWLFLRSQEYKKYQTNKTTGKNTDKRAFVETWQSFYRKKLKEVWKPAV

SEQ ID NO: 48061 - protein, 979 aa, synthetic construct
  REGION 1..979: note = engineered CasX variant
QEIKRINKIRRRLVKDSNTKKAGKTGPMKTLLVRVMTPDLRERLENLRKKPENIPQPISNTSRANLNKLLTDYTEMKKAILHVYWEEFQKDPVGLMSRVAQPASKKIDQNKLKPEMDEKGNLTTAGFACSQCGQPLFVYKLEQVSEKGKAYTNYFGRCNVAEHEKLILLAQLKPEKDSDEAVTYSLGKFGQRALDFYSIHVTKESTHPVKPLAQIAGNRYASVPVGKALSDACMGTIASFLSKYQDIIIEHQKVVKGNQKRLESLRELAGKENLEYPSVTLPPQPHTKEGVDAYNEVIARVRMWVNLNLWQKLKLSRDDAKPLLRLKGFPSFPLVERQANEVDWWDMVCNVKKLINEKKEDGKVFWQNLAGYKRQEALRPYLSSEEDRKKGKKFARYQLGDLLLHLEKKHGEDWGKVYDEAWERIDKKVEGLSKHIKLEEERRSEDAQSKAALTDWLRAKASFVIEGLKEADKDEFCRCELKLQKWYGDLRGKPFAIEAENSILDISGFSKQYNCAFIWQKDGVKKLNLYLIINYFKGGKLRFKKIKPEAFEANRFYTVINKKSGEIVPMEVNFNFDDPNLIILPLAFGKRQGREFIWNDLLSLETGSLKLANGRVIEKTLYNRRTRQDEPALFVALTFERREVLDSSNIKPMNLIGVDRGENIPAVIALTDPEGCPLSRFKDSLGNPTHILRIGESYKEKQRTIQAKKEVEQRRAGGYSRKYASKAKNLADDMVRNTARDLLYYAVTQDAMLIFENLSRGFGRQGKRTFMAERQYTRMEDWLTAKLAYNGLPSKTYLSKTLAQYTSKTCSNCGFTITSADYDRVLEKLKKTATGWMTTINGKELKVEGQITYYNRYKRQNVVKDLSVELDRLSEESVNNDISSWTKGRSGEALSLLKKRFSHRPVQEKFVCLNCGFETHADEQAALNIARSWLFLRSQEYKKYQTNKTTGKNTDKRAFVETWQSFYRKKLKEVWKPAV

SEQ ID NO: 48062 - protein, 979 aa, synthetic construct
  REGION 1..979: note = engineered CasX variant
QEIKRINKIRRRLVKDSNTKKAGKTGPMKTLLVRVMTPDLRERLENLRKKPENIPQPISNTSRANLNKLLTDYTEMKKAILHVYWEEFQKDPVGLMSRVAQPASKKIDQNKLKPEMDEKGNLTTAGFACSQCGQPLFVYKLEQVSEKGKAYTNYFGRCNVAEHEKLIKLAQLKPEKDSDEAVTYSLGKFGQRALDFYSIHVTKESTHPVKPLAQIAGNRYASGPVGKALSDACMGTIASFLSKYQDIIIEHQKVVKGNQKRLESLRELAGKENLEYPSVTLPPQPHTKEGVDAYNEVIARVRMWVNLNLWQKLKLSRDDAKPLLRLKGFPSFPLVERQANEVDWWDMVCNVKKLINEKKEDGKVFWQNLAGYKRQEALRPYLSSEEDRKKGKKFARYQLGDLLLHLEKKHGEDWGKVYDEAWERIDKKVEGLSKHIKLEEERRSEDAQSKAALTDWLRAKASFVIEGLKEADKDEFCRCELKLQKWYGDLRGKPFAIEAENSILDISGFSKQYNCAFIWQKDGVKKLNLYLIINYFKGGKLRFKKIKPEAFEANRFYTVINKKSGEIVPMEVNFNFDDPNLIILPLAFGKRQGREFIWNDLLSLETGSLKLANGRVIEKTLYNRRTRQDEPALFVALTFERREVLDSSNIKPMNLIGVDRGENIPAVIALTDPEGCPLSRFKDSLGNPTHILRIGESYKEKQRTIQAKKEVEQRRAGGYSRKYASKAKNLADDMVRNTARDLLYYAVTQDAMLIFENLSRGFGRQGKRTFMAERQYTRMEDWLTAKLAYNGLPSKTYLSKTLAQYTSKTCSNCGFTITSADYDRVLEKLKKTATGWMTTINGKELKVEGQITYYNRYKRQNVVKDLSVELDRLSEESVNNDISSWTKGRSGEALSLLKKRFSHRPVQEKFVCLNCGFETHADEQAALNIARSWLFLRSQEYKKYQTNKTTGKNTDKRAFVETWQSFYRKKLKEVWKPAV

SEQ ID NO: 48063 - protein, 978 aa, synthetic construct
  REGION 1..978: note = engineered CasX variant
QEIKRINKIRRRLVKDSNTKKAGKTGPMKTLLVRVMTPDLRERLENLRKKPENIPQPISNTSRANLNKLLTDYTEMKKAILHVYWEEFQKDPVGLMSRVAQPASKKIDQNKLKPEMDEKGNLTTAGFACSQCGQPLFVYKLEQVSEKGKAYTNYFGRCNVAEHEKLILLAQLKPEKDSDEAVTYSLGKFGQRALDFYSIHVTKESTHPVKPLAQIAGNRYASPVGKALSDACMGTIASFLSKYQDIIIEHQKVVKGNQKRLESLRELAGKENLEYPSVTLPPQPHTKEGVDAYNEVIARVRMWVNLNLWQKLKLSRDDAKPLLRLKGFPSFPLVERQANEVDWWDMVCNVKKLINEKKEDGKVFWQNLAGYKRQEALRPYLSSEEDRKKGKKFARYQLGDLLLHLEKKHGEDWGKVYDEAWERIDKKVEGLSKHIKLEEERRSEDAQSKAALTDWLRAKASFVIEGLKEADKDEFCRCELKLQKWYGDLRGKPFAIEAENSILDISGFSKQYNCAFIWQKDGVKKLNLYLIINYFKGGKLRFKKIKPEAFEANRFYTVINKKSGEIVPMEVNFNFDDPNLIILPLAFGKRQGREFIWNDLLSLETGSLKLANGRVIEKTLYNRRTRQDEPALFVALTFERREVLDSSNIKPMNLIGVDRGENIPAVIALTDPEGCPLSRFKDSLGNPTHILRIGESYKEKQRTIQAKKEVEQRRAGGYSRKYASKAKNLADDMVRNTARDLLYYAVTQDAMLIFENLSRGFGRQGKRTFMAERQYTRMEDWLTAKLAYNGLPSKTYLSKTLAQYTSKTCSNCGFTITSADYDRVLEKLKKTATGWMTTINGKELKVEGQITYYNRYKRQNVVKDLSVELDRLSEESVNNDISSWTKGRSGEALSLLKKRFSHRPVQEKFVCLNCGFETHADEQAALNIARSWLFLRSQEYKKYQTNKTTGKNTDKRAFVETWQSFYRKKLKEVWKPAV

SEQ ID NO: 48064 - protein, 979 aa, synthetic construct
  REGION 1..979: note = engineered CasX variant
QEIKRINKIRRRLVKDSNTKKAGKTGPMKTLLVRVMTPDLRERLENLRKKPENIPQPISNTSRANLNKLLTDYTEMKKAILHVYWEEFQKDPVGLMSRVAQPASKKIDQNKLKPEMDEKGNLTTAGFACSQCGQPLFVYKLEQVSEKGKAYTNYFGRCNVAEHEKLIQLAQLKPEKDSDEAVTYSLGKFGQRALDFYSIHVTKESTHPVKPLAQIAGNRYASYPVGKALSDACMGTIASFLSKYQDIIIEHQKVVKGNQKRLESLRELAGKENLEYPSVTLPPQPHTKEGVDAYNEVIARVRMWVNLNLWQKLKLSRDDAKPLLRLKGFPSFPLVERQANEVDWWDMVCNVKKLINEKKEDGKVFWQNLAGYKRQEALRPYLSSEEDRKKGKKFARYQLGDLLLHLEKKHGEDWGKVYDEAWERIDKKVEGLSKHIKLEEERRSEDAQSKAALTDWLRAKASFVIEGLKEADKDEFCRCELKLQKWYGDLRGKPFAIEAENSILDISGFSKQYNCAFIWQKDGVKKLNLYLIINYFKGGKLRFKKIKPEAFEANRFYTVINKKSGEIVPMEVNFNFDDPNLIILPLAFGKRQGREFIWNDLLSLETGSLKLANGRVIEKTLYNRRTRQDEPALFVALTFERREVLDSSNIKPMNLIGVDRGENIPAVIALTDPEGCPLSRFKDSLGNPTHILRIGESYKEKQRTIQAKKEVEQRRAGGYSRKYASKAKNLADDMVRNTARDLLYYAVTQDAMLIFENLSRGFGRQGKRTFMAERQYTRMEDWLTAKLAYEGLPSKTYLSKTLAQYTSKTCSNCGFTITSADYDRVLEKLKKTATGWMTTINGKELKVEGQITYYNRYKRQNVVKDLSVELDRLSEESVNNDISSWTKGRSGEALSLLKKRFSHRPVQEKFVCLNCGFETHADEQAALNIARSWLFLRSQEYKKYQTNKTTGKNTDKRAFVETWQSFYRKKLKEVWKPAV

SEQ ID NO: 48065 - protein, 979 aa, synthetic construct
  REGION 1..979: note = engineered CasX variant
QEIKRINKIRRRLVKDSNTKKAGKTGPMKTLLVRVMTPDLRERLENLRKKPENIPQPISNTSRANLNKLLTDYTEMKKAILHVYWEEFQKDPVGLMSRVAQPASKKIDQNKLKPEMDEKGNLTTAGFACSQCGQPLFVYKLEQVSEKGKAYTNYFGRCNVAEHEKLIQLAQLKPEKDSDEAVTYSLGKFGQRALDFYSIHVTKESTHPVKPLAQIAGNRYASHPVGKALSDACMGTIASFLSKYQDIIIEHQKVVKGNQKRLESLRELAGKENLEYPSVTLPPQPHTKEGVDAYNEVIARVRMWVNLNLWQKLKLSRDDAKPLLRLKGFPSFPLVERQANEVDWWDMVCNVKKLINEKKEDGKVFWQNLAGYKRQEALRPYLSSEEDRKKGKKFARYQLGDLLLHLEKKHGEDWGKVYDEAWERIDKKVEGLSKHIKLEEERRSEDAQSKAALTDWLRAKASFVIEGLKEADKDEFCRCELKLQKWYGDLRGKPFAIEAENSILDISGFSKQYNCAFIWQKDGVKKLNLYLIINYFKGGKLRFKKIKPEAFEANRFYTVINKKSGEIVPMEVNFNFDDPNLIILPLAFGKRQGREFIWNDLLSLETGSLKLANGRVIEKTLYNRRTRQDEPALFVALTFERREVLDSSNIKPMNLIGVDRGENIPAVIALTDPEGCPLSRFKDSLGNPTHILRIGESYKEKQRTIQAKKEVEQRRAGGYSRKYASKAKNLADDMVRNTARDLLYYAVTQDAMLIFENLSRGFGRQGKRTFMAERQYTRMEDWLTAKLAYEGLPSKTYLSKTLAQYTSKTCSNCGFTITSADYDRVLEKLKKTATGWMTTINGKELKVEGQITYYNRYKRQNVVKDLSVELDRLSEESVNNDISSWTKGRSGEALSLLKKRFSHRPVQEKFVCLNCGFETHADEQAALNIARSWLFLRSQEYKKYQTNKTTGKNTDKRAFVETWQSFYRKKLKEVWKPAV

SEQ ID NO: 48066 - protein, 979 aa, synthetic construct
  REGION 1..979: note = engineered CasX variant
QEIKRINKIRRRLVKDSNTKKAGKTGPMKTLLVRVMTPDLRERLENLRKKPENIPQPISNTSRANLNKLLTDYTEMKKAILHVYWEEFQKDPVGLMSRVAQPASKKIDQNKLKPEMDEKGNLTTAGFACSQCGQPLFVYKLEQVSEKGKAYTNYFGRCNVAEHEKLIQLAQLKPEKDSDEAVTYSLGKFGQRALDFYSIHVTKESTHPVKPLAQIAGNRYASSPVGKALSDACMGTIASFLSKYQDIIIEHQKVVKGNQKRLESLRELAGKENLEYPSVTLPPQPHTKEGVDAYNEVIARVRMWVNLNLWQKLKLSRDDAKPLLRLKGFPSFPLVERQANEVDWWDMVCNVKKLINEKKEDGKVFWQNLAGYKRQEALRPYLSSEEDRKKGKKFARYQLGDLLLHLEKKHGEDWGKVYDEAWERIDKKVEGLSKHIKLEEERRSEDAQSKAALTDWLRAKASFVIEGLKEADKDEFCRCELKLQKWYGDLRGKPFAIEAENSILDISGFSKQYNCAFIWQKDGVKKLNLYLIINYFKGGKLRFKKIKPEAFEANRFYTVINKKSGEIVPMEVNFNFDDPNLIILPLAFGKRQGREFIWNDLLSLETGSLKLANGRVIEKTLYNRRTRQDEPALFVALTFERREVLDSSNIKPMNLIGVDRGENIPAVIALTDPEGCPLSRFKDSLGNPTHILRIGESYKEKQRTIQAKKEVEQRRAGGYSRKYASKAKNLADDMVRNTARDLLYYAVTQDAMLIFENLSRGFGRQGKRTFMAERQYTRMEDWLTAKLAYEGLPSKTYLSKTLAQYTSKTCSNCGFTITSADYDRVLEKLKKTATGWMTTINGKELKVEGQITYYNRYKRQNVVKDLSVELDRLSEESVNNDISSWTKGRSGEALSLLKKRFSHRPVQEKFVCLNCGFETHADEQAALNIARSWLFLRSQEYKKYQTNKTTGKNTDKRAFVETWQSFYRKKLKEVWKPAV

SEQ ID NO: 48067 - protein, 979 aa, synthetic construct
  REGION 1..979: note = engineered CasX variant
QEIKRINKIRRRLVKDSNTKKAGKTGPMKTLLVRVMTPDLRERLENLRKKPENIPQPISNTSRANLNKLLTDYTEMKKAILHVYWEEFQKDPVGLMSRVAQPASKKIDQNKLKPEMDEKGNLTTAGFACSQCGQPLFVYKLEQVSEKGKAYTNYFGRCNVAEHEKLIQLAQLKPEKDSDEAVTYSLGKFGQRALDFYSIHVTKESTHPVKPLAQIAGNRYASTPVGKALSDACMGTIASFLSKYQDIIIEHQKVVKGNQKRLESLRELAGKENLEYPSVTLPPQPHTKEGVDAYNEVIARVRMWVNLNLWQKLKLSRDDAKPLLRLKGFPSFPLVERQANEVDWWDMVCNVKKLINEKKEDGKVFWQNLAGYKRQEALRPYLSSEEDRKKGKKFARYQLGDLLLHLEKKHGEDWGKVYDEAWERIDKKVEGLSKHIKLEEERRSEDAQSKAALTDWLRAKASFVIEGLKEADKDEFCRCELKLQKWYGDLRGKPFAIEAENSILDISGFSKQYNCAFIWQKDGVKKLNLYLIINYFKGGKLRFKKIKPEAFEANRFYTVINKKSGEIVPMEVNFNFDDPNLIILPLAFGKRQGREFIWNDLLSLETGSLKLANGRVIEKTLYNRRTRQDEPALFVALTFERREVLDSSNIKPMNLIGVDRGENIPAVIALTDPEGCPLSRFKDSLGNPTHILRIGESYKEKQRTIQAKKEVEQRRAGGYSRKYASKAKNLADDMVRNTARDLLYYAVTQDAMLIFENLSRGFGRQGKRTFMAERQYTRMEDWLTAKLAYEGLPSKTYLSKTLAQYTSKTCSNCGFTITSADYDRVLEKLKKTATGWMTTINGKELKVEGQITYYNRYKRQNVVKDLSVELDRLSEESVNNDISSWTKGRSGEALSLLKKRFSHRPVQEKFVCLNCGFETHADEQAALNIARSWLFLRSQEYKKYQTNKTTGKNTDKRAFVETWQSFYRKKLKEVWKPAV

SEQ ID NO: 48068 - protein, 979 aa, synthetic construct
  REGION 1..979: note = engineered CasX variant
QEIKRINKIRRRLVKDSNTKKAGKTGPMKTLLVRVMTPDLRERLENLRKKPENIPQPISNTSRANLNKLLTDYTEMKKAILHVYWEEFQKDPVGLMSRVAQPASKKIDQNKLKPEMDEKGNLTTAGFACSQCGQPLFVYKLEQVSEKGKAYTNYFGRCNVAEHEKLIQLAQLKPEKDSDEAVTYSLGKFGQRALDFYSIHVTKESTHPVKPLAQIAGNRYASAPVGKALSDACMGTIASFLSKYQDIIIEHQKVVKGNQKRLESLRELAGKENLEYPSVTLPPQPHTKEGVDAYNEVIARVRMWVNLNLWQKLKLSRDDAKPLLRLKGFPSFPLVERQANEVDWWDMVCNVKKLINEKKEDGKVFWQNLAGYKRQEALRPYLSSEEDRKKGKKFARYQLGDLLLHLEKKHGEDWGKVYDEAWERIDKKVEGLSKHIKLEEERRSEDAQSKAALTDWLRAKASFVIEGLKEADKDEFCRCELKLQKWYGDLRGKPFAIEAENSILDISGFSKQYNCAFIWQKDGVKKLNLYLIINYFKGGKLRFKKIKPEAFEANRFYTVINKKSGEIVPMEVNFNFDDPNLIILPLAFGKRQGREFIWNDLLSLETGSLKLANGRVIEKTLYNRRTRQDEPALFVALTFERREVLDSSNIKPMNLIGVDRGENIPAVIALTDPEGCPLSRFKDSLGNPTHILRIGESYKEKQRTIQAKKEVEQRRAGGYSRKYASKAKNLADDMVRNTARDLLYYAVTQDAMLIFENLSRGFGRQGKRTFMAERQYTRMEDWLTAKLAYEGLPSKTYLSKTLAQYTSKTCSNCGFTITSADYDRVLEKLKKTATGWMTTINGKELKVEGQITYYNRYKRQNVVKDLSVELDRLSEESVNNDISSWTKGRSGEALSLLKKRFSHRPVQEKFVCLNCGFETHADEQAALNIARSWLFLRSQEYKKYQTNKTTGKNTDKRAFVETWQSFYRKKLKEVWKPAV

SEQ ID NO: 48069 - protein, 979 aa, synthetic construct
  REGION 1..979: note = engineered CasX variant
QEIKRINKIRRRLVKDSNTKKAGKTGPMKTLLVRVMTPDLRERLENLRKKPENIPQPISNTSRANLNKLLTDYTEMKKAILHVYWEEFQKDPVGLMSRVAQPASKKIDQNKLKPEMDEKGNLTTAGFACSQCGQPLFVYKLEQVSEKGKAYTNYFGRCNVAEHEKLIQLAQLKPEKDSDEAVTYSLGKFGQRALDFYSIHVTKESTHPVKPLAQIAGNRYASVPVGKALSDACMGTIASFLSKYQDIIIEHQKVVKGNQKRLESLRELAGKENLEYPSVTLPPQPHTKEGVDAYNEVIARVRMWVNLNLWQKLKLSRDDAKPLLRLKGFPSFPLVERQANEVDWWDMVCNVKKLINEKKEDGKVFWQNLAGYKRQEALRPYLSSEEDRKKGKKFARYQLGDLLLHLEKKHGEDWGKVYDEAWERIDKKVEGLSKHIKLEEERRSEDAQSKAALTDWLRAKASFVIEGLKEADKDEFCRCELKLQKWYGDLRGKPFAIEAENSILDISGFSKQYNCAFIWQKDGVKKLNLYLIINYFKGGKLRFKKIKPEAFEANRFYTVINKKSGEIVPMEVNFNFDDPNLIILPLAFGKRQGREFIWNDLLSLETGSLKLANGRVIEKTLYNRRTRQDEPALFVALTFERREVLDSSNIKPMNLIGVDRGENIPAVIALTDPEGCPLSRFKDSLGNPTHILRIGESYKEKQRTIQAKKEVEQRRAGGYSRKYASKAKNLADDMVRNTARDLLYYAVTQDAMLIFENLSRGFGRQGKRTFMAERQYTRMEDWLTAKLAYEGLPSKTYLSKTLAQYTSKTCSNCGFTITSADYDRVLEKLKKTATGWMTTINGKELKVEGQITYYNRYKRQNVVKDLSVELDRLSEESVNNDISSWTKGRSGEALSLLKKRFSHRPVQEKFVCLNCGFETHADEQAALNIARSWLFLRSQEYKKYQTNKTTGKNTDKRAFVETWQSFYRKKLKEVWKPAV

SEQ ID NO: 48070 - protein, 980 aa, synthetic construct
  REGION 1..980: note = engineered CasX variant
QEIKRINKIRRRLVKDSNTKKAGKTGPMKTLLVRVMTPDLRERLENLRKKPENIPQPISNTSRANLNKLLTDYTEMKKAILHVYWEEFQKDPVGLMSRVAQPASKKIDQNKLKPEMDEKGNLTTAGFACSQCGQPLFVYKLEQVSEKGKAYTNYFGRCNVAEHEKLIQKLAQLKPEKDSDEAVTYSLGKFGQRALDFYSIHVTKESTHPVKPLAQIAGNRYASGPVGKALSDACMGTIASFLSKYQDIIIEHQKVVKGNQKRLESLRELAGKENLEYPSVTLPPQPHTKEGVDAYNEVIARVRMWVNLNLWQKLKLSRDDAKPLLRLKGFPSFPLVERQANEVDWWDMVCNVKKLINEKKEDGKVFWQNLAGYKRQEALRPYLSSEEDRKKGKKFARYQLGDLLLHLEKKHGEDWGKVYDEAWERIDKKVEGLSKHIKLEEERRSEDAQSKAALTDWLRAKASFVIEGLKEADKDEFCRCELKLQKWYGDLRGKPFAIEAENSILDISGFSKQYNCAFIWQKDGVKKLNLYLIINYFKGGKLRFKKIKPEAFEANRFYTVINKKSGEIVPMEVNFNFDDPNLIILPLAFGKRQGREFIWNDLLSLETGSLKLANGRVIEKTLYNRRTRQDEPALFVALTFERREVLDSSNIKPMNLIGVDRGENIPAVIALTDPEGCPLSRFKDSLGNPTHILRIGESYKEKQRTIQAKKEVEQRRAGGYSRKYASKAKNLADDMVRNTARDLLYYAVTQDAMLIFENLSRGFGRQGKRTFMAERQYTRMEDWLTAKLAYEGLPSKTYLSKTLAQYTSKTCSNCGFTITSADYDRVLEKLKKTATGWMTTINGKELKVEGQITYYNRYKRQNVVKDLSVELDRLSEESVNNDISSWTKGRSGEALSLLKKRFSHRPVQEKFVCLNCGFETHADEQAALNIARSWLFLRSQEYKKYQTNKTTGKNTDKRAFVETWQSFYRKKLKEVWKPAV

SEQ ID NO: 48071 - protein, 978 aa, synthetic construct
  REGION 1..978: note = engineered CasX variant
QEIKRINKIRRRLVKDSNTKKAGKTGPMKTLLVRVMTPDLRERLENLRKKPENIPQPISNTSRANLNKLLTDYTEMKKAILHVYWEEFQKDPVGLMSRVAQPASKKIDQNKLKPEMDEKGNLTTAGFACSQCGQPLFVYKLEQVSEKGKAYTNYFGRCNVAEHEKLIQLAQLKPEKDSDEAVTYSLGKFGQRALDFYSIHVTKESTHPVKPLAQIAGNRYASPVGKALSDACMGTIASFLSKYQDIIIEHQKVVKGNQKRLESLRELAGKENLEYPSVTLPPQPHTKEGVDAYNEVIARVRMWVNLNLWQKLKLSRDDAKPLLRLKGFPSFPLVERQANEVDWWDMVCNVKKLINEKKEDGKVFWQNLAGYKRQEALRPYLSSEEDRKKGKKFARYQLGDLLLHLEKKHGEDWGKVYDEAWERIDKKVEGLSKHIKLEEERRSEDAQSKAALTDWLRAKASFVIEGLKEADKDEFCRCELKLQKWYGDLRGKPFAIEAENSILDISGFSKQYNCAFIWQKDGVKKLNLYLIINYFKGGKLRFKKIKPEAFEANRFYTVINKKSGEIVPMEVNFNFDDPNLIILPLAFGKRQGREFIWNDLLSLETGSLKLANGRVIEKTLYNRRTRQDEPALFVALTFERREVLDSSNIKPMNLIGVDRGENIPAVIALTDPEGCPLSRFKDSLGNPTHILRIGESYKEKQRTIQAKKEVEQRRAGGYSRKYASKAKNLADDMVRNTARDLLYYAVTQDAMLIFENLSRGFGRQGKRTFMAERQYTRMEDWLTAKLAYEGLPSKTYLSKTLAQYTSKTCSNCGFTITSADYDRVLEKLKKTATGWMTTINGKELKVEGQITYYNRYKRQNVVKDLSVELDRLSEESVNNDISSWTKGRSGEALSLLKKRFSHRPVQEKFVCLNCGFETHADEQAALNIARSWLFLRSQEYKKYQTNKTTGKNTDKRAFVETWQSFYRKKLKEVWKPAV

SEQ ID NO: 48072 - protein, 979 aa, synthetic construct
  REGION 1..979: note = engineered CasX variant
QEIKRINKIRRRLVKDSNTKKAGKTGPMKTLLVRVMTPDLRERLENLRKKPENIPQPISNTSRANLNKLLTDYTEMKKAILHVYWEEFQKDPVGLMSRVAQPASKKIDQNKLKPEMDEKGNLTTAGFACSQCGQPLFVYKLEQVSEKGKAYTNYFGRCNVAEHEKLILLAQLKPEKDSDEAVTYSLGKFGQRALDFYSIHVTKESTHPVKPLAQIAGNRYASYPVGKALSDACMGTIASFLSKYQDIIIEHQKVVKGNQKRLESLRELAGKENLEYPSVTLPPQPHTKEGVDAYNEVIARVRMWVNLNLWQKLKLSRDDAKPLLRLKGFPSFPLVERQANEVDWWDMVCNVKKLINEKKEDGKVFWQNLAIYKRQEALRPYLSSEEDRKKGKKFARYQLGDLLLHLEKKHGEDWGKVYDEAWERIDKKVEGLSKHIKLEEERRSEDAQSKAALTDWLRAKASFVIEGLKEADKDEFCRCELKLQKWYGDLRGKPFAIEAENSILDISGFSKQYNCAFIWQKDGVKKLNLYLIINYFKGGKLRFKKIKPEAFEANRFYTVINKKSGEIVPMEVNFNFDDPNLIILPLAFGKRQGREFIWNDLLSLETGSLKLANGRVIEKTLYNRRTRQDEPALFVALTFERREVLDSSNIKPMNLIGVDRGENIPAVIALTDPEGCPLSRFKDSLGNPTHILRIGESYKEKQRTIQAKKEVEQRRAGGYSRKYASKAKNLADDMVRNTARDLLYYAVTQDAMLIFENLSRGFGRQGKRTFMAERQYTRMEDWLTAKLAYEGLPSKTYLSKTLAQYTSKTCSNCGFTITSADYDRVLEKLKKTATGWMTTINGKELKVEGQITYYNRYKRQNVVKDLSVELDRLSEESVNNDISSWTKGRSGEALSLLKKRFSHRPVQEKFVCLNCGFETHADEQAALNIARSWLFLRSQEYKKYQTNKTTGKNTDKRAFVETWQSFYRKKLKEVWKPAV

SEQ ID NO: 48073 - protein, 979 aa, synthetic construct
  REGION 1..979: note = engineered CasX variant
QEIKRINKIRRRLVKDSNTKKAGKTGPMKTLLVRVMTPDLRERLENLRKKPENIPQPISNTSRANLNKLLTDYTEMKKAILHVYWEEFQKDPVGLMSRVAQPASKKIDQNKLKPEMDEKGNLTTAGFACSQCGQPLFVYKLEQVSEKGKAYTNYFGRCNVAEHEKLILLAQLKPEKDSDEAVTYSLGKFGQRALDFYSIHVTKESTHPVKPLAQIAGNRYASHPVGKALSDACMGTIASFLSKYQDIIIEHQKVVKGNQKRLESLRELAGKENLEYPSVTLPPQPHTKEGVDAYNEVIARVRMWVNLNLWQKLKLSRDDAKPLLRLKGFPSFPLVERQANEVDWWDMVCNVKKLINEKKEDGKVFWQNLAIYKRQEALRPYLSSEEDRKKGKKFARYQLGDLLLHLEKKHGEDWGKVYDEAWERIDKKVEGLSKHIKLEEERRSEDAQSKAALTDWLRAKASFVIEGLKEADKDEFCRCELKLQKWYGDLRGKPFAIEAENSILDISGFSKQYNCAFIWQKDGVKKLNLYLIINYFKGGKLRFKKIKPEAFEANRFYTVINKKSGEIVPMEVNFNFDDPNLIILPLAFGKRQGREFIWNDLLSLETGSLKLANGRVIEKTLYNRRTRQDEPALFVALTFERREVLDSSNIKPMNLIGVDRGENIPAVIALTDPEGCPLSRFKDSLGNPTHILRIGESYKEKQRTIQAKKEVEQRRAGGYSRKYASKAKNLADDMVRNTARDLLYYAVTQDAMLIFENLSRGFGRQGKRTFMAERQYTRMEDWLTAKLAYEGLPSKTYLSKTLAQYTSKTCSNCGFTITSADYDRVLEKLKKTATGWMTTINGKELKVEGQITYYNRYKRQNVVKDLSVELDRLSEESVNNDISSWTKGRSGEALSLLKKRFSHRPVQEKFVCLNCGFETHADEQAALNIARSWLFLRSQEYKKYQTNKTTGKNTDKRAFVETWQSFYRKKLKEVWKPAV

SEQ ID NO: 48074 - protein, 979 aa, synthetic construct
  REGION 1..979: note = engineered CasX variant
QEIKRINKIRRRLVKDSNTKKAGKTGPMKTLLVRVMTPDLRERLENLRKKPENIPQPISNTSRANLNKLLTDYTEMKKAILHVYWEEFQKDPVGLMSRVAQPASKKIDQNKLKPEMDEKGNLTTAGFACSQCGQPLFVYKLEQVSEKGKAYTNYFGRCNVAEHEKLILLAQLKPEKDSDEAVTYSLGKFGQRALDFYSIHVTKESTHPVKPLAQIAGNRYASSPVGKALSDACMGTIASFLSKYQDIIIEHQKVVKGNQKRLESLRELAGKENLEYPSVTLPPQPHTKEGVDAYNEVIARVRMWVNLNLWQKLKLSRDDAKPLLRLKGFPSFPLVERQANEVDWWDMVCNVKKLINEKKEDGKVFWQNLAIYKRQEALRPYLSSEEDRKKGKKFARYQLGDLLLHLEKKHGEDWGKVYDEAWERIDKKVEGLSKHIKLEEERRSEDAQSKAALTDWLRAKASFVIEGLKEADKDEFCRCELKLQKWYGDLRGKPFAIEAENSILDISGFSKQYNCAFIWQKDGVKKLNLYLIINYFKGGKLRFKKIKPEAFEANRFYTVINKKSGEIVPMEVNFNFDDPNLIILPLAFGKRQGREFIWNDLLSLETGSLKLANGRVIEKTLYNRRTRQDEPALFVALTFERREVLDSSNIKPMNLIGVDRGENIPAVIALTDPEGCPLSRFKDSLGNPTHILRIGESYKEKQRTIQAKKEVEQRRAGGYSRKYASKAKNLADDMVRNTARDLLYYAVTQDAMLIFENLSRGFGRQGKRTFMAERQYTRMEDWLTAKLAYEGLPSKTYLSKTLAQYTSKTCSNCGFTITSADYDRVLEKLKKTATGWMTTINGKELKVEGQITYYNRYKRQNVVKDLSVELDRLSEESVNNDISSWTKGRSGEALSLLKKRFSHRPVQEKFVCLNCGFETHADEQAALNIARSWLFLRSQEYKKYQTNKTTGKNTDKRAFVETWQSFYRKKLKEVWKPAV

SEQ ID NO: 48075 - protein, 979 aa, synthetic construct
  REGION 1..979: note = engineered CasX variant
QEIKRINKIRRRLVKDSNTKKAGKTGPMKTLLVRVMTPDLRERLENLRKKPENIPQPISNTSRANLNKLLTDYTEMKKAILHVYWEEFQKDPVGLMSRVAQPASKKIDQNKLKPEMDEKGNLTTAGFACSQCGQPLFVYKLEQVSEKGKAYTNYFGRCNVAEHEKLILLAQLKPEKDSDEAVTYSLGKFGQRALDFYSIHVTKESTHPVKPLAQIAGNRYASTPVGKALSDACMGTIASFLSKYQDIIIEHQKVVKGNQKRLESLRELAGKENLEYPSVTLPPQPHTKEGVDAYNEVIARVRMWVNLNLWQKLKLSRDDAKPLLRLKGFPSFPLVERQANEVDWWDMVCNVKKLINEKKEDGKVFWQNLAIYKRQEALRPYLSSEEDRKKGKKFARYQLGDLLLHLEKKHGEDWGKVYDEAWERIDKKVEGLSKHIKLEEERRSEDAQSKAALTDWLRAKASFVIEGLKEADKDEFCRCELKLQKWYGDLRGKPFAIEAENSILDISGFSKQYNCAFIWQKDGVKKLNLYLIINYFKGGKLRFKKIKPEAFEANRFYTVINKKSGEIVPMEVNFNFDDPNLIILPLAFGKRQGREFIWNDLLSLETGSLKLANGRVIEKTLYNRRTRQDEPALFVALTFERREVLDSSNIKPMNLIGVDRGENIPAVIALTDPEGCPLSRFKDSLGNPTHILRIGESYKEKQRTIQAKKEVEQRRAGGYSRKYASKAKNLADDMVRNTARDLLYYAVTQDAMLIFENLSRGFGRQGKRTFMAERQYTRMEDWLTAKLAYEGLPSKTYLSKTLAQYTSKTCSNCGFTITSADYDRVLEKLKKTATGWMTTINGKELKVEGQITYYNRYKRQNVVKDLSVELDRLSEESVNNDISSWTKGRSGEALSLLKKRFSHRPVQEKFVCLNCGFETHADEQAALNIARSWLFLRSQEYKKYQTNKTTGKNTDKRAFVETWQSFYRKKLKEVWKPAV

SEQ ID NO: 48076 - protein, 979 aa, synthetic construct
  REGION 1..979: note = engineered CasX variant
QEIKRINKIRRRLVKDSNTKKAGKTGPMKTLLVRVMTPDLRERLENLRKKPENIPQPISNTSRANLNKLLTDYTEMKKAILHVYWEEFQKDPVGLMSRVAQPASKKIDQNKLKPEMDEKGNLTTAGFACSQCGQPLFVYKLEQVSEKGKAYTNYFGRCNVAEHEKLILLAQLKPEKDSDEAVTYSLGKFGQRALDFYSIHVTKESTHPVKPLAQIAGNRYASAPVGKALSDACMGTIASFLSKYQDIIIEHQKVVKGNQKRLESLRELAGKENLEYPSVTLPPQPHTKEGVDAYNEVIARVRMWVNLNLWQKLKLSRDDAKPLLRLKGFPSFPLVERQANEVDWWDMVCNVKKLINEKKEDGKVFWQNLAIYKRQEALRPYLSSEEDRKKGKKFARYQLGDLLLHLEKKHGEDWGKVYDEAWERIDKKVEGLSKHIKLEEERRSEDAQSKAALTDWLRAKASFVIEGLKEADKDEFCRCELKLQKWYGDLRGKPFAIEAENSILDISGFSKQYNCAFIWQKDGVKKLNLYLIINYFKGGKLRFKKIKPEAFEANRFYTVINKKSGEIVPMEVNFNFDDPNLIILPLAFGKRQGREFIWNDLLSLETGSLKLANGRVIEKTLYNRRTRQDEPALFVALTFERREVLDSSNIKPMNLIGVDRGENIPAVIALTDPEGCPLSRFKDSLGNPTHILRIGESYKEKQRTIQAKKEVEQRRAGGYSRKYASKAKNLADDMVRNTARDLLYYAVTQDAMLIFENLSRGFGRQGKRTFMAERQYTRMEDWLTAKLAYEGLPSKTYLSKTLAQYTSKTCSNCGFTITSADYDRVLEKLKKTATGWMTTINGKELKVEGQITYYNRYKRQNVVKDLSVELDRLSEESVNNDISSWTKGRSGEALSLLKKRFSHRPVQEKFVCLNCGFETHADEQAALNIARSWLFLRSQEYKKYQTNKTTGKNTDKRAFVETWQSFYRKKLKEVWKPAV

SEQ ID NO: 48077 - protein, 979 aa, synthetic construct
  REGION 1..979: note = engineered CasX variant
QEIKRINKIRRRLVKDSNTKKAGKTGPMKTLLVRVMTPDLRERLENLRKKPENIPQPISNTSRANLNKLLTDYTEMKKAILHVYWEEFQKDPVGLMSRVAQPASKKIDQNKLKPEMDEKGNLTTAGFACSQCGQPLFVYKLEQVSEKGKAYTNYFGRCNVAEHEKLILLAQLKPEKDSDEAVTYSLGKFGQRALDFYSIHVTKESTHPVKPLAQIAGNRYASVPVGKALSDACMGTIASFLSKYQDIIIEHQKVVKGNQKRLESLRELAGKENLEYPSVTLPPQPHTKEGVDAYNEVIARVRMWVNLNLWQKLKLSRDDAKPLLRLKGFPSFPLVERQANEVDWWDMVCNVKKLINEKKEDGKVFWQNLAIYKRQEALRPYLSSEEDRKKGKKFARYQLGDLLLHLEKKHGEDWGKVYDEAWERIDKKVEGLSKHIKLEEERRSEDAQSKAALTDWLRAKASFVIEGLKEADKDEFCRCELKLQKWYGDLRGKPFAIEAENSILDISGFSKQYNCAFIWQKDGVKKLNLYLIINYFKGGKLRFKKIKPEAFEANRFYTVINKKSGEIVPMEVNFNFDDPNLIILPLAFGKRQGREFIWNDLLSLETGSLKLANGRVIEKTLYNRRTRQDEPALFVALTFERREVLDSSNIKPMNLIGVDRGENIPAVIALTDPEGCPLSRFKDSLGNPTHILRIGESYKEKQRTIQAKKEVEQRRAGGYSRKYASKAKNLADDMVRNTARDLLYYAVTQDAMLIFENLSRGFGRQGKRTFMAERQYTRMEDWLTAKLAYEGLPSKTYLSKTLAQYTSKTCSNCGFTITSADYDRVLEKLKKTATGWMTTINGKELKVEGQITYYNRYKRQNVVKDLSVELDRLSEESVNNDISSWTKGRSGEALSLLKKRFSHRPVQEKFVCLNCGFETHADEQAALNIARSWLFLRSQEYKKYQTNKTTGKNTDKRAFVETWQSFYRKKLKEVWKPAV

SEQ ID NO: 48078 - protein, 979 aa, synthetic construct
  REGION 1..979: note = engineered CasX variant
QEIKRINKIRRRLVKDSNTKKAGKTGPMKTLLVRVMTPDLRERLENLRKKPENIPQPISNTSRANLNKLLTDYTEMKKAILHVYWEEFQKDPVGLMSRVAQPASKKIDQNKLKPEMDEKGNLTTAGFACSQCGQPLFVYKLEQVSEKGKAYTNYFGRCNVAEHEKLIKLAQLKPEKDSDEAVTYSLGKFGQRALDFYSIHVTKESTHPVKPLAQIAGNRYASGPVGKALSDACMGTIASFLSKYQDIIIEHQKVVKGNQKRLESLRELAGKENLEYPSVTLPPQPHTKEGVDAYNEVIARVRMWVNLNLWQKLKLSRDDAKPLLRLKGFPSFPLVERQANEVDWWDMVCNVKKLINEKKEDGKVFWQNLAIYKRQEALRPYLSSEEDRKKGKKFARYQLGDLLLHLEKKHGEDWGKVYDEAWERIDKKVEGLSKHIKLEEERRSEDAQSKAALTDWLRAKASFVIEGLKEADKDEFCRCELKLQKWYGDLRGKPFAIEAENSILDISGFSKQYNCAFIWQKDGVKKLNLYLIINYFKGGKLRFKKIKPEAFEANRFYTVINKKSGEIVPMEVNFNFDDPNLIILPLAFGKRQGREFIWNDLLSLETGSLKLANGRVIEKTLYNRRTRQDEPALFVALTFERREVLDSSNIKPMNLIGVDRGENIPAVIALTDPEGCPLSRFKDSLGNPTHILRIGESYKEKQRTIQAKKEVEQRRAGGYSRKYASKAKNLADDMVRNTARDLLYYAVTQDAMLIFENLSRGFGRQGKRTFMAERQYTRMEDWLTAKLAYEGLPSKTYLSKTLAQYTSKTCSNCGFTITSADYDRVLEKLKKTATGWMTTINGKELKVEGQITYYNRYKRQNVVKDLSVELDRLSEESVNNDISSWTKGRSGEALSLLKKRFSHRPVQEKFVCLNCGFETHADEQAALNIARSWLFLRSQEYKKYQTNKTTGKNTDKRAFVETWQSFYRKKLKEVWKPAV

SEQ ID NO: 48079 - protein, 978 aa, synthetic construct
  REGION 1..978: note = engineered CasX variant
QEIKRINKIRRRLVKDSNTKKAGKTGPMKTLLVRVMTPDLRERLENLRKKPENIPQPISNTSRANLNKLLTDYTEMKKAILHVYWEEFQKDPVGLMSRVAQPASKKIDQNKLKPEMDEKGNLTTAGFACSQCGQPLFVYKLEQVSEKGKAYTNYFGRCNVAEHEKLILLAQLKPEKDSDEAVTYSLGKFGQRALDFYSIHVTKESTHPVKPLAQIAGNRYASPVGKALSDACMGTIASFLSKYQDIIIEHQKVVKGNQKRLESLRELAGKENLEYPSVTLPPQPHTKEGVDAYNEVIARVRMWVNLNLWQKLKLSRDDAKPLLRLKGFPSFPLVERQANEVDWWDMVCNVKKLINEKKEDGKVFWQNLAIYKRQEALRPYLSSEEDRKKGKKFARYQLGDLLLHLEKKHGEDWGKVYDEAWERIDKKVEGLSKHIKLEEERRSEDAQSKAALTDWLRAKASFVIEGLKEADKDEFCRCELKLQKWYGDLRGKPFAIEAENSILDISGFSKQYNCAFIWQKDGVKKLNLYLIINYFKGGKLRFKKIKPEAFEANRFYTVINKKSGEIVPMEVNFNFDDPNLIILPLAFGKRQGREFIWNDLLSLETGSLKLANGRVIEKTLYNRRTRQDEPALFVALTFERREVLDSSNIKPMNLIGVDRGENIPAVIALTDPEGCPLSRFKDSLGNPTHILRIGESYKEKQRTIQAKKEVEQRRAGGYSRKYASKAKNLADDMVRNTARDLLYYAVTQDAMLIFENLSRGFGRQGKRTFMAERQYTRMEDWLTAKLAYEGLPSKTYLSKTLAQYTSKTCSNCGFTITSADYDRVLEKLKKTATGWMTTINGKELKVEGQITYYNRYKRQNVVKDLSVELDRLSEESVNNDISSWTKGRSGEALSLLKKRFSHRPVQEKFVCLNCGFETHADEQAALNIARSWLFLRSQEYKKYQTNKTTGKNTDKRAFVETWQSFYRKKLKEVWKPAV

SEQ ID NO: 48080 - protein, 979 aa, synthetic construct
  REGION 1..979: note = engineered CasX variant
QEIKRINKIRRRLVKDSNTKKAGKTGPMKTLLVRVMTPDLRERLENLRKKPENIPQPISNTSRANLNKLLTDYTEMKKAILHVYWEEFQKDPVGLMSRVAQPASKKIDQNKLKPEMDEKGNLTTAGFACSQCGQPLFVYKLEQVSEKGKAYTNYFGRCNVAEHEKLILLAQLKPEKDSDEAVTYSLGKFGQRALDFYSIHVTKESTHPVKPLAQIAGNRYASYPVGKALSDACMGTIASFLSKYQDIIIEHQKVVKGNQKRLESLRELAGKENLEYPSVTLPPQPHTKEGVDAYNEVIARVRMWVNLNLWQKLKLSRDDAKPLLRLKGFPSFPLVERQANEVDWWDMVCNVKKLINEKKEDGKVFWQNLAGYKRQEALRPYLSSEEDREKGKKFARYQLGDLLLHLEKKHGEDWGKVYDEAWERIDKKVEGLSKHIKLEEERRSEDAQSKAALTDWLRAKASFVIEGLKEADKDEFCRCELKLQKWYGDLRGKPFAIEAENSILDISGFSKQYNCAFIWQKDGVKKLNLYLIINYFKGGKLRFKKIKPEAFEANRFYTVINKKSGEIVPMEVNFNFDDPNLIILPLAFGKRQGREFIWNDLLSLETGSLKLANGRVIEKTLYNRRTRQDEPALFVALTFERREVLDSSNIKPMNLIGVDRGENIPAVIALTDPEGCPLSRFKDSLGNPTHILRIGESYKEKQRTIQAKKEVEQRRAGGYSRKYASKAKNLADDMVRNTARDLLYYAVTQDAMLIFENLSRGFGRQGKRTFMAERQYTRMEDWLTAKLAYEGLPSKTYLSKTLAQYTSKTCSNCGFTITSADYDRVLEKLKKTATGWMTTINGKELKVEGQITYYNRYKRQNVVKDLSVELDRLSEESVNNDISSWTKGRSGEALSLLKKRFSHRPVQEKFVCLNCGFETHADEQAALNIARSWLFLRSQEYKKYQTNKTTGKNTDKRAFVETWQSFYRKKLKEVWKPAV

SEQ ID NO: 48081 - protein, 979 aa, synthetic construct
  REGION 1..979: note = engineered CasX variant
QEIKRINKIRRRLVKDSNTKKAGKTGPMKTLLVRVMTPDLRERLENLRKKPENIPQPISNTSRANLNKLLTDYTEMKKAILHVYWEEFQKDPVGLMSRVAQPASKKIDQNKLKPEMDEKGNLTTAGFACSQCGQPLFVYKLEQVSEKGKAYTNYFGRCNVAEHEKLILLAQLKPEKDSDEAVTYSLGKFGQRALDFYSIHVTKESTHPVKPLAQIAGNRYASHPVGKALSDACMGTIASFLSKYQDIIIEHQKVVKGNQKRLESLRELAGKENLEYPSVTLPPQPHTKEGVDAYNEVIARVRMWVNLNLWQKLKLSRDDAKPLLRLKGFPSFPLVERQANEVDWWDMVCNVKKLINEKKEDGKVFWQNLAGYKRQEALRPYLSSEEDREKGKKFARYQLGDLLLHLEKKHGEDWGKVYDEAWERIDKKVEGLSKHIKLEEERRSEDAQSKAALTDWLRAKASFVIEGLKEADKDEFCRCELKLQKWYGDLRGKPFAIEAENSILDISGFSKQYNCAFIWQKDGVKKLNLYLIINYFKGGKLRFKKIKPEAFEANRFYTVINKKSGEIVPMEVNFNFDDPNLIILPLAFGKRQGREFIWNDLLSLETGSLKLANGRVIEKTLYNRRTRQDEPALFVALTFERREVLDSSNIKPMNLIGVDRGENIPAVIALTDPEGCPLSRFKDSLGNPTHILRIGESYKEKQRTIQAKKEVEQRRAGGYSRKYASKAKNLADDMVRNTARDLLYYAVTQDAMLIFENLSRGFGRQGKRTFMAERQYTRMEDWLTAKLAYEGLPSKTYLSKTLAQYTSKTCSNCGFTITSADYDRVLEKLKKTATGWMTTINGKELKVEGQITYYNRYKRQNVVKDLSVELDRLSEESVNNDISSWTKGRSGEALSLLKKRFSHRPVQEKFVCLNCGFETHADEQAALNIARSWLFLRSQEYKKYQTNKTTGKNTDKRAFVETWQSFYRKKLKEVWKPAV

SEQ ID NO: 48082 - protein, 979 aa, synthetic construct
  REGION 1..979: note = engineered CasX variant
QEIKRINKIRRRLVKDSNTKKAGKTGPMKTLLVRVMTPDLRERLENLRKKPENIPQPISNTSRANLNKLLTDYTEMKKAILHVYWEEFQKDPVGLMSRVAQPASKKIDQNKLKPEMDEKGNLTTAGFACSQCGQPLFVYKLEQVSEKGKAYTNYFGRCNVAEHEKLILLAQLKPEKDSDEAVTYSLGKFGQRALDFYSIHVTKESTHPVKPLAQIAGNRYASSPVGKALSDACMGTIASFLSKYQDIIIEHQKVVKGNQKRLESLRELAGKENLEYPSVTLPPQPHTKEGVDAYNEVIARVRMWVNLNLWQKLKLSRDDAKPLLRLKGFPSFPLVERQANEVDWWDMVCNVKKLINEKKEDGKVFWQNLAGYKRQEALRPYLSSEEDREKGKKFARYQLGDLLLHLEKKHGEDWGKVYDEAWERIDKKVEGLSKHIKLEEERRSEDAQSKAALTDWLRAKASFVIEGLKEADKDEFCRCELKLQKWYGDLRGKPFAIEAENSILDISGFSKQYNCAFIWQKDGVKKLNLYLIINYFKGGKLRFKKIKPEAFEANRFYTVINKKSGEIVPMEVNFNFDDPNLIILPLAFGKRQGREFIWNDLLSLETGSLKLANGRVIEKTLYNRRTRQDEPALFVALTFERREVLDSSNIKPMNLIGVDRGENIPAVIALTDPEGCPLSRFKDSLGNPTHILRIGESYKEKQRTIQAKKEVEQRRAGGYSRKYASKAKNLADDMVRNTARDLLYYAVTQDAMLIFENLSRGFGRQGKRTFMAERQYTRMEDWLTAKLAYEGLPSKTYLSKTLAQYTSKTCSNCGFTITSADYDRVLEKLKKTATGWMTTINGKELKVEGQITYYNRYKRQNVVKDLSVELDRLSEESVNNDISSWTKGRSGEALSLLKKRFSHRPVQEKFVCLNCGFETHADEQAALNIARSWLFLRSQEYKKYQTNKTTGKNTDKRAFVETWQSFYRKKLKEVWKPAV

SEQ ID NO: 48083 - protein, 979 aa, synthetic construct
  REGION 1..979: note = engineered CasX variant
QEIKRINKIRRRLVKDSNTKKAGKTGPMKTLLVRVMTPDLRERLENLRKKPENIPQPISNTSRANLNKLLTDYTEMKKAILHVYWEEFQKDPVGLMSRVAQPASKKIDQNKLKPEMDEKGNLTTAGFACSQCGQPLFVYKLEQVSEKGKAYTNYFGRCNVAEHEKLILLAQLKPEKDSDEAVTYSLGKFGQRALDFYSIHVTKESTHPVKPLAQIAGNRYASTPVGKALSDACMGTIASFLSKYQDIIIEHQKVVKGNQKRLESLRELAGKENLEYPSVTLPPQPHTKEGVDAYNEVIARVRMWVNLNLWQKLKLSRDDAKPLLRLKGFPSFPLVERQANEVDWWDMVCNVKKLINEKKEDGKVFWQNLAGYKRQEALRPYLSSEEDREKGKKFARYQLGDLLLHLEKKHGEDWGKVYDEAWERIDKKVEGLSKHIKLEEERRSEDAQSKAALTDWLRAKASFVIEGLKEADKDEFCRCELKLQKWYGDLRGKPFAIEAENSILDISGFSKQYNCAFIWQKDGVKKLNLYLIINYFKGGKLRFKKIKPEAFEANRFYTVINKKSGEIVPMEVNFNFDDPNLIILPLAFGKRQGREFIWNDLLSLETGSLKLANGRVIEKTLYNRRTRQDEPALFVALTFERREVLDSSNIKPMNLIGVDRGENIPAVIALTDPEGCPLSRFKDSLGNPTHILRIGESYKEKQRTIQAKKEVEQRRAGGYSRKYASKAKNLADDMVRNTARDLLYYAVTQDAMLIFENLSRGFGRQGKRTFMAERQYTRMEDWLTAKLAYEGLPSKTYLSKTLAQYTSKTCSNCGFTITSADYDRVLEKLKKTATGWMTTINGKELKVEGQITYYNRYKRQNVVKDLSVELDRLSEESVNNDISSWTKGRSGEALSLLKKRFSHRPVQEKFVCLNCGFETHADEQAALNIARSWLFLRSQEYKKYQTNKTTGKNTDKRAFVETWQSFYRKKLKEVWKPAV

SEQ ID NO: 48084 - protein, 979 aa, synthetic construct
  REGION 1..979: note = engineered CasX variant
QEIKRINKIRRRLVKDSNTKKAGKTGPMKTLLVRVMTPDLRERLENLRKKPENIPQPISNTSRANLNKLLTDYTEMKKAILHVYWEEFQKDPVGLMSRVAQPASKKIDQNKLKPEMDEKGNLTTAGFACSQCGQPLFVYKLEQVSEKGKAYTNYFGRCNVAEHEKLILLAQLKPEKDSDEAVTYSLGKFGQRALDFYSIHVTKESTHPVKPLAQIAGNRYASAPVGKALSDACMGTIASFLSKYQDIIIEHQKVVKGNQKRLESLRELAGKENLEYPSVTLPPQPHTKEGVDAYNEVIARVRMWVNLNLWQKLKLSRDDAKPLLRLKGFPSFPLVERQANEVDWWDMVCNVKKLINEKKEDGKVFWQNLAGYKRQEALRPYLSSEEDREKGKKFARYQLGDLLLHLEKKHGEDWGKVYDEAWERIDKKVEGLSKHIKLEEERRSEDAQSKAALTDWLRAKASFVIEGLKEADKDEFCRCELKLQKWYGDLRGKPFAIEAENSILDISGFSKQYNCAFIWQKDGVKKLNLYLIINYFKGGKLRFKKIKPEAFEANRFYTVINKKSGEIVPMEVNFNFDDPNLIILPLAFGKRQGREFIWNDLLSLETGSLKLANGRVIEKTLYNRRTRQDEPALFVALTFERREVLDSSNIKPMNLIGVDRGENIPAVIALTDPEGCPLSRFKDSLGNPTHILRIGESYKEKQRTIQAKKEVEQRRAGGYSRKYASKAKNLADDMVRNTARDLLYYAVTQDAMLIFENLSRGFGRQGKRTFMAERQYTRMEDWLTAKLAYEGLPSKTYLSKTLAQYTSKTCSNCGFTITSADYDRVLEKLKKTATGWMTTINGKELKVEGQITYYNRYKRQNVVKDLSVELDRLSEESVNNDISSWTKGRSGEALSLLKKRFSHRPVQEKFVCLNCGFETHADEQAALNIARSWLFLRSQEYKKYQTNKTTGKNTDKRAFVETWQSFYRKKLKEVWKPAV

SEQ ID NO: 48085 - protein, 979 aa, synthetic construct
  REGION 1..979: note = engineered CasX variant
QEIKRINKIRRRLVKDSNTKKAGKTGPMKTLLVRVMTPDLRERLENLRKKPENIPQPISNTSRANLNKLLTDYTEMKKAILHVYWEEFQKDPVGLMSRVAQPASKKIDQNKLKPEMDEKGNLTTAGFACSQCGQPLFVYKLEQVSEKGKAYTNYFGRCNVAEHEKLILLAQLKPEKDSDEAVTYSLGKFGQRALDFYSIHVTKESTHPVKPLAQIAGNRYASVPVGKALSDACMGTIASFLSKYQDIIIEHQKVVKGNQKRLESLRELAGKENLEYPSVTLPPQPHTKEGVDAYNEVIARVRMWVNLNLWQKLKLSRDDAKPLLRLKGFPSFPLVERQANEVDWWDMVCNVKKLINEKKEDGKVFWQNLAGYKRQEALRPYLSSEEDREKGKKFARYQLGDLLLHLEKKHGEDWGKVYDEAWERIDKKVEGLSKHIKLEEERRSEDAQSKAALTDWLRAKASFVIEGLKEADKDEFCRCELKLQKWYGDLRGKPFAIEAENSILDISGFSKQYNCAFIWQKDGVKKLNLYLIINYFKGGKLRFKKIKPEAFEANRFYTVINKKSGEIVPMEVNFNFDDPNLIILPLAFGKRQGREFIWNDLLSLETGSLKLANGRVIEKTLYNRRTRQDEPALFVALTFERREVLDSSNIKPMNLIGVDRGENIPAVIALTDPEGCPLSRFKDSLGNPTHILRIGESYKEKQRTIQAKKEVEQRRAGGYSRKYASKAKNLADDMVRNTARDLLYYAVTQDAMLIFENLSRGFGRQGKRTFMAERQYTRMEDWLTAKLAYEGLPSKTYLSKTLAQYTSKTCSNCGFTITSADYDRVLEKLKKTATGWMTTINGKELKVEGQITYYNRYKRQNVVKDLSVELDRLSEESVNNDISSWTKGRSGEALSLLKKRFSHRPVQEKFVCLNCGFETHADEQAALNIARSWLFLRSQEYKKYQTNKTTGKNTDKRAFVETWQSFYRKKLKEVWKPAV

SEQ ID NO: 48086 - protein, 979 aa, synthetic construct
  REGION 1..979: note = engineered CasX variant
QEIKRINKIRRRLVKDSNTKKAGKTGPMKTLLVRVMTPDLRERLENLRKKPENIPQPISNTSRANLNKLLTDYTEMKKAILHVYWEEFQKDPVGLMSRVAQPASKKIDQNKLKPEMDEKGNLTTAGFACSQCGQPLFVYKLEQVSEKGKAYTNYFGRCNVAEHEKLIKLAQLKPEKDSDEAVTYSLGKFGQRALDFYSIHVTKESTHPVKPLAQIAGNRYASGPVGKALSDACMGTIASFLSKYQDIIIEHQKVVKGNQKRLESLRELAGKENLEYPSVTLPPQPHTKEGVDAYNEVIARVRMWVNLNLWQKLKLSRDDAKPLLRLKGFPSFPLVERQANEVDWWDMVCNVKKLINEKKEDGKVFWQNLAGYKRQEALRPYLSSEEDREKGKKFARYQLGDLLLHLEKKHGEDWGKVYDEAWERIDKKVEGLSKHIKLEEERRSEDAQSKAALTDWLRAKASFVIEGLKEADKDEFCRCELKLQKWYGDLRGKPFAIEAENSILDISGFSKQYNCAFIWQKDGVKKLNLYLIINYFKGGKLRFKKIKPEAFEANRFYTVINKKSGEIVPMEVNFNFDDPNLIILPLAFGKRQGREFIWNDLLSLETGSLKLANGRVIEKTLYNRRTRQDEPALFVALTFERREVLDSSNIKPMNLIGVDRGENIPAVIALTDPEGCPLSRFKDSLGNPTHILRIGESYKEKQRTIQAKKEVEQRRAGGYSRKYASKAKNLADDMVRNTARDLLYYAVTQDAMLIFENLSRGFGRQGKRTFMAERQYTRMEDWLTAKLAYEGLPSKTYLSKTLAQYTSKTCSNCGFTITSADYDRVLEKLKKTATGWMTTINGKELKVEGQITYYNRYKRQNVVKDLSVELDRLSEESVNNDISSWTKGRSGEALSLLKKRFSHRPVQEKFVCLNCGFETHADEQAALNIARSWLFLRSQEYKKYQTNKTTGKNTDKRAFVETWQSFYRKKLKEVWKPAV

SEQ ID NO: 48087 - protein, 978 aa, synthetic construct
  REGION 1..978: note = engineered CasX variant
QEIKRINKIRRRLVKDSNTKKAGKTGPMKTLLVRVMTPDLRERLENLRKKPENIPQPISNTSRANLNKLLTDYTEMKKAILHVYWEEFQKDPVGLMSRVAQPASKKIDQNKLKPEMDEKGNLTTAGFACSQCGQPLFVYKLEQVSEKGKAYTNYFGRCNVAEHEKLILLAQLKPEKDSDEAVTYSLGKFGQRALDFYSIHVTKESTHPVKPLAQIAGNRYASPVGKALSDACMGTIASFLSKYQDIIIEHQKVVKGNQKRLESLRELAGKENLEYPSVTLPPQPHTKEGVDAYNEVIARVRMWVNLNLWQKLKLSRDDAKPLLRLKGFPSFPLVERQANEVDWWDMVCNVKKLINEKKEDGKVFWQNLAGYKRQEALRPYLSSEEDREKGKKFARYQLGDLLLHLEKKHGEDWGKVYDEAWERIDKKVEGLSKHIKLEEERRSEDAQSKAALTDWLRAKASFVIEGLKEADKDEFCRCELKLQKWYGDLRGKPFAIEAENSILDISGFSKQYNCAFIWQKDGVKKLNLYLIINYFKGGKLRFKKIKPEAFEANRFYTVINKKSGEIVPMEVNFNFDDPNLIILPLAFGKRQGREFIWNDLLSLETGSLKLANGRVIEKTLYNRRTRQDEPALFVALTFERREVLDSSNIKPMNLIGVDRGENIPAVIALTDPEGCPLSRFKDSLGNPTHILRIGESYKEKQRTIQAKKEVEQRRAGGYSRKYASKAKNLADDMVRNTARDLLYYAVTQDAMLIFENLSRGFGRQGKRTFMAERQYTRMEDWLTAKLAYEGLPSKTYLSKTLAQYTSKTCSNCGFTITSADYDRVLEKLKKTATGWMTTINGKELKVEGQITYYNRYKRQNVVKDLSVELDRLSEESVNNDISSWTKGRSGEALSLLKKRFSHRPVQEKFVCLNCGFETHADEQAALNIARSWLFLRSQEYKKYQTNKTTGKNTDKRAFVETWQSFYRKKLKEVWKPAV

SEQ ID NO: 48088 - protein, 979 aa, synthetic construct
  REGION 1..979: note = engineered CasX variant
QEIKRINKIRRRLVKDSNTKKAGKTGPMKTLLVRVMTPDLRERLENLRKKPENIPQPISNTSRANLNKLLTDYTEMKKAILHVYWEEFQKDPVGLMSRVAQPASKKIDQNKLKPEMDEKGNLTTAGFACSQCGQPLFVYKLEQVSEKGKAYTNYFGRCNVAEHEKLILLAQLKPEKDSDEAVTYSLGKFGQRALDFYSIHVTKESTHPVKPLAQIAGNRYASYPVGKALSDACMGTIASFLSKYQDIIIEHQKVVKGNQKRLESLRELAGKENLEYPSVTLPPQPHTKEGVDAYNEVIARVRMWVNLNLWQKLKLSRDDAKPLLRLKGFPSFPLVERQANEVDWWDMVCNVKKLINEKKEDGKVFWQNLAGYKRQEALRPYLSSEEDRKKGKKFARYQLGDLLLHLEKKHGEDWGKVYDEAWERIDKKVEGLSKHIKLEEERRSEDAQSKAALTDWLRAKASFVIEGLKEADKDEFCRCELKLQKWYGDLRGKPFAIEAENSILDISGFSKQYNCAFIWQKDGVKKLNLYLIINYFKGGKLRFKKIKPEAFEANRFYTVINKKSGEIVIMEVNFNFDDPNLIILPLAFGKRQGREFIWNDLLSLETGSLKLANGRVIEKTLYNRRTRQDEPALFVALTFERREVLDSSNIKPMNLIGVDRGENIPAVIALTDPEGCPLSRFKDSLGNPTHILRIGESYKEKQRTIQAKKEVEQRRAGGYSRKYASKAKNLADDMVRNTARDLLYYAVTQDAMLIFENLSRGFGRQGKRTFMAERQYTRMEDWLTAKLAYEGLPSKTYLSKTLAQYTSKTCSNCGFTITSADYDRVLEKLKKTATGWMTTINGKELKVEGQITYYNRYKRQNVVKDLSVELDRLSEESVNNDISSWTKGRSGEALSLLKKRFSHRPVQEKFVCLNCGFETHADEQAALNIARSWLFLRSQEYKKYQTNKTTGKNTDKRAFVETWQSFYRKKLKEVWKPAV

SEQ ID NO: 48089 - protein, 979 aa, synthetic construct
  REGION 1..979: note = engineered CasX variant
QEIKRINKIRRRLVKDSNTKKAGKTGPMKTLLVRVMTPDLRERLENLRKKPENIPQPISNTSRANLNKLLTDYTEMKKAILHVYWEEFQKDPVGLMSRVAQPASKKIDQNKLKPEMDEKGNLTTAGFACSQCGQPLFVYKLEQVSEKGKAYTNYFGRCNVAEHEKLILLAQLKPEKDSDEAVTYSLGKFGQRALDFYSIHVTKESTHPVKPLAQIAGNRYASHPVGKALSDACMGTIASFLSKYQDIIIEHQKVVKGNQKRLESLRELAGKENLEYPSVTLPPQPHTKEGVDAYNEVIARVRMWVNLNLWQKLKLSRDDAKPLLRLKGFPSFPLVERQANEVDWWDMVCNVKKLINEKKEDGKVFWQNLAGYKRQEALRPYLSSEEDRKKGKKFARYQLGDLLLHLEKKHGEDWGKVYDEAWERIDKKVEGLSKHIKLEEERRSEDAQSKAALTDWLRAKASFVIEGLKEADKDEFCRCELKLQKWYGDLRGKPFAIEAENSILDISGFSKQYNCAFIWQKDGVKKLNLYLIINYFKGGKLRFKKIKPEAFEANRFYTVINKKSGEIVIMEVNFNFDDPNLIILPLAFGKRQGREFIWNDLLSLETGSLKLANGRVIEKTLYNRRTRQDEPALFVALTFERREVLDSSNIKPMNLIGVDRGENIPAVIALTDPEGCPLSRFKDSLGNPTHILRIGESYKEKQRTIQAKKEVEQRRAGGYSRKYASKAKNLADDMVRNTARDLLYYAVTQDAMLIFENLSRGFGRQGKRTFMAERQYTRMEDWLTAKLAYEGLPSKTYLSKTLAQYTSKTCSNCGFTITSADYDRVLEKLKKTATGWMTTINGKELKVEGQITYYNRYKRQNVVKDLSVELDRLSEESVNNDISSWTKGRSGEALSLLKKRFSHRPVQEKFVCLNCGFETHADEQAALNIARSWLFLRSQEYKKYQTNKTTGKNTDKRAFVETWQSFYRKKLKEVWKPAV

SEQ ID NO: 48090 - protein, 979 aa, synthetic construct
  REGION 1..979: note = engineered CasX variant
QEIKRINKIRRRLVKDSNTKKAGKTGPMKTLLVRVMTPDLRERLENLRKKPENIPQPISNTSRANLNKLLTDYTEMKKAILHVYWEEFQKDPVGLMSRVAQPASKKIDQNKLKPEMDEKGNLTTAGFACSQCGQPLFVYKLEQVSEKGKAYTNYFGRCNVAEHEKLILLAQLKPEKDSDEAVTYSLGKFGQRALDFYSIHVTKESTHPVKPLAQIAGNRYASSPVGKALSDACMGTIASFLSKYQDIIIEHQKVVKGNQKRLESLRELAGKENLEYPSVTLPPQPHTKEGVDAYNEVIARVRMWVNLNLWQKLKLSRDDAKPLLRLKGFPSFPLVERQANEVDWWDMVCNVKKLINEKKEDGKVFWQNLAGYKRQEALRPYLSSEEDRKKGKKFARYQLGDLLLHLEKKHGEDWGKVYDEAWERIDKKVEGLSKHIKLEEERRSEDAQSKAALTDWLRAKASFVIEGLKEADKDEFCRCELKLQKWYGDLRGKPFAIEAENSILDISGFSKQYNCAFIWQKDGVKKLNLYLIINYFKGGKLRFKKIKPEAFEANRFYTVINKKSGEIVIMEVNFNFDDPNLIILPLAFGKRQGREFIWNDLLSLETGSLKLANGRVIEKTLYNRRTRQDEPALFVALTFERREVLDSSNIKPMNLIGVDRGENIPAVIALTDPEGCPLSRFKDSLGNPTHILRIGESYKEKQRTIQAKKEVEQRRAGGYSRKYASKAKNLADDMVRNTARDLLYYAVTQDAMLIFENLSRGFGRQGKRTFMAERQYTRMEDWLTAKLAYEGLPSKTYLSKTLAQYTSKTCSNCGFTITSADYDRVLEKLKKTATGWMTTINGKELKVEGQITYYNRYKRQNVVKDLSVELDRLSEESVNNDISSWTKGRSGEALSLLKKRFSHRPVQEKFVCLNCGFETHADEQAALNIARSWLFLRSQEYKKYQTNKTTGKNTDKRAFVETWQSFYRKKLKEVWKPAV

SEQ ID NO: 48091 - protein, 979 aa, synthetic construct
  REGION 1..979: note = engineered CasX variant
QEIKRINKIRRRLVKDSNTKKAGKTGPMKTLLVRVMTPDLRERLENLRKKPENIPQPISNTSRANLNKLLTDYTEMKKAILHVYWEEFQKDPVGLMSRVAQPASKKIDQNKLKPEMDEKGNLTTAGFACSQCGQPLFVYKLEQVSEKGKAYTNYFGRCNVAEHEKLILLAQLKPEKDSDEAVTYSLGKFGQRALDFYSIHVTKESTHPVKPLAQIAGNRYASTPVGKALSDACMGTIASFLSKYQDIIIEHQKVVKGNQKRLESLRELAGKENLEYPSVTLPPQPHTKEGVDAYNEVIARVRMWVNLNLWQKLKLSRDDAKPLLRLKGFPSFPLVERQANEVDWWDMVCNVKKLINEKKEDGKVFWQNLAGYKRQEALRPYLSSEEDRKKGKKFARYQLGDLLLHLEKKHGEDWGKVYDEAWERIDKKVEGLSKHIKLEEERRSEDAQSKAALTDWLRAKASFVIEGLKEADKDEFCRCELKLQKWYGDLRGKPFAIEAENSILDISGFSKQYNCAFIWQKDGVKKLNLYLIINYFKGGKLRFKKIKPEAFEANRFYTVINKKSGEIVIMEVNFNFDDPNLIILPLAFGKRQGREFIWNDLLSLETGSLKLANGRVIEKTLYNRRTRQDEPALFVALTFERREVLDSSNIKPMNLIGVDRGENIPAVIALTDPEGCPLSRFKDSLGNPTHILRIGESYKEKQRTIQAKKEVEQRRAGGYSRKYASKAKNLADDMVRNTARDLLYYAVTQDAMLIFENLSRGFGRQGKRTFMAERQYTRMEDWLTAKLAYEGLPSKTYLSKTLAQYTSKTCSNCGFTITSADYDRVLEKLKKTATGWMTTINGKELKVEGQITYYNRYKRQNVVKDLSVELDRLSEESVNNDISSWTKGRSGEALSLLKKRFSHRPVQEKFVCLNCGFETHADEQAALNIARSWLFLRSQEYKKYQTNKTTGKNTDKRAFVETWQSFYRKKLKEVWKPAV

SEQ ID NO: 48092 - protein, 979 aa, synthetic construct
  REGION 1..979: note = engineered CasX variant
QEIKRINKIRRRLVKDSNTKKAGKTGPMKTLLVRVMTPDLRERLENLRKKPENIPQPISNTSRANLNKLLTDYTEMKKAILHVYWEEFQKDPVGLMSRVAQPASKKIDQNKLKPEMDEKGNLTTAGFACSQCGQPLFVYKLEQVSEKGKAYTNYFGRCNVAEHEKLILLAQLKPEKDSDEAVTYSLGKFGQRALDFYSIHVTKESTHPVKPLAQIAGNRYASAPVGKALSDACMGTIASFLSKYQDIIIEHQKVVKGNQKRLESLRELAGKENLEYPSVTLPPQPHTKEGVDAYNEVIARVRMWVNLNLWQKLKLSRDDAKPLLRLKGFPSFPLVERQANEVDWWDMVCNVKKLINEKKEDGKVFWQNLAGYKRQEALRPYLSSEEDRKKGKKFARYQLGDLLLHLEKKHGEDWGKVYDEAWERIDKKVEGLSKHIKLEEERRSEDAQSKAALTDWLRAKASFVIEGLKEADKDEFCRCELKLQKWYGDLRGKPFAIEAENSILDISGFSKQYNCAFIWQKDGVKKLNLYLIINYFKGGKLRFKKIKPEAFEANRFYTVINKKSGEIVIMEVNFNFDDPNLIILPLAFGKRQGREFIWNDLLSLETGSLKLANGRVIEKTLYNRRTRQDEPALFVALTFERREVLDSSNIKPMNLIGVDRGENIPAVIALTDPEGCPLSRFKDSLGNPTHILRIGESYKEKQRTIQAKKEVEQRRAGGYSRKYASKAKNLADDMVRNTARDLLYYAVTQDAMLIFENLSRGFGRQGKRTFMAERQYTRMEDWLTAKLAYEGLPSKTYLSKTLAQYTSKTCSNCGFTITSADYDRVLEKLKKTATGWMTTINGKELKVEGQITYYNRYKRQNVVKDLSVELDRLSEESVNNDISSWTKGRSGEALSLLKKRFSHRPVQEKFVCLNCGFETHADEQAALNIARSWLFLRSQEYKKYQTNKTTGKNTDKRAFVETWQSFYRKKLKEVWKPAV

SEQ ID NO: 48093 - protein, 979 aa, synthetic construct
  REGION 1..979: note = engineered CasX variant
QEIKRINKIRRRLVKDSNTKKAGKTGPMKTLLVRVMTPDLRERLENLRKKPENIPQPISNTSRANLNKLLTDYTEMKKAILHVYWEEFQKDPVGLMSRVAQPASKKIDQNKLKPEMDEKGNLTTAGFACSQCGQPLFVYKLEQVSEKGKAYTNYFGRCNVAEHEKLILLAQLKPEKDSDEAVTYSLGKFGQRALDFYSIHVTKESTHPVKPLAQIAGNRYASVPVGKALSDACMGTIASFLSKYQDIIIEHQKVVKGNQKRLESLRELAGKENLEYPSVTLPPQPHTKEGVDAYNEVIARVRMWVNLNLWQKLKLSRDDAKPLLRLKGFPSFPLVERQANEVDWWDMVCNVKKLINEKKEDGKVFWQNLAGYKRQEALRPYLSSEEDRKKGKKFARYQLGDLLLHLEKKHGEDWGKVYDEAWERIDKKVEGLSKHIKLEEERRSEDAQSKAALTDWLRAKASFVIEGLKEADKDEFCRCELKLQKWYGDLRGKPFAIEAENSILDISGFSKQYNCAFIWQKDGVKKLNLYLIINYFKGGKLRFKKIKPEAFEANRFYTVINKKSGEIVIMEVNFNFDDPNLIILPLAFGKRQGREFIWNDLLSLETGSLKLANGRVIEKTLYNRRTRQDEPALFVALTFERREVLDSSNIKPMNLIGVDRGENIPAVIALTDPEGCPLSRFKDSLGNPTHILRIGESYKEKQRTIQAKKEVEQRRAGGYSRKYASKAKNLADDMVRNTARDLLYYAVTQDAMLIFENLSRGFGRQGKRTFMAERQYTRMEDWLTAKLAYEGLPSKTYLSKTLAQYTSKTCSNCGFTITSADYDRVLEKLKKTATGWMTTINGKELKVEGQITYYNRYKRQNVVKDLSVELDRLSEESVNNDISSWTKGRSGEALSLLKKRFSHRPVQEKFVCLNCGFETHADEQAALNIARSWLFLRSQEYKKYQTNKTTGKNTDKRAFVETWQSFYRKKLKEVWKPAV

SEQ ID NO: 48094 - protein, 979 aa, synthetic construct
  REGION 1..979: note = engineered CasX variant
QEIKRINKIRRRLVKDSNTKKAGKTGPMKTLLVRVMTPDLRERLENLRKKPENIPQPISNTSRANLNKLLTDYTEMKKAILHVYWEEFQKDPVGLMSRVAQPASKKIDQNKLKPEMDEKGNLTTAGFACSQCGQPLFVYKLEQVSEKGKAYTNYFGRCNVAEHEKLIKLAQLKPEKDSDEAVTYSLGKFGQRALDFYSIHVTKESTHPVKPLAQIAGNRYASGPVGKALSDACMGTIASFLSKYQDIIIEHQKVVKGNQKRLESLRELAGKENLEYPSVTLPPQPHTKEGVDAYNEVIARVRMWVNLNLWQKLKLSRDDAKPLLRLKGFPSFPLVERQANEVDWWDMVCNVKKLINEKKEDGKVFWQNLAGYKRQEALRPYLSSEEDRKKGKKFARYQLGDLLLHLEKKHGEDWGKVYDEAWERIDKKVEGLSKHIKLEEERRSEDAQSKAALTDWLRAKASFVIEGLKEADKDEFCRCELKLQKWYGDLRGKPFAIEAENSILDISGFSKQYNCAFIWQKDGVKKLNLYLIINYFKGGKLRFKKIKPEAFEANRFYTVINKKSGEIVIMEVNFNFDDPNLIILPLAFGKRQGREFIWNDLLSLETGSLKLANGRVIEKTLYNRRTRQDEPALFVALTFERREVLDSSNIKPMNLIGVDRGENIPAVIALTDPEGCPLSRFKDSLGNPTHILRIGESYKEKQRTIQAKKEVEQRRAGGYSRKYASKAKNLADDMVRNTARDLLYYAVTQDAMLIFENLSRGFGRQGKRTFMAERQYTRMEDWLTAKLAYEGLPSKTYLSKTLAQYTSKTCSNCGFTITSADYDRVLEKLKKTATGWMTTINGKELKVEGQITYYNRYKRQNVVKDLSVELDRLSEESVNNDISSWTKGRSGEALSLLKKRFSHRPVQEKFVCLNCGFETHADEQAALNIARSWLFLRSQEYKKYQTNKTTGKNTDKRAFVETWQSFYRKKLKEVWKPAV

SEQ ID NO: 48095 - protein, 978 aa, synthetic construct
  REGION 1..978: note = engineered CasX variant
QEIKRINKIRRRLVKDSNTKKAGKTGPMKTLLVRVMTPDLRERLENLRKKPENIPQPISNTSRANLNKLLTDYTEMKKAILHVYWEEFQKDPVGLMSRVAQPASKKIDQNKLKPEMDEKGNLTTAGFACSQCGQPLFVYKLEQVSEKGKAYTNYFGRCNVAEHEKLILLAQLKPEKDSDEAVTYSLGKFGQRALDFYSIHVTKESTHPVKPLAQIAGNRYASPVGKALSDACMGTIASFLSKYQDIIIEHQKVVKGNQKRLESLRELAGKENLEYPSVTLPPQPHTKEGVDAYNEVIARVRMWVNLNLWQKLKLSRDDAKPLLRLKGFPSFPLVERQANEVDWWDMVCNVKKLINEKKEDGKVFWQNLAGYKRQEALRPYLSSEEDRKKGKKFARYQLGDLLLHLEKKHGEDWGKVYDEAWERIDKKVEGLSKHIKLEEERRSEDAQSKAALTDWLRAKASFVIEGLKEADKDEFCRCELKLQKWYGDLRGKPFAIEAENSILDISGFSKQYNCAFIWQKDGVKKLNLYLIINYFKGGKLRFKKIKPEAFEANRFYTVINKKSGEIVIMEVNFNFDDPNLIILPLAFGKRQGREFIWNDLLSLETGSLKLANGRVIEKTLYNRRTRQDEPALFVALTFERREVLDSSNIKPMNLIGVDRGENIPAVIALTDPEGCPLSRFKDSLGNPTHILRIGESYKEKQRTIQAKKEVEQRRAGGYSRKYASKAKNLADDMVRNTARDLLYYAVTQDAMLIFENLSRGFGRQGKRTFMAERQYTRMEDWLTAKLAYEGLPSKTYLSKTLAQYTSKTCSNCGFTITSADYDRVLEKLKKTATGWMTTINGKELKVEGQITYYNRYKRQNVVKDLSVELDRLSEESVNNDISSWTKGRSGEALSLLKKRFSHRPVQEKFVCLNCGFETHADEQAALNIARSWLFLRSQEYKKYQTNKTTGKNTDKRAFVETWQSFYRKKLKEVWKPAV

SEQ ID NO: 48096 - protein, 978 aa, synthetic construct
  REGION 1..978: note = engineered CasX variant
QEIKRINKIRRRLVKDSNTKKAGKTGPMKTLLVRVMTPDLRERLENLRKKPENIPQPISNTSRANLNKLLTDYTEMKKAILHVYWEEFQKDPVGLMSRVAQPASKKIDQNKLKPEMDEKGNLTTAGFACSQCGQPLFVYKLEQVSEKGKAYTNYFGRCNVAEHEKLILLAQLKPEKDSDEAVTYSLGKFGQRALDFYSIHVTKESTHPVKPLAQIAGNRYASYPVGKALSGACMGTIASFLSKYQDIIIEHQKVVKGNQKRLESLRELAGKENLEYPSVTLPPQPHTKEGVDAYNEVIARVRMWVNLNLWQKLKLSRDDAKPLLRLKKFPSFPLVERQANEVDWWDMVCNVKKLINEKKEDGKVFWQNLAGYKRQEALRPYLSSEEDRKKGKKFARYQLGDLLLHLEKKHGEDWGKVYDEAWERIDKKVEGLSKHIKLEEERRSEDAQSKAALTDWLRAKASFVIEGLKEADKDEFCRCELKLQKWYGDLRGKPFAIEAENSILDISGFSKQYNCAFIWQKDGVKKLNLYLIINYFKGGKLRFKKIKPEAFEANRFYTVINKKSGEIVPMEVNFNFDDPNLIILPLAFGKRQGREFIWNDLLSLETGSLKLANGRVIEKTLYNRRTRQDEPALFVALTFERREVLDSSNIKPMNLIGVDRGENIPAVIALTDPEGCPLSRFKDSLGNPTHILRIGESYKEKQRTIQAKKEVEQRRAGGYSRKYASKAKNLADDMVRNTARDLLYYAVTQDAMLIFENLSRGFGRQGKRTFMAERQYTRMEDWLTAKLAYEGLPSKTYLSKTLAQYTSKTCSNCGFTITSADYDRVLEKLKKTATGWMTTINGKELKVEGQITYYNRYKRQNVVKDLSVELDRLSEESVNNDISSWTKGRSGEALSLLKKRFSHRPVQEKFVCLNCGFETHADEQAALNIARSWLFLRSQEYKKYQTNKTTGNTDKRAFVETWQSFYRKKLKEVWKPAV

SEQ ID NO: 48097 - protein, 978 aa, synthetic construct
  REGION 1..978: note = engineered CasX variant
QEIKRINKIRRRLVKDSNTKKAGKTGPMKTLLVRVMTPDLRERLENLRKKPENIPQPISNTSRANLNKLLTDYTEMKKAILHVYWEEFQKDPVGLMSRVAQPASKKIDQNKLKPEMDEKGNLTTAGFACSQCGQPLFVYKLEQVSEKGKAYTNYFGRCNVAEHEKLILLAQLKPEKDSDEAVTYSLGKFGQRALDFYSIHVTKESTHPVKPLAQIAGNRYASHPVGKALSGACMGTIASFLSKYQDIIIEHQKVVKGNQKRLESLRELAGKENLEYPSVTLPPQPHTKEGVDAYNEVIARVRMWVNLNLWQKLKLSRDDAKPLLRLKKFPSFPLVERQANEVDWWDMVCNVKKLINEKKEDGKVFWQNLAGYKRQEALRPYLSSEEDRKKGKKFARYQLGDLLLHLEKKHGEDWGKVYDEAWERIDKKVEGLSKHIKLEEERRSEDAQSKAALTDWLRAKASFVIEGLKEADKDEFCRCELKLQKWYGDLRGKPFAIEAENSILDISGFSKQYNCAFIWQKDGVKKLNLYLIINYFKGGKLRFKKIKPEAFEANRFYTVINKKSGEIVPMEVNFNFDDPNLIILPLAFGKRQGREFIWNDLLSLETGSLKLANGRVIEKTLYNRRTRQDEPALFVALTFERREVLDSSNIKPMNLIGVDRGENIPAVIALTDPEGCPLSRFKDSLGNPTHILRIGESYKEKQRTIQAKKEVEQRRAGGYSRKYASKAKNLADDMVRNTARDLLYYAVTQDAMLIFENLSRGFGRQGKRTFMAERQYTRMEDWLTAKLAYEGLPSKTYLSKTLAQYTSKTCSNCGFTITSADYDRVLEKLKKTATGWMTTINGKELKVEGQITYYNRYKRQNVVKDLSVELDRLSEESVNNDISSWTKGRSGEALSLLKKRFSHRPVQEKFVCLNCGFETHADEQAALNIARSWLFLRSQEYKKYQTNKTTGNTDKRAFVETWQSFYRKKLKEVWKPAV

SEQ ID NO: 48098 - protein, 978 aa, synthetic construct
  REGION 1..978: note = engineered CasX variant
QEIKRINKIRRRLVKDSNTKKAGKTGPMKTLLVRVMTPDLRERLENLRKKPENIPQPISNTSRANLNKLLTDYTEMKKAILHVYWEEFQKDPVGLMSRVAQPASKKIDQNKLKPEMDEKGNLTTAGFACSQCGQPLFVYKLEQVSEKGKAYTNYFGRCNVAEHEKLILLAQLKPEKDSDEAVTYSLGKFGQRALDFYSIHVTKESTHPVKPLAQIAGNRYASSPVGKALSGACMGTIASFLSKYQDIIIEHQKVVKGNQKRLESLRELAGKENLEYPSVTLPPQPHTKEGVDAYNEVIARVRMWVNLNLWQKLKLSRDDAKPLLRLKKFPSFPLVERQANEVDWWDMVCNVKKLINEKKEDGKVFWQNLAGYKRQEALRPYLSSEEDRKKGKKFARYQLGDLLLHLEKKHGEDWGKVYDEAWERIDKKVEGLSKHIKLEEERRSEDAQSKAALTDWLRAKASFVIEGLKEADKDEFCRCELKLQKWYGDLRGKPFAIEAENSILDISGFSKQYNCAFIWQKDGVKKLNLYLIINYFKGGKLRFKKIKPEAFEANRFYTVINKKSGEIVPMEVNFNFDDPNLIILPLAFGKRQGREFIWNDLLSLETGSLKLANGRVIEKTLYNRRTRQDEPALFVALTFERREVLDSSNIKPMNLIGVDRGENIPAVIALTDPEGCPLSRFKDSLGNPTHILRIGESYKEKQRTIQAKKEVEQRRAGGYSRKYASKAKNLADDMVRNTARDLLYYAVTQDAMLIFENLSRGFGRQGKRTFMAERQYTRMEDWLTAKLAYEGLPSKTYLSKTLAQYTSKTCSNCGFTITSADYDRVLEKLKKTATGWMTTINGKELKVEGQITYYNRYKRQNVVKDLSVELDRLSEESVNNDISSWTKGRSGEALSLLKKRFSHRPVQEKFVCLNCGFETHADEQAALNIARSWLFLRSQEYKKYQTNKTTGNTDKRAFVETWQSFYRKKLKEVWKPAV

SEQ ID NO: 48099 - protein, 978 aa, synthetic construct
  REGION 1..978: note = engineered CasX variant
QEIKRINKIRRRLVKDSNTKKAGKTGPMKTLLVRVMTPDLRERLENLRKKPENIPQPISNTSRANLNKLLTDYTEMKKAILHVYWEEFQKDPVGLMSRVAQPASKKIDQNKLKPEMDEKGNLTTAGFACSQCGQPLFVYKLEQVSEKGKAYTNYFGRCNVAEHEKLILLAQLKPEKDSDEAVTYSLGKFGQRALDFYSIHVTKESTHPVKPLAQIAGNRYASTPVGKALSGACMGTIASFLSKYQDIIIEHQKVVKGNQKRLESLRELAGKENLEYPSVTLPPQPHTKEGVDAYNEVIARVRMWVNLNLWQKLKLSRDDAKPLLRLKKFPSFPLVERQANEVDWWDMVCNVKKLINEKKEDGKVFWQNLAGYKRQEALRPYLSSEEDRKKGKKFARYQLGDLLLHLEKKHGEDWGKVYDEAWERIDKKVEGLSKHIKLEEERRSEDAQSKAALTDWLRAKASFVIEGLKEADKDEFCRCELKLQKWYGDLRGKPFAIEAENSILDISGFSKQYNCAFIWQKDGVKKLNLYLIINYFKGGKLRFKKIKPEAFEANRFYTVINKKSGEIVPMEVNFNFDDPNLIILPLAFGKRQGREFIWNDLLSLETGSLKLANGRVIEKTLYNRRTRQDEPALFVALTFERREVLDSSNIKPMNLIGVDRGENIPAVIALTDPEGCPLSRFKDSLGNPTHILRIGESYKEKQRTIQAKKEVEQRRAGGYSRKYASKAKNLADDMVRNTARDLLYYAVTQDAMLIFENLSRGFGRQGKRTFMAERQYTRMEDWLTAKLAYEGLPSKTYLSKTLAQYTSKTCSNCGFTITSADYDRVLEKLKKTATGWMTTINGKELKVEGQITYYNRYKRQNVVKDLSVELDRLSEESVNNDISSWTKGRSGEALSLLKKRFSHRPVQEKFVCLNCGFETHADEQAALNIARSWLFLRSQEYKKYQTNKTTGNTDKRAFVETWQSFYRKKLKEVWKPAV

SEQ ID NO: 48100 - protein, 978 aa, synthetic construct
  REGION 1..978: note = engineered CasX variant
QEIKRINKIRRRLVKDSNTKKAGKTGPMKTLLVRVMTPDLRERLENLRKKPENIPQPISNTSRANLNKLLTDYTEMKKAILHVYWEEFQKDPVGLMSRVAQPASKKIDQNKLKPEMDEKGNLTTAGFACSQCGQPLFVYKLEQVSEKGKAYTNYFGRCNVAEHEKLILLAQLKPEKDSDEAVTYSLGKFGQRALDFYSIHVTKESTHPVKPLAQIAGNRYASAPVGKALSGACMGTIASFLSKYQDIIIEHQKVVKGNQKRLESLRELAGKENLEYPSVTLPPQPHTKEGVDAYNEVIARVRMWVNLNLWQKLKLSRDDAKPLLRLKKFPSFPLVERQANEVDWWDMVCNVKKLINEKKEDGKVFWQNLAGYKRQEALRPYLSSEEDRKKGKKFARYQLGDLLLHLEKKHGEDWGKVYDEAWERIDKKVEGLSKHIKLEEERRSEDAQSKAALTDWLRAKASFVIEGLKEADKDEFCRCELKLQKWYGDLRGKPFAIEAENSILDISGFSKQYNCAFIWQKDGVKKLNLYLIINYFKGGKLRFKKIKPEAFEANRFYTVINKKSGEIVPMEVNFNFDDPNLIILPLAFGKRQGREFIWNDLLSLETGSLKLANGRVIEKTLYNRRTRQDEPALFVALTFERREVLDSSNIKPMNLIGVDRGENIPAVIALTDPEGCPLSRFKDSLGNPTHILRIGESYKEKQRTIQAKKEVEQRRAGGYSRKYASKAKNLADDMVRNTARDLLYYAVTQDAMLIFENLSRGFGRQGKRTFMAERQYTRMEDWLTAKLAYEGLPSKTYLSKTLAQYTSKTCSNCGFTITSADYDRVLEKLKKTATGWMTTINGKELKVEGQITYYNRYKRQNVVKDLSVELDRLSEESVNNDISSWTKGRSGEALSLLKKRFSHRPVQEKFVCLNCGFETHADEQAALNIARSWLFLRSQEYKKYQTNKTTGNTDKRAFVETWQSFYRKKLKEVWKPAV

SEQ ID NO: 48101 - protein, 978 aa, synthetic construct
  REGION 1..978: note = engineered CasX variant
QEIKRINKIRRRLVKDSNTKKAGKTGPMKTLLVRVMTPDLRERLENLRKKPENIPQPISNTSRANLNKLLTDYTEMKKAILHVYWEEFQKDPVGLMSRVAQPASKKIDQNKLKPEMDEKGNLTTAGFACSQCGQPLFVYKLEQVSEKGKAYTNYFGRCNVAEHEKLILLAQLKPEKDSDEAVTYSLGKFGQRALDFYSIHVTKESTHPVKPLAQIAGNRYASVPVGKALSGACMGTIASFLSKYQDIIIEHQKVVKGNQKRLESLRELAGKENLEYPSVTLPPQPHTKEGVDAYNEVIARVRMWVNLNLWQKLKLSRDDAKPLLRLKKFPSFPLVERQANEVDWWDMVCNVKKLINEKKEDGKVFWQNLAGYKRQEALRPYLSSEEDRKKGKKFARYQLGDLLLHLEKKHGEDWGKVYDEAWERIDKKVEGLSKHIKLEEERRSEDAQSKAALTDWLRAKASFVIEGLKEADKDEFCRCELKLQKWYGDLRGKPFAIEAENSILDISGFSKQYNCAFIWQKDGVKKLNLYLIINYFKGGKLRFKKIKPEAFEANRFYTVINKKSGEIVPMEVNFNFDDPNLIILPLAFGKRQGREFIWNDLLSLETGSLKLANGRVIEKTLYNRRTRQDEPALFVALTFERREVLDSSNIKPMNLIGVDRGENIPAVIALTDPEGCPLSRFKDSLGNPTHILRIGESYKEKQRTIQAKKEVEQRRAGGYSRKYASKAKNLADDMVRNTARDLLYYAVTQDAMLIFENLSRGFGRQGKRTFMAERQYTRMEDWLTAKLAYEGLPSKTYLSKTLAQYTSKTCSNCGFTITSADYDRVLEKLKKTATGWMTTINGKELKVEGQITYYNRYKRQNVVKDLSVELDRLSEESVNNDISSWTKGRSGEALSLLKKRFSHRPVQEKFVCLNCGFETHADEQAALNIARSWLFLRSQEYKKYQTNKTTGNTDKRAFVETWQSFYRKKLKEVWKPAV

SEQ ID NO: 48102 - protein, 978 aa, synthetic construct
  REGION 1..978: note = engineered CasX variant
QEIKRINKIRRRLVKDSNTKKAGKTGPMKTLLVRVMTPDLRERLENLRKKPENIPQPISNTSRANLNKLLTDYTEMKKAILHVYWEEFQKDPVGLMSRVAQPASKKIDQNKLKPEMDEKGNLTTAGFACSQCGQPLFVYKLEQVSEKGKAYTNYFGRCNVAEHEKLIKLAQLKPEKDSDEAVTYSLGKFGQRALDFYSIHVTKESTHPVKPLAQIAGNRYASGPVGKALSGACMGTIASFLSKYQDIIIEHQKVVKGNQKRLESLRELAGKENLEYPSVTLPPQPHTKEGVDAYNEVIARVRMWVNLNLWQKLKLSRDDAKPLLRLKKFPSFPLVERQANEVDWWDMVCNVKKLINEKKEDGKVFWQNLAGYKRQEALRPYLSSEEDRKKGKKFARYQLGDLLLHLEKKHGEDWGKVYDEAWERIDKKVEGLSKHIKLEEERRSEDAQSKAALTDWLRAKASFVIEGLKEADKDEFCRCELKLQKWYGDLRGKPFAIEAENSILDISGFSKQYNCAFIWQKDGVKKLNLYLIINYFKGGKLRFKKIKPEAFEANRFYTVINKKSGEIVPMEVNFNFDDPNLIILPLAFGKRQGREFIWNDLLSLETGSLKLANGRVIEKTLYNRRTRQDEPALFVALTFERREVLDSSNIKPMNLIGVDRGENIPAVIALTDPEGCPLSRFKDSLGNPTHILRIGESYKEKQRTIQAKKEVEQRRAGGYSRKYASKAKNLADDMVRNTARDLLYYAVTQDAMLIFENLSRGFGRQGKRTFMAERQYTRMEDWLTAKLAYEGLPSKTYLSKTLAQYTSKTCSNCGFTITSADYDRVLEKLKKTATGWMTTINGKELKVEGQITYYNRYKRQNVVKDLSVELDRLSEESVNNDISSWTKGRSGEALSLLKKRFSHRPVQEKFVCLNCGFETHADEQAALNIARSWLFLRSQEYKKYQTNKTTGNTDKRAFVETWQSFYRKKLKEVWKPAV

SEQ ID NO: 48103 - protein, 977 aa, synthetic construct
  REGION 1..977: note = engineered CasX variant
QEIKRINKIRRRLVKDSNTKKAGKTGPMKTLLVRVMTPDLRERLENLRKKPENIPQPISNTSRANLNKLLTDYTEMKKAILHVYWEEFQKDPVGLMSRVAQPASKKIDQNKLKPEMDEKGNLTTAGFACSQCGQPLFVYKLEQVSEKGKAYTNYFGRCNVAEHEKLILLAQLKPEKDSDEAVTYSLGKFGQRALDFYSIHVTKESTHPVKPLAQIAGNRYASPVGKALSGACMGTIASFLSKYQDIIIEHQKVVKGNQKRLESLRELAGKENLEYPSVTLPPQPHTKEGVDAYNEVIARVRMWVNLNLWQKLKLSRDDAKPLLRLKKFPSFPLVERQANEVDWWDMVCNVKKLINEKKEDGKVFWQNLAGYKRQEALRPYLSSEEDRKKGKKFARYQLGDLLLHLEKKHGEDWGKVYDEAWERIDKKVEGLSKHIKLEEERRSEDAQSKAALTDWLRAKASFVIEGLKEADKDEFCRCELKLQKWYGDLRGKPFAIEAENSILDISGFSKQYNCAFIWQKDGVKKLNLYLIINYFKGGKLRFKKIKPEAFEANRFYTVINKKSGEIVPMEVNFNFDDPNLIILPLAFGKRQGREFIWNDLLSLETGSLKLANGRVIEKTLYNRRTRQDEPALFVALTFERREVLDSSNIKPMNLIGVDRGENIPAVIALTDPEGCPLSRFKDSLGNPTHILRIGESYKEKQRTIQAKKEVEQRRAGGYSRKYASKAKNLADDMVRNTARDLLYYAVTQDAMLIFENLSRGFGRQGKRTFMAERQYTRMEDWLTAKLAYEGLPSKTYLSKTLAQYTSKTCSNCGFTITSADYDRVLEKLKKTATGWMTTINGKELKVEGQITYYNRYKRQNVVKDLSVELDRLSEESVNNDISSWTKGRSGEALSLLKKRFSHRPVQEKFVCLNCGFETHADEQAALNIARSWLFLRSQEYKKYQTNKTTGNTDKRAFVETWQSFYRKKLKEVWKPAV

SEQ ID NO: 48104 - protein, 979 aa, synthetic construct
  REGION 1..979: note = engineered CasX variant
QEIKRINKIRRRLVKDSNTKKAGKTGPMKTLLVRVMTPDLRERLENLRKKPENIPQPISNTSRANLNKLLTDYTEMKKAILHVYWEEFQKDPVGLMSRVAQPASKKIDQNKLKPEMDEKGNLTTAGFACSQCGQPLFVYKLEQVSEKGKAYTNYFGRCNVAEHEKLILLAQLKPEKDSDEAVTYSLGKFGQRALDFYSIHVTKESTHPVKPLAQIAGNRYASYPVGKALSDACMGTIASFLSKYQDIIIEHQKVVKGNQKRLESLRELAGKENLEYPSVTLPPQPHTKEGVDAYNEVIARVRMWVNLNLWQKLKLSRDDAKPLLRLKKNFPSFPLVERQANEVDWWDMVCNVKKLINEKKEDGKVFWQNLAGYKRQEALRPYLSSEEDRKKGKKFARYQLGDLLLHLEKKHGEDWGKVYDEAWERIDKKVEGLSKHIKLEEERRSEDAQSKAALTDWLRAKASFVIEGLKEADKDEFCRCELKLQKWYGDLRGKPFAIEAENSILDISGFSKQYNCAFIWQKDGVKKLNLYLIINYFKGGKLRFKKIKPEAFEANRFYTVINKKSGEIVPMEVNFNFDDPNLIILPLAFGKRQGREFIWNDLLSLETGSLKLANGRVIEKTLYNRRTRQDEPALFVALTFERREVLDSSNIKPMNLIGVDRGENIPAVIALTDPEGCPLSRFKDSLGNPTHILRIGESYKEKQRTIQAKKEVEQRRAGGYSRKYASKAKNLADDMVRNTARDLLYYAVTQDAMLIFENLSRGFGRQGKRTFMAERQYTRMEDWLTAKLAYEGLPSKTYLSKTLAQYTSKTCSNCGFTITSADYDRVLEKLKKTATGWMTTINGKELKVEGQITYYNRYKRQNVVKDLSVELDRLSEESVNNDISSWTKGRSGEALSLLKKRFSHRPVQEKFVCLNCGFETHADEQAALNIARSWLFLRSQEYKKYQTNKTTGNTDKRAFVETWQSFYRKKLKEVWKPAV

SEQ ID NO: 48105 - protein, 979 aa, synthetic construct
  REGION 1..979: note = engineered CasX variant
QEIKRINKIRRRLVKDSNTKKAGKTGPMKTLLVRVMTPDLRERLENLRKKPENIPQPISNTSRANLNKLLTDYTEMKKAILHVYWEEFQKDPVGLMSRVAQPASKKIDQNKLKPEMDEKGNLTTAGFACSQCGQPLFVYKLEQVSEKGKAYTNYFGRCNVAEHEKLILLAQLKPEKDSDEAVTYSLGKFGQRALDFYSIHVTKESTHPVKPLAQIAGNRYASHPVGKALSDACMGTIASFLSKYQDIIIEHQKVVKGNQKRLESLRELAGKENLEYPSVTLPPQPHTKEGVDAYNEVIARVRMWVNLNLWQKLKLSRDDAKPLLRLKKNFPSFPLVERQANEVDWWDMVCNVKKLINEKKEDGKVFWQNLAGYKRQEALRPYLSSEEDRKKGKKFARYQLGDLLLHLEKKHGEDWGKVYDEAWERIDKKVEGLSKHIKLEEERRSEDAQSKAALTDWLRAKASFVIEGLKEADKDEFCRCELKLQKWYGDLRGKPFAIEAENSILDISGFSKQYNCAFIWQKDGVKKLNLYLIINYFKGGKLRFKKIKPEAFEANRFYTVINKKSGEIVPMEVNFNFDDPNLIILPLAFGKRQGREFIWNDLLSLETGSLKLANGRVIEKTLYNRRTRQDEPALFVALTFERREVLDSSNIKPMNLIGVDRGENIPAVIALTDPEGCPLSRFKDSLGNPTHILRIGESYKEKQRTIQAKKEVEQRRAGGYSRKYASKAKNLADDMVRNTARDLLYYAVTQDAMLIFENLSRGFGRQGKRTFMAERQYTRMEDWLTAKLAYEGLPSKTYLSKTLAQYTSKTCSNCGFTITSADYDRVLEKLKKTATGWMTTINGKELKVEGQITYYNRYKRQNVVKDLSVELDRLSEESVNNDISSWTKGRSGEALSLLKKRFSHRPVQEKFVCLNCGFETHADEQAALNIARSWLFLRSQEYKKYQTNKTTGNTDKRAFVETWQSFYRKKLKEVWKPAV

SEQ ID NO: 48106 - protein, 979 aa, synthetic construct
  REGION 1..979: note = engineered CasX variant
QEIKRINKIRRRLVKDSNTKKAGKTGPMKTLLVRVMTPDLRERLENLRKKPENIPQPISNTSRANLNKLLTDYTEMKKAILHVYWEEFQKDPVGLMSRVAQPASKKIDQNKLKPEMDEKGNLTTAGFACSQCGQPLFVYKLEQVSEKGKAYTNYFGRCNVAEHEKLILLAQLKPEKDSDEAVTYSLGKFGQRALDFYSIHVTKESTHPVKPLAQIAGNRYASSPVGKALSDACMGTIASFLSKYQDIIIEHQKVVKGNQKRLESLRELAGKENLEYPSVTLPPQPHTKEGVDAYNEVIARVRMWVNLNLWQKLKLSRDDAKPLLRLKKNFPSFPLVERQANEVDWWDMVCNVKKLINEKKEDGKVFWQNLAGYKRQEALRPYLSSEEDRKKGKKFARYQLGDLLLHLEKKHGEDWGKVYDEAWERIDKKVEGLSKHIKLEEERRSEDAQSKAALTDWLRAKASFVIEGLKEADKDEFCRCELKLQKWYGDLRGKPFAIEAENSILDISGFSKQYNCAFIWQKDGVKKLNLYLIINYFKGGKLRFKKIKPEAFEANRFYTVINKKSGEIVPMEVNFNFDDPNLIILPLAFGKRQGREFIWNDLLSLETGSLKLANGRVIEKTLYNRRTRQDEPALFVALTFERREVLDSSNIKPMNLIGVDRGENIPAVIALTDPEGCPLSRFKDSLGNPTHILRIGESYKEKQRTIQAKKEVEQRRAGGYSRKYASKAKNLADDMVRNTARDLLYYAVTQDAMLIFENLSRGFGRQGKRTFMAERQYTRMEDWLTAKLAYEGLPSKTYLSKTLAQYTSKTCSNCGFTITSADYDRVLEKLKKTATGWMTTINGKELKVEGQITYYNRYKRQNVVKDLSVELDRLSEESVNNDISSWTKGRSGEALSLLKKRFSHRPVQEKFVCLNCGFETHADEQAALNIARSWLFLRSQEYKKYQTNKTTGNTDKRAFVETWQSFYRKKLKEVWKPAV

SEQ ID NO: 48107 - protein, 979 aa, synthetic construct
  REGION 1..979: note = engineered CasX variant
QEIKRINKIRRRLVKDSNTKKAGKTGPMKTLLVRVMTPDLRERLENLRKKPENIPQPISNTSRANLNKLLTDYTEMKKAILHVYWEEFQKDPVGLMSRVAQPASKKIDQNKLKPEMDEKGNLTTAGFACSQCGQPLFVYKLEQVSEKGKAYTNYFGRCNVAEHEKLILLAQLKPEKDSDEAVTYSLGKFGQRALDFYSIHVTKESTHPVKPLAQIAGNRYASTPVGKALSDACMGTIASFLSKYQDIIIEHQKVVKGNQKRLESLRELAGKENLEYPSVTLPPQPHTKEGVDAYNEVIARVRMWVNLNLWQKLKLSRDDAKPLLRLKKNFPSFPLVERQANEVDWWDMVCNVKKLINEKKEDGKVFWQNLAGYKRQEALRPYLSSEEDRKKGKKFARYQLGDLLLHLEKKHGEDWGKVYDEAWERIDKKVEGLSKHIKLEEERRSEDAQSKAALTDWLRAKASFVIEGLKEADKDEFCRCELKLQKWYGDLRGKPFAIEAENSILDISGFSKQYNCAFIWQKDGVKKLNLYLIINYFKGGKLRFKKIKPEAFEANRFYTVINKKSGEIVPMEVNFNFDDPNLIILPLAFGKRQGREFIWNDLLSLETGSLKLANGRVIEKTLYNRRTRQDEPALFVALTFERREVLDSSNIKPMNLIGVDRGENIPAVIALTDPEGCPLSRFKDSLGNPTHILRIGESYKEKQRTIQAKKEVEQRRAGGYSRKYASKAKNLADDMVRNTARDLLYYAVTQDAMLIFENLSRGFGRQGKRTFMAERQYTRMEDWLTAKLAYEGLPSKTYLSKTLAQYTSKTCSNCGFTITSADYDRVLEKLKKTATGWMTTINGKELKVEGQITYYNRYKRQNVVKDLSVELDRLSEESVNNDISSWTKGRSGEALSLLKKRFSHRPVQEKFVCLNCGFETHADEQAALNIARSWLFLRSQEYKKYQTNKTTGNTDKRAFVETWQSFYRKKLKEVWKPAV

SEQ ID NO: 48108 - protein, 979 aa, synthetic construct
  REGION 1..979: note = engineered CasX variant
QEIKRINKIRRRLVKDSNTKKAGKTGPMKTLLVRVMTPDLRERLENLRKKPENIPQPISNTSRANLNKLLTDYTEMKKAILHVYWEEFQKDPVGLMSRVAQPASKKIDQNKLKPEMDEKGNLTTAGFACSQCGQPLFVYKLEQVSEKGKAYTNYFGRCNVAEHEKLILLAQLKPEKDSDEAVTYSLGKFGQRALDFYSIHVTKESTHPVKPLAQIAGNRYASAPVGKALSDACMGTIASFLSKYQDIIIEHQKVVKGNQKRLESLRELAGKENLEYPSVTLPPQPHTKEGVDAYNEVIARVRMWVNLNLWQKLKLSRDDAKPLLRLKKNFPSFPLVERQANEVDWWDMVCNVKKLINEKKEDGKVFWQNLAGYKRQEALRPYLSSEEDRKKGKKFARYQLGDLLLHLEKKHGEDWGKVYDEAWERIDKKVEGLSKHIKLEEERRSEDAQSKAALTDWLRAKASFVIEGLKEADKDEFCRCELKLQKWYGDLRGKPFAIEAENSILDISGFSKQYNCAFIWQKDGVKKLNLYLIINYFKGGKLRFKKIKPEAFEANRFYTVINKKSGEIVPMEVNFNFDDPNLIILPLAFGKRQGREFIWNDLLSLETGSLKLANGRVIEKTLYNRRTRQDEPALFVALTFERREVLDSSNIKPMNLIGVDRGENIPAVIALTDPEGCPLSRFKDSLGNPTHILRIGESYKEKQRTIQAKKEVEQRRAGGYSRKYASKAKNLADDMVRNTARDLLYYAVTQDAMLIFENLSRGFGRQGKRTFMAERQYTRMEDWLTAKLAYEGLPSKTYLSKTLAQYTSKTCSNCGFTITSADYDRVLEKLKKTATGWMTTINGKELKVEGQITYYNRYKRQNVVKDLSVELDRLSEESVNNDISSWTKGRSGEALSLLKKRFSHRPVQEKFVCLNCGFETHADEQAALNIARSWLFLRSQEYKKYQTNKTTGNTDKRAFVETWQSFYRKKLKEVWKPAV

SEQ ID NO: 48109 - protein, 979 aa, synthetic construct
  REGION 1..979: note = engineered CasX variant
QEIKRINKIRRRLVKDSNTKKAGKTGPMKTLLVRVMTPDLRERLENLRKKPENIPQPISNTSRANLNKLLTDYTEMKKAILHVYWEEFQKDPVGLMSRVAQPASKKIDQNKLKPEMDEKGNLTTAGFACSQCGQPLFVYKLEQVSEKGKAYTNYFGRCNVAEHEKLILLAQLKPEKDSDEAVTYSLGKFGQRALDFYSIHVTKESTHPVKPLAQIAGNRYASVPVGKALSDACMGTIASFLSKYQDIIIEHQKVVKGNQKRLESLRELAGKENLEYPSVTLPPQPHTKEGVDAYNEVIARVRMWVNLNLWQKLKLSRDDAKPLLRLKKNFPSFPLVERQANEVDWWDMVCNVKKLINEKKEDGKVFWQNLAGYKRQEALRPYLSSEEDRKKGKKFARYQLGDLLLHLEKKHGEDWGKVYDEAWERIDKKVEGLSKHIKLEEERRSEDAQSKAALTDWLRAKASFVIEGLKEADKDEFCRCELKLQKWYGDLRGKPFAIEAENSILDISGFSKQYNCAFIWQKDGVKKLNLYLIINYFKGGKLRFKKIKPEAFEANRFYTVINKKSGEIVPMEVNFNFDDPNLIILPLAFGKRQGREFIWNDLLSLETGSLKLANGRVIEKTLYNRRTRQDEPALFVALTFERREVLDSSNIKPMNLIGVDRGENIPAVIALTDPEGCPLSRFKDSLGNPTHILRIGESYKEKQRTIQAKKEVEQRRAGGYSRKYASKAKNLADDMVRNTARDLLYYAVTQDAMLIFENLSRGFGRQGKRTFMAERQYTRMEDWLTAKLAYEGLPSKTYLSKTLAQYTSKTCSNCGFTITSADYDRVLEKLKKTATGWMTTINGKELKVEGQITYYNRYKRQNVVKDLSVELDRLSEESVNNDISSWTKGRSGEALSLLKKRFSHRPVQEKFVCLNCGFETHADEQAALNIARSWLFLRSQEYKKYQTNKTTGNTDKRAFVETWQSFYRKKLKEVWKPAV

SEQ ID NO: 48110 - protein, 979 aa, synthetic construct
  REGION 1..979: note = engineered CasX variant
QEIKRINKIRRRLVKDSNTKKAGKTGPMKTLLVRVMTPDLRERLENLRKKPENIPQPISNTSRANLNKLLTDYTEMKKAILHVYWEEFQKDPVGLMSRVAQPASKKIDQNKLKPEMDEKGNLTTAGFACSQCGQPLFVYKLEQVSEKGKAYTNYFGRCNVAEHEKLIKLAQLKPEKDSDEAVTYSLGKFGQRALDFYSIHVTKESTHPVKPLAQIAGNRYASGPVGKALSDACMGTIASFLSKYQDIIIEHQKVVKGNQKRLESLRELAGKENLEYPSVTLPPQPHTKEGVDAYNEVIARVRMWVNLNLWQKLKLSRDDAKPLLRLKKNFPSFPLVERQANEVDWWDMVCNVKKLINEKKEDGKVFWQNLAGYKRQEALRPYLSSEEDRKKGKKFARYQLGDLLLHLEKKHGEDWGKVYDEAWERIDKKVEGLSKHIKLEEERRSEDAQSKAALTDWLRAKASFVIEGLKEADKDEFCRCELKLQKWYGDLRGKPFAIEAENSILDISGFSKQYNCAFIWQKDGVKKLNLYLIINYFKGGKLRFKKIKPEAFEANRFYTVINKKSGEIVPMEVNFNFDDPNLIILPLAFGKRQGREFIWNDLLSLETGSLKLANGRVIEKTLYNRRTRQDEPALFVALTFERREVLDSSNIKPMNLIGVDRGENIPAVIALTDPEGCPLSRFKDSLGNPTHILRIGESYKEKQRTIQAKKEVEQRRAGGYSRKYASKAKNLADDMVRNTARDLLYYAVTQDAMLIFENLSRGFGRQGKRTFMAERQYTRMEDWLTAKLAYEGLPSKTYLSKTLAQYTSKTCSNCGFTITSADYDRVLEKLKKTATGWMTTINGKELKVEGQITYYNRYKRQNVVKDLSVELDRLSEESVNNDISSWTKGRSGEALSLLKKRFSHRPVQEKFVCLNCGFETHADEQAALNIARSWLFLRSQEYKKYQTNKTTGNTDKRAFVETWQSFYRKKLKEVWKPAV

SEQ ID NO: 48111 - protein, 978 aa, synthetic construct
  REGION 1..978: note = engineered CasX variant
QEIKRINKIRRRLVKDSNTKKAGKTGPMKTLLVRVMTPDLRERLENLRKKPENIPQPISNTSRANLNKLLTDYTEMKKAILHVYWEEFQKDPVGLMSRVAQPASKKIDQNKLKPEMDEKGNLTTAGFACSQCGQPLFVYKLEQVSEKGKAYTNYFGRCNVAEHEKLILLAQLKPEKDSDEAVTYSLGKFGQRALDFYSIHVTKESTHPVKPLAQIAGNRYASPVGKALSDACMGTIASFLSKYQDIIIEHQKVVKGNQKRLESLRELAGKENLEYPSVTLPPQPHTKEGVDAYNEVIARVRMWVNLNLWQKLKLSRDDAKPLLRLKKNFPSFPLVERQANEVDWWDMVCNVKKLINEKKEDGKVFWQNLAGYKRQEALRPYLSSEEDRKKGKKFARYQLGDLLLHLEKKHGEDWGKVYDEAWERIDKKVEGLSKHIKLEEERRSEDAQSKAALTDWLRAKASFVIEGLKEADKDEFCRCELKLQKWYGDLRGKPFAIEAENSILDISGFSKQYNCAFIWQKDGVKKLNLYLIINYFKGGKLRFKKIKPEAFEANRFYTVINKKSGEIVPMEVNFNFDDPNLIILPLAFGKRQGREFIWNDLLSLETGSLKLANGRVIEKTLYNRRTRQDEPALFVALTFERREVLDSSNIKPMNLIGVDRGENIPAVIALTDPEGCPLSRFKDSLGNPTHILRIGESYKEKQRTIQAKKEVEQRRAGGYSRKYASKAKNLADDMVRNTARDLLYYAVTQDAMLIFENLSRGFGRQGKRTFMAERQYTRMEDWLTAKLAYEGLPSKTYLSKTLAQYTSKTCSNCGFTITSADYDRVLEKLKKTATGWMTTINGKELKVEGQITYYNRYKRQNVVKDLSVELDRLSEESVNNDISSWTKGRSGEALSLLKKRFSHRPVQEKFVCLNCGFETHADEQAALNIARSWLFLRSQEYKKYQTNKTTGNTDKRAFVETWQSFYRKKLKEVWKPAV

SEQ ID NO: 48112 - protein, 978 aa, synthetic construct
  REGION 1..978: note = engineered CasX variant
QEIKRINKIRRRLVKDSNTKKAGKTGPMKTLLVRVMTPDLRERLENLRKKPENIPQPISNTSRANLNKLLTDYTEMKKAILHVYWEEFQKDPVGLMSRVAQPASKKIDQNKLKPEMDEKGNLTTAGFACSQCGQPLFVYKLEQVSEKGKAYTNYFGRCNVAEHEKLILLAQLKPEKDSDEAVTYSLGKFGQRALDFYSIHVTKESTHPVKPLAQIAGNRYASYPVGKALSDACMGTIASFLSKYQDIIIEHQKVVKGNQKRLESLRELAGKENLEYPSVTLPPQPHTKEGVDAYNEVIARVRMWVNLNLWQKLKLSRDDAKPLLRLKKFPSFPLVERQANEVDWWDMVCNVKKLINEKKEDGKVFWQNLAGYKRQEALRPYLSSEEDRKKGKKFARYQLGDLLNHLEKKHGEDWGKVYDEAWERIDKKVEGLSKHIKLEEERRSEDAQSKAALTDWLRAKASFVIEGLKEADKDEFCRCELKLQKWYGDLRGKPFAIEAENSILDISGFSKQYNCAFIWQKDGVKKLNLYLIINYFKGGKLRFKKIKPEAFEANRFYTVINKKSGEIVPMEVNFNFDDPNLIILPLAFGKRQGREFIWNDLLSLETGSLKLANGRVIEKTLYNRRTRQDEPALFVALTFERREVLDSSNIKPMNLIGVDRGENIPAVIALTDPEGCPLSRFKDSLGNPTHILRIGESYKEKQRTIQAKKEVEQRRAGGYSRKYASKAKNLADDMVRNTARDLLYYAVTQDAMLIFENLSRGFGRQGKRTFMAERQYTRMEDWLTAKLAYEGLPSKTYLSKTLAQYTSKTCSNCGFTITSADYDRVLEKLKKTATGWMTTINGKELKVEGQITYYNRYKRQNVVKDLSVELDRLSEESVNNDISSWTKGRSGEALSLLKKRFSHRPVQEKFVCLNCGFETHADEQAALNIARSWLFLRSQEYKKYQTNKTTGNTDKRAFVETWQSFYRKKLKEVWKPAV

SEQ ID NO: 48113 - protein, 978 aa, synthetic construct
  REGION 1..978: note = engineered CasX variant
QEIKRINKIRRRLVKDSNTKKAGKTGPMKTLLVRVMTPDLRERLENLRKKPENIPQPISNTSRANLNKLLTDYTEMKKAILHVYWEEFQKDPVGLMSRVAQPASKKIDQNKLKPEMDEKGNLTTAGFACSQCGQPLFVYKLEQVSEKGKAYTNYFGRCNVAEHEKLILLAQLKPEKDSDEAVTYSLGKFGQRALDFYSIHVTKESTHPVKPLAQIAGNRYASHPVGKALSDACMGTIASFLSKYQDIIIEHQKVVKGNQKRLESLRELAGKENLEYPSVTLPPQPHTKEGVDAYNEVIARVRMWVNLNLWQKLKLSRDDAKPLLRLKKFPSFPLVERQANEVDWWDMVCNVKKLINEKKEDGKVFWQNLAGYKRQEALRPYLSSEEDRKKGKKFARYQLGDLLNHLEKKHGEDWGKVYDEAWERIDKKVEGLSKHIKLEEERRSEDAQSKAALTDWLRAKASFVIEGLKEADKDEFCRCELKLQKWYGDLRGKPFAIEAENSILDISGFSKQYNCAFIWQKDGVKKLNLYLIINYFKGGKLRFKKIKPEAFEANRFYTVINKKSGEIVPMEVNFNFDDPNLIILPLAFGKRQGREFIWNDLLSLETGSLKLANGRVIEKTLYNRRTRQDEPALFVALTFERREVLDSSNIKPMNLIGVDRGENIPAVIALTDPEGCPLSRFKDSLGNPTHILRIGESYKEKQRTIQAKKEVEQRRAGGYSRKYASKAKNLADDMVRNTARDLLYYAVTQDAMLIFENLSRGFGRQGKRTFMAERQYTRMEDWLTAKLAYEGLPSKTYLSKTLAQYTSKTCSNCGFTITSADYDRVLEKLKKTATGWMTTINGKELKVEGQITYYNRYKRQNVVKDLSVELDRLSEESVNNDISSWTKGRSGEALSLLKKRFSHRPVQEKFVCLNCGFETHADEQAALNIARSWLFLRSQEYKKYQTNKTTGNTDKRAFVETWQSFYRKKLKEVWKPAV

SEQ ID NO: 48114 - protein, 978 aa, synthetic construct
  REGION 1..978: note = engineered CasX variant
QEIKRINKIRRRLVKDSNTKKAGKTGPMKTLLVRVMTPDLRERLENLRKKPENIPQPISNTSRANLNKLLTDYTEMKKAILHVYWEEFQKDPVGLMSRVAQPASKKIDQNKLKPEMDEKGNLTTAGFACSQCGQPLFVYKLEQVSEKGKAYTNYFGRCNVAEHEKLILLAQLKPEKDSDEAVTYSLGKFGQRALDFYSIHVTKESTHPVKPLAQIAGNRYASSPVGKALSDACMGTIASFLSKYQDIIIEHQKVVKGNQKRLESLRELAGKENLEYPSVTLPPQPHTKEGVDAYNEVIARVRMWVNLNLWQKLKLSRDDAKPLLRLKKFPSFPLVERQANEVDWWDMVCNVKKLINEKKEDGKVFWQNLAGYKRQEALRPYLSSEEDRKKGKKFARYQLGDLLNHLEKKHGEDWGKVYDEAWERIDKKVEGLSKHIKLEEERRSEDAQSKAALTDWLRAKASFVIEGLKEADKDEFCRCELKLQKWYGDLRGKPFAIEAENSILDISGFSKQYNCAFIWQKDGVKKLNLYLIINYFKGGKLRFKKIKPEAFEANRFYTVINKKSGEIVPMEVNFNFDDPNLIILPLAFGKRQGREFIWNDLLSLETGSLKLANGRVIEKTLYNRRTRQDEPALFVALTFERREVLDSSNIKPMNLIGVDRGENIPAVIALTDPEGCPLSRFKDSLGNPTHILRIGESYKEKQRTIQAKKEVEQRRAGGYSRKYASKAKNLADDMVRNTARDLLYYAVTQDAMLIFENLSRGFGRQGKRTFMAERQYTRMEDWLTAKLAYEGLPSKTYLSKTLAQYTSKTCSNCGFTITSADYDRVLEKLKKTATGWMTTINGKELKVEGQITYYNRYKRQNVVKDLSVELDRLSEESVNNDISSWTKGRSGEALSLLKKRFSHRPVQEKFVCLNCGFETHADEQAALNIARSWLFLRSQEYKKYQTNKTTGNTDKRAFVETWQSFYRKKLKEVWKPAV

SEQ ID NO: 48115 - protein, 978 aa, synthetic construct
  REGION 1..978: note = engineered CasX variant
QEIKRINKIRRRLVKDSNTKKAGKTGPMKTLLVRVMTPDLRERLENLRKKPENIPQPISNTSRANLNKLLTDYTEMKKAILHVYWEEFQKDPVGLMSRVAQPASKKIDQNKLKPEMDEKGNLTTAGFACSQCGQPLFVYKLEQVSEKGKAYTNYFGRCNVAEHEKLILLAQLKPEKDSDEAVTYSLGKFGQRALDFYSIHVTKESTHPVKPLAQIAGNRYASTPVGKALSDACMGTIASFLSKYQDIIIEHQKVVKGNQKRLESLRELAGKENLEYPSVTLPPQPHTKEGVDAYNEVIARVRMWVNLNLWQKLKLSRDDAKPLLRLKKFPSFPLVERQANEVDWWDMVCNVKKLINEKKEDGKVFWQNLAGYKRQEALRPYLSSEEDRKKGKKFARYQLGDLLNHLEKKHGEDWGKVYDEAWERIDKKVEGLSKHIKLEEERRSEDAQSKAALTDWLRAKASFVIEGLKEADKDEFCRCELKLQKWYGDLRGKPFAIEAENSILDISGFSKQYNCAFIWQKDGVKKLNLYLIINYFKGGKLRFKKIKPEAFEANRFYTVINKKSGEIVPMEVNFNFDDPNLIILPLAFGKRQGREFIWNDLLSLETGSLKLANGRVIEKTLYNRRTRQDEPALFVALTFERREVLDSSNIKPMNLIGVDRGENIPAVIALTDPEGCPLSRFKDSLGNPTHILRIGESYKEKQRTIQAKKEVEQRRAGGYSRKYASKAKNLADDMVRNTARDLLYYAVTQDAMLIFENLSRGFGRQGKRTFMAERQYTRMEDWLTAKLAYEGLPSKTYLSKTLAQYTSKTCSNCGFTITSADYDRVLEKLKKTATGWMTTINGKELKVEGQITYYNRYKRQNVVKDLSVELDRLSEESVNNDISSWTKGRSGEALSLLKKRFSHRPVQEKFVCLNCGFETHADEQAALNIARSWLFLRSQEYKKYQTNKTTGNTDKRAFVETWQSFYRKKLKEVWKPAV

SEQ ID NO: 48116 - protein, 978 aa, synthetic construct
  REGION 1..978: note = engineered CasX variant
QEIKRINKIRRRLVKDSNTKKAGKTGPMKTLLVRVMTPDLRERLENLRKKPENIPQPISNTSRANLNKLLTDYTEMKKAILHVYWEEFQKDPVGLMSRVAQPASKKIDQNKLKPEMDEKGNLTTAGFACSQCGQPLFVYKLEQVSEKGKAYTNYFGRCNVAEHEKLILLAQLKPEKDSDEAVTYSLGKFGQRALDFYSIHVTKESTHPVKPLAQIAGNRYASAPVGKALSDACMGTIASFLSKYQDIIIEHQKVVKGNQKRLESLRELAGKENLEYPSVTLPPQPHTKEGVDAYNEVIARVRMWVNLNLWQKLKLSRDDAKPLLRLKKFPSFPLVERQANEVDWWDMVCNVKKLINEKKEDGKVFWQNLAGYKRQEALRPYLSSEEDRKKGKKFARYQLGDLLNHLEKKHGEDWGKVYDEAWERIDKKVEGLSKHIKLEEERRSEDAQSKAALTDWLRAKASFVIEGLKEADKDEFCRCELKLQKWYGDLRGKPFAIEAENSILDISGFSKQYNCAFIWQKDGVKKLNLYLIINYFKGGKLRFKKIKPEAFEANRFYTVINKKSGEIVPMEVNFNFDDPNLIILPLAFGKRQGREFIWNDLLSLETGSLKLANGRVIEKTLYNRRTRQDEPALFVALTFERREVLDSSNIKPMNLIGVDRGENIPAVIALTDPEGCPLSRFKDSLGNPTHILRIGESYKEKQRTIQAKKEVEQRRAGGYSRKYASKAKNLADDMVRNTARDLLYYAVTQDAMLIFENLSRGFGRQGKRTFMAERQYTRMEDWLTAKLAYEGLPSKTYLSKTLAQYTSKTCSNCGFTITSADYDRVLEKLKKTATGWMTTINGKELKVEGQITYYNRYKRQNVVKDLSVELDRLSEESVNNDISSWTKGRSGEALSLLKKRFSHRPVQEKFVCLNCGFETHADEQAALNIARSWLFLRSQEYKKYQTNKTTGNTDKRAFVETWQSFYRKKLKEVWKPAV

SEQ ID NO: 48117 - protein, 978 aa, synthetic construct
  REGION 1..978: note = engineered CasX variant
QEIKRINKIRRRLVKDSNTKKAGKTGPMKTLLVRVMTPDLRERLENLRKKPENIPQPISNTSRANLNKLLTDYTEMKKAILHVYWEEFQKDPVGLMSRVAQPASKKIDQNKLKPEMDEKGNLTTAGFACSQCGQPLFVYKLEQVSEKGKAYTNYFGRCNVAEHEKLILLAQLKPEKDSDEAVTYSLGKFGQRALDFYSIHVTKESTHPVKPLAQIAGNRYASVPVGKALSDACMGTIASFLSKYQDIIIEHQKVVKGNQKRLESLRELAGKENLEYPSVTLPPQPHTKEGVDAYNEVIARVRMWVNLNLWQKLKLSRDDAKPLLRLKKFPSFPLVERQANEVDWWDMVCNVKKLINEKKEDGKVFWQNLAGYKRQEALRPYLSSEEDRKKGKKFARYQLGDLLNHLEKKHGEDWGKVYDEAWERIDKKVEGLSKHIKLEEERRSEDAQSKAALTDWLRAKASFVIEGLKEADKDEFCRCELKLQKWYGDLRGKPFAIEAENSILDISGFSKQYNCAFIWQKDGVKKLNLYLIINYFKGGKLRFKKIKPEAFEANRFYTVINKKSGEIVPMEVNFNFDDPNLIILPLAFGKRQGREFIWNDLLSLETGSLKLANGRVIEKTLYNRRTRQDEPALFVALTFERREVLDSSNIKPMNLIGVDRGENIPAVIALTDPEGCPLSRFKDSLGNPTHILRIGESYKEKQRTIQAKKEVEQRRAGGYSRKYASKAKNLADDMVRNTARDLLYYAVTQDAMLIFENLSRGFGRQGKRTFMAERQYTRMEDWLTAKLAYEGLPSKTYLSKTLAQYTSKTCSNCGFTITSADYDRVLEKLKKTATGWMTTINGKELKVEGQITYYNRYKRQNVVKDLSVELDRLSEESVNNDISSWTKGRSGEALSLLKKRFSHRPVQEKFVCLNCGFETHADEQAALNIARSWLFLRSQEYKKYQTNKTTGNTDKRAFVETWQSFYRKKLKEVWKPAV

SEQ ID NO: 48118 - protein, 978 aa, synthetic construct
  REGION 1..978: note = engineered CasX variant
QEIKRINKIRRRLVKDSNTKKAGKTGPMKTLLVRVMTPDLRERLENLRKKPENIPQPISNTSRANLNKLLTDYTEMKKAILHVYWEEFQKDPVGLMSRVAQPASKKIDQNKLKPEMDEKGNLTTAGFACSQCGQPLFVYKLEQVSEKGKAYTNYFGRCNVAEHEKLIKLAQLKPEKDSDEAVTYSLGKFGQRALDFYSIHVTKESTHPVKPLAQIAGNRYASGPVGKALSDACMGTIASFLSKYQDIIIEHQKVVKGNQKRLESLRELAGKENLEYPSVTLPPQPHTKEGVDAYNEVIARVRMWVNLNLWQKLKLSRDDAKPLLRLKKFPSFPLVERQANEVDWWDMVCNVKKLINEKKEDGKVFWQNLAGYKRQEALRPYLSSEEDRKKGKKFARYQLGDLLNHLEKKHGEDWGKVYDEAWERIDKKVEGLSKHIKLEEERRSEDAQSKAALTDWLRAKASFVIEGLKEADKDEFCRCELKLQKWYGDLRGKPFAIEAENSILDISGFSKQYNCAFIWQKDGVKKLNLYLIINYFKGGKLRFKKIKPEAFEANRFYTVINKKSGEIVPMEVNFNFDDPNLIILPLAFGKRQGREFIWNDLLSLETGSLKLANGRVIEKTLYNRRTRQDEPALFVALTFERREVLDSSNIKPMNLIGVDRGENIPAVIALTDPEGCPLSRFKDSLGNPTHILRIGESYKEKQRTIQAKKEVEQRRAGGYSRKYASKAKNLADDMVRNTARDLLYYAVTQDAMLIFENLSRGFGRQGKRTFMAERQYTRMEDWLTAKLAYEGLPSKTYLSKTLAQYTSKTCSNCGFTITSADYDRVLEKLKKTATGWMTTINGKELKVEGQITYYNRYKRQNVVKDLSVELDRLSEESVNNDISSWTKGRSGEALSLLKKRFSHRPVQEKFVCLNCGFETHADEQAALNIARSWLFLRSQEYKKYQTNKTTGNTDKRAFVETWQSFYRKKLKEVWKPAV

SEQ ID NO: 48119 - protein, 977 aa, synthetic construct
  REGION 1..977: note = engineered CasX variant
QEIKRINKIRRRLVKDSNTKKAGKTGPMKTLLVRVMTPDLRERLENLRKKPENIPQPISNTSRANLNKLLTDYTEMKKAILHVYWEEFQKDPVGLMSRVAQPASKKIDQNKLKPEMDEKGNLTTAGFACSQCGQPLFVYKLEQVSEKGKAYTNYFGRCNVAEHEKLILLAQLKPEKDSDEAVTYSLGKFGQRALDFYSIHVTKESTHPVKPLAQIAGNRYASPVGKALSDACMGTIASFLSKYQDIIIEHQKVVKGNQKRLESLRELAGKENLEYPSVTLPPQPHTKEGVDAYNEVIARVRMWVNLNLWQKLKLSRDDAKPLLRLKKFPSFPLVERQANEVDWWDMVCNVKKLINEKKEDGKVFWQNLAGYKRQEALRPYLSSEEDRKKGKKFARYQLGDLLNHLEKKHGEDWGKVYDEAWERIDKKVEGLSKHIKLEEERRSEDAQSKAALTDWLRAKASFVIEGLKEADKDEFCRCELKLQKWYGDLRGKPFAIEAENSILDISGFSKQYNCAFIWQKDGVKKLNLYLIINYFKGGKLRFKKIKPEAFEANRFYTVINKKSGEIVPMEVNFNFDDPNLIILPLAFGKRQGREFIWNDLLSLETGSLKLANGRVIEKTLYNRRTRQDEPALFVALTFERREVLDSSNIKPMNLIGVDRGENIPAVIALTDPEGCPLSRFKDSLGNPTHILRIGESYKEKQRTIQAKKEVEQRRAGGYSRKYASKAKNLADDMVRNTARDLLYYAVTQDAMLIFENLSRGFGRQGKRTFMAERQYTRMEDWLTAKLAYEGLPSKTYLSKTLAQYTSKTCSNCGFTITSADYDRVLEKLKKTATGWMTTINGKELKVEGQITYYNRYKRQNVVKDLSVELDRLSEESVNNDISSWTKGRSGEALSLLKKRFSHRPVQEKFVCLNCGFETHADEQAALNIARSWLFLRSQEYKKYQTNKTTGNTDKRAFVETWQSFYRKKLKEVWKPAV

SEQ ID NO: 48120 - protein, 978 aa, synthetic construct
  REGION 1..978: note = engineered CasX variant
QEIKRINKIRRRLVKDSNTKKAGKTGPMKTLLVRVMTPDLRERLENLRKKPENIPQPISNTSRANLNKLLTDYTEMKKAILHVYWEEFQKDPVGLMSRVAQPASKKIDQNKLKPEMDEKGNLTTAGFACSQCGQPLFVYKLEQVSEKGKAYTNYFGRCNVAEHEKLILLAQLKPEKDSDEAVTYSLGKFGQRALDFYSIHVTKESTHPVKPLAQIAGNRYASYPVGKALSDACMGTIASFLSKYQDIIIEHQKVVKGNQKRLESLRELAGKENLEYPSVTLPPQPHTKEGVDAYNEVIARVRMWVNLNLWQKLKLSRDDAKPLLRLKKFPSFPLVERQANEVDWWDMVCNVKKLINEKKEDGKVFWQNLAGYKRQEALRPYLSSEEDRKKGKKFARYQLGDLLWHLEKKHGEDWGKVYDEAWERIDKKVEGLSKHIKLEEERRSEDAQSKAALTDWLRAKASFVIEGLKEADKDEFCRCELKLQKWYGDLRGKPFAIEAENSILDISGFSKQYNCAFIWQKDGVKKLNLYLIINYFKGGKLRFKKIKPEAFEANRFYTVINKKSGEIVPMEVNFNFDDPNLIILPLAFGKRQGREFIWNDLLSLETGSLKLANGRVIEKTLYNRRTRQDEPALFVALTFERREVLDSSNIKPMNLIGVDRGENIPAVIALTDPEGCPLSRFKDSLGNPTHILRIGESYKEKQRTIQAKKEVEQRRAGGYSRKYASKAKNLADDMVRNTARDLLYYAVTQDAMLIFENLSRGFGRQGKRTFMAERQYTRMEDWLTAKLAYEGLPSKTYLSKTLAQYTSKTCSNCGFTITSADYDRVLEKLKKTATGWMTTINGKELKVEGQITYYNRYKRQNVVKDLSVELDRLSEESVNNDISSWTKGRSGEALSLLKKRFSHRPVQEKFVCLNCGFETHADEQAALNIARSWLFLRSQEYKKYQTNKTTGNTDKRAFVETWQSFYRKKLKEVWKPAV

SEQ ID NO: 48121 - protein, 978 aa, synthetic construct
  REGION 1..978: note = engineered CasX variant
QEIKRINKIRRRLVKDSNTKKAGKTGPMKTLLVRVMTPDLRERLENLRKKPENIPQPISNTSRANLNKLLTDYTEMKKAILHVYWEEFQKDPVGLMSRVAQPASKKIDQNKLKPEMDEKGNLTTAGFACSQCGQPLFVYKLEQVSEKGKAYTNYFGRCNVAEHEKLILLAQLKPEKDSDEAVTYSLGKFGQRALDFYSIHVTKESTHPVKPLAQIAGNRYASHPVGKALSDACMGTIASFLSKYQDIIIEHQKVVKGNQKRLESLRELAGKENLEYPSVTLPPQPHTKEGVDAYNEVIARVRMWVNLNLWQKLKLSRDDAKPLLRLKKFPSFPLVERQANEVDWWDMVCNVKKLINEKKEDGKVFWQNLAGYKRQEALRPYLSSEEDRKKGKKFARYQLGDLLWHLEKKHGEDWGKVYDEAWERIDKKVEGLSKHIKLEEERRSEDAQSKAALTDWLRAKASFVIEGLKEADKDEFCRCELKLQKWYGDLRGKPFAIEAENSILDISGFSKQYNCAFIWQKDGVKKLNLYLIINYFKGGKLRFKKIKPEAFEANRFYTVINKKSGEIVPMEVNFNFDDPNLIILPLAFGKRQGREFIWNDLLSLETGSLKLANGRVIEKTLYNRRTRQDEPALFVALTFERREVLDSSNIKPMNLIGVDRGENIPAVIALTDPEGCPLSRFKDSLGNPTHILRIGESYKEKQRTIQAKKEVEQRRAGGYSRKYASKAKNLADDMVRNTARDLLYYAVTQDAMLIFENLSRGFGRQGKRTFMAERQYTRMEDWLTAKLAYEGLPSKTYLSKTLAQYTSKTCSNCGFTITSADYDRVLEKLKKTATGWMTTINGKELKVEGQITYYNRYKRQNVVKDLSVELDRLSEESVNNDISSWTKGRSGEALSLLKKRFSHRPVQEKFVCLNCGFETHADEQAALNIARSWLFLRSQEYKKYQTNKTTGNTDKRAFVETWQSFYRKKLKEVWKPAV

SEQ ID NO: 48122 - protein, 978 aa, synthetic construct
  REGION 1..978: note = engineered CasX variant
QEIKRINKIRRRLVKDSNTKKAGKTGPMKTLLVRVMTPDLRERLENLRKKPENIPQPISNTSRANLNKLLTDYTEMKKAILHVYWEEFQKDPVGLMSRVAQPASKKIDQNKLKPEMDEKGNLTTAGFACSQCGQPLFVYKLEQVSEKGKAYTNYFGRCNVAEHEKLILLAQLKPEKDSDEAVTYSLGKFGQRALDFYSIHVTKESTHPVKPLAQIAGNRYASSPVGKALSDACMGTIASFLSKYQDIIIEHQKVVKGNQKRLESLRELAGKENLEYPSVTLPPQPHTKEGVDAYNEVIARVRMWVNLNLWQKLKLSRDDAKPLLRLKKFPSFPLVERQANEVDWWDMVCNVKKLINEKKEDGKVFWQNLAGYKRQEALRPYLSSEEDRKKGKKFARYQLGDLLWHLEKKHGEDWGKVYDEAWERIDKKVEGLSKHIKLEEERRSEDAQSKAALTDWLRAKASFVIEGLKEADKDEFCRCELKLQKWYGDLRGKPFAIEAENSILDISGFSKQYNCAFIWQKDGVKKLNLYLIINYFKGGKLRFKKIKPEAFEANRFYTVINKKSGEIVPMEVNFNFDDPNLIILPLAFGKRQGREFIWNDLLSLETGSLKLANGRVIEKTLYNRRTRQDEPALFVALTFERREVLDSSNIKPMNLIGVDRGENIPAVIALTDPEGCPLSRFKDSLGNPTHILRIGESYKEKQRTIQAKKEVEQRRAGGYSRKYASKAKNLADDMVRNTARDLLYYAVTQDAMLIFENLSRGFGRQGKRTFMAERQYTRMEDWLTAKLAYEGLPSKTYLSKTLAQYTSKTCSNCGFTITSADYDRVLEKLKKTATGWMTTINGKELKVEGQITYYNRYKRQNVVKDLSVELDRLSEESVNNDISSWTKGRSGEALSLLKKRFSHRPVQEKFVCLNCGFETHADEQAALNIARSWLFLRSQEYKKYQTNKTTGNTDKRAFVETWQSFYRKKLKEVWKPAV

SEQ ID NO: 48123 - protein, 978 aa, synthetic construct
  REGION 1..978: note = engineered CasX variant
QEIKRINKIRRRLVKDSNTKKAGKTGPMKTLLVRVMTPDLRERLENLRKKPENIPQPISNTSRANLNKLLTDYTEMKKAILHVYWEEFQKDPVGLMSRVAQPASKKIDQNKLKPEMDEKGNLTTAGFACSQCGQPLFVYKLEQVSEKGKAYTNYFGRCNVAEHEKLILLAQLKPEKDSDEAVTYSLGKFGQRALDFYSIHVTKESTHPVKPLAQIAGNRYASTPVGKALSDACMGTIASFLSKYQDIIIEHQKVVKGNQKRLESLRELAGKENLEYPSVTLPPQPHTKEGVDAYNEVIARVRMWVNLNLWQKLKLSRDDAKPLLRLKKFPSFPLVERQANEVDWWDMVCNVKKLINEKKEDGKVFWQNLAGYKRQEALRPYLSSEEDRKKGKKFARYQLGDLLWHLEKKHGEDWGKVYDEAWERIDKKVEGLSKHIKLEEERRSEDAQSKAALTDWLRAKASFVIEGLKEADKDEFCRCELKLQKWYGDLRGKPFAIEAENSILDISGFSKQYNCAFIWQKDGVKKLNLYLIINYFKGGKLRFKKIKPEAFEANRFYTVINKKSGEIVPMEVNFNFDDPNLIILPLAFGKRQGREFIWNDLLSLETGSLKLANGRVIEKTLYNRRTRQDEPALFVALTFERREVLDSSNIKPMNLIGVDRGENIPAVIALTDPEGCPLSRFKDSLGNPTHILRIGESYKEKQRTIQAKKEVEQRRAGGYSRKYASKAKNLADDMVRNTARDLLYYAVTQDAMLIFENLSRGFGRQGKRTFMAERQYTRMEDWLTAKLAYEGLPSKTYLSKTLAQYTSKTCSNCGFTITSADYDRVLEKLKKTATGWMTTINGKELKVEGQITYYNRYKRQNVVKDLSVELDRLSEESVNNDISSWTKGRSGEALSLLKKRFSHRPVQEKFVCLNCGFETHADEQAALNIARSWLFLRSQEYKKYQTNKTTGNTDKRAFVETWQSFYRKKLKEVWKPAV

SEQ ID NO: 48124 - protein, 978 aa, synthetic construct
  REGION 1..978: note = engineered CasX variant
QEIKRINKIRRRLVKDSNTKKAGKTGPMKTLLVRVMTPDLRERLENLRKKPENIPQPISNTSRANLNKLLTDYTEMKKAILHVYWEEFQKDPVGLMSRVAQPASKKIDQNKLKPEMDEKGNLTTAGFACSQCGQPLFVYKLEQVSEKGKAYTNYFGRCNVAEHEKLILLAQLKPEKDSDEAVTYSLGKFGQRALDFYSIHVTKESTHPVKPLAQIAGNRYASAPVGKALSDACMGTIASFLSKYQDIIIEHQKVVKGNQKRLESLRELAGKENLEYPSVTLPPQPHTKEGVDAYNEVIARVRMWVNLNLWQKLKLSRDDAKPLLRLKKFPSFPLVERQANEVDWWDMVCNVKKLINEKKEDGKVFWQNLAGYKRQEALRPYLSSEEDRKKGKKFARYQLGDLLWHLEKKHGEDWGKVYDEAWERIDKKVEGLSKHIKLEEERRSEDAQSKAALTDWLRAKASFVIEGLKEADKDEFCRCELKLQKWYGDLRGKPFAIEAENSILDISGFSKQYNCAFIWQKDGVKKLNLYLIINYFKGGKLRFKKIKPEAFEANRFYTVINKKSGEIVPMEVNFNFDDPNLIILPLAFGKRQGREFIWNDLLSLETGSLKLANGRVIEKTLYNRRTRQDEPALFVALTFERREVLDSSNIKPMNLIGVDRGENIPAVIALTDPEGCPLSRFKDSLGNPTHILRIGESYKEKQRTIQAKKEVEQRRAGGYSRKYASKAKNLADDMVRNTARDLLYYAVTQDAMLIFENLSRGFGRQGKRTFMAERQYTRMEDWLTAKLAYEGLPSKTYLSKTLAQYTSKTCSNCGFTITSADYDRVLEKLKKTATGWMTTINGKELKVEGQITYYNRYKRQNVVKDLSVELDRLSEESVNNDISSWTKGRSGEALSLLKKRFSHRPVQEKFVCLNCGFETHADEQAALNIARSWLFLRSQEYKKYQTNKTTGNTDKRAFVETWQSFYRKKLKEVWKPAV

SEQ ID NO: 48125 - protein, 978 aa, synthetic construct
  REGION 1..978: note = engineered CasX variant
QEIKRINKIRRRLVKDSNTKKAGKTGPMKTLLVRVMTPDLRERLENLRKKPENIPQPISNTSRANLNKLLTDYTEMKKAILHVYWEEFQKDPVGLMSRVAQPASKKIDQNKLKPEMDEKGNLTTAGFACSQCGQPLFVYKLEQVSEKGKAYTNYFGRCNVAEHEKLILLAQLKPEKDSDEAVTYSLGKFGQRALDFYSIHVTKESTHPVKPLAQIAGNRYASVPVGKALSDACMGTIASFLSKYQDIIIEHQKVVKGNQKRLESLRELAGKENLEYPSVTLPPQPHTKEGVDAYNEVIARVRMWVNLNLWQKLKLSRDDAKPLLRLKKFPSFPLVERQANEVDWWDMVCNVKKLINEKKEDGKVFWQNLAGYKRQEALRPYLSSEEDRKKGKKFARYQLGDLLWHLEKKHGEDWGKVYDEAWERIDKKVEGLSKHIKLEEERRSEDAQSKAALTDWLRAKASFVIEGLKEADKDEFCRCELKLQKWYGDLRGKPFAIEAENSILDISGFSKQYNCAFIWQKDGVKKLNLYLIINYFKGGKLRFKKIKPEAFEANRFYTVINKKSGEIVPMEVNFNFDDPNLIILPLAFGKRQGREFIWNDLLSLETGSLKLANGRVIEKTLYNRRTRQDEPALFVALTFERREVLDSSNIKPMNLIGVDRGENIPAVIALTDPEGCPLSRFKDSLGNPTHILRIGESYKEKQRTIQAKKEVEQRRAGGYSRKYASKAKNLADDMVRNTARDLLYYAVTQDAMLIFENLSRGFGRQGKRTFMAERQYTRMEDWLTAKLAYEGLPSKTYLSKTLAQYTSKTCSNCGFTITSADYDRVLEKLKKTATGWMTTINGKELKVEGQITYYNRYKRQNVVKDLSVELDRLSEESVNNDISSWTKGRSGEALSLLKKRFSHRPVQEKFVCLNCGFETHADEQAALNIARSWLFLRSQEYKKYQTNKTTGNTDKRAFVETWQSFYRKKLKEVWKPAV

SEQ ID NO: 48126 - protein, 978 aa, synthetic construct
  REGION 1..978: note = engineered CasX variant
QEIKRINKIRRRLVKDSNTKKAGKTGPMKTLLVRVMTPDLRERLENLRKKPENIPQPISNTSRANLNKLLTDYTEMKKAILHVYWEEFQKDPVGLMSRVAQPASKKIDQNKLKPEMDEKGNLTTAGFACSQCGQPLFVYKLEQVSEKGKAYTNYFGRCNVAEHEKLIKLAQLKPEKDSDEAVTYSLGKFGQRALDFYSIHVTKESTHPVKPLAQIAGNRYASGPVGKALSDACMGTIASFLSKYQDIIIEHQKVVKGNQKRLESLRELAGKENLEYPSVTLPPQPHTKEGVDAYNEVIARVRMWVNLNLWQKLKLSRDDAKPLLRLKKFPSFPLVERQANEVDWWDMVCNVKKLINEKKEDGKVFWQNLAGYKRQEALRPYLSSEEDRKKGKKFARYQLGDLLWHLEKKHGEDWGKVYDEAWERIDKKVEGLSKHIKLEEERRSEDAQSKAALTDWLRAKASFVIEGLKEADKDEFCRCELKLQKWYGDLRGKPFAIEAENSILDISGFSKQYNCAFIWQKDGVKKLNLYLIINYFKGGKLRFKKIKPEAFEANRFYTVINKKSGEIVPMEVNFNFDDPNLIILPLAFGKRQGREFIWNDLLSLETGSLKLANGRVIEKTLYNRRTRQDEPALFVALTFERREVLDSSNIKPMNLIGVDRGENIPAVIALTDPEGCPLSRFKDSLGNPTHILRIGESYKEKQRTIQAKKEVEQRRAGGYSRKYASKAKNLADDMVRNTARDLLYYAVTQDAMLIFENLSRGFGRQGKRTFMAERQYTRMEDWLTAKLAYEGLPSKTYLSKTLAQYTSKTCSNCGFTITSADYDRVLEKLKKTATGWMTTINGKELKVEGQITYYNRYKRQNVVKDLSVELDRLSEESVNNDISSWTKGRSGEALSLLKKRFSHRPVQEKFVCLNCGFETHADEQAALNIARSWLFLRSQEYKKYQTNKTTGNTDKRAFVETWQSFYRKKLKEVWKPAV

SEQ ID NO: 48127 - protein, 977 aa, synthetic construct
  REGION 1..977: note = engineered CasX variant
QEIKRINKIRRRLVKDSNTKKAGKTGPMKTLLVRVMTPDLRERLENLRKKPENIPQPISNTSRANLNKLLTDYTEMKKAILHVYWEEFQKDPVGLMSRVAQPASKKIDQNKLKPEMDEKGNLTTAGFACSQCGQPLFVYKLEQVSEKGKAYTNYFGRCNVAEHEKLILLAQLKPEKDSDEAVTYSLGKFGQRALDFYSIHVTKESTHPVKPLAQIAGNRYASPVGKALSDACMGTIASFLSKYQDIIIEHQKVVKGNQKRLESLRELAGKENLEYPSVTLPPQPHTKEGVDAYNEVIARVRMWVNLNLWQKLKLSRDDAKPLLRLKKFPSFPLVERQANEVDWWDMVCNVKKLINEKKEDGKVFWQNLAGYKRQEALRPYLSSEEDRKKGKKFARYQLGDLLWHLEKKHGEDWGKVYDEAWERIDKKVEGLSKHIKLEEERRSEDAQSKAALTDWLRAKASFVIEGLKEADKDEFCRCELKLQKWYGDLRGKPFAIEAENSILDISGFSKQYNCAFIWQKDGVKKLNLYLIINYFKGGKLRFKKIKPEAFEANRFYTVINKKSGEIVPMEVNFNFDDPNLIILPLAFGKRQGREFIWNDLLSLETGSLKLANGRVIEKTLYNRRTRQDEPALFVALTFERREVLDSSNIKPMNLIGVDRGENIPAVIALTDPEGCPLSRFKDSLGNPTHILRIGESYKEKQRTIQAKKEVEQRRAGGYSRKYASKAKNLADDMVRNTARDLLYYAVTQDAMLIFENLSRGFGRQGKRTFMAERQYTRMEDWLTAKLAYEGLPSKTYLSKTLAQYTSKTCSNCGFTITSADYDRVLEKLKKTATGWMTTINGKELKVEGQITYYNRYKRQNVVKDLSVELDRLSEESVNNDISSWTKGRSGEALSLLKKRFSHRPVQEKFVCLNCGFETHADEQAALNIARSWLFLRSQEYKKYQTNKTTGNTDKRAFVETWQSFYRKKLKEVWKPAV

SEQ ID NO: 48128 - protein, 978 aa, synthetic construct
  REGION 1..978: note = engineered CasX variant
QEIKRINKIRRRLVKDSNTKKAGKTGPMKTLLVRVMTPDLRERLENLRKKPENIPQPISNTSRANLNKLLTDYTEMKKAILHVYWEEFQKDPVGLMSRVAQPASKKIDQNKLKPEMDEKGNLTTAGFACSQCGQPLFVYKLEQVSEKGKAYTNYFGRCNVAEHEKLILLAQLKPEKDSDEAVTYSLGKFGQRALDFYSIHVTKESTHPVKPLAQIAGNRYASYPVGKALSDACMGTIASFLSKYQDIIIEHQKVVKGNQKRLESLRELAGKENLEYPSVTLPPQPHTKEGVDAYNEVIARVRMWVNLNLWQKLKLSRDDAKPLLRLKKFPSFPLVERQANEVDWWDMVCNVKKLINEKKEDGKVFWQNLAGYKRQEALRPYLSSEEDRKKGKKFARYQLGDLLLHLYKKHGEDWGKVYDEAWERIDKKVEGLSKHIKLEEERRSEDAQSKAALTDWLRAKASFVIEGLKEADKDEFCRCELKLQKWYGDLRGKPFAIEAENSILDISGFSKQYNCAFIWQKDGVKKLNLYLIINYFKGGKLRFKKIKPEAFEANRFYTVINKKSGEIVPMEVNFNFDDPNLIILPLAFGKRQGREFIWNDLLSLETGSLKLANGRVIEKTLYNRRTRQDEPALFVALTFERREVLDSSNIKPMNLIGVDRGENIPAVIALTDPEGCPLSRFKDSLGNPTHILRIGESYKEKQRTIQAKKEVEQRRAGGYSRKYASKAKNLADDMVRNTARDLLYYAVTQDAMLIFENLSRGFGRQGKRTFMAERQYTRMEDWLTAKLAYEGLPSKTYLSKTLAQYTSKTCSNCGFTITSADYDRVLEKLKKTATGWMTTINGKELKVEGQITYYNRYKRQNVVKDLSVELDRLSEESVNNDISSWTKGRSGEALSLLKKRFSHRPVQEKFVCLNCGFETHADEQAALNIARSWLFLRSQEYKKYQTNKTTGNTDKRAFVETWQSFYRKKLKEVWKPAV

SEQ ID NO: 48129 - protein, 978 aa, synthetic construct
  REGION 1..978: note = engineered CasX variant
QEIKRINKIRRRLVKDSNTKKAGKTGPMKTLLVRVMTPDLRERLENLRKKPENIPQPISNTSRANLNKLLTDYTEMKKAILHVYWEEFQKDPVGLMSRVAQPASKKIDQNKLKPEMDEKGNLTTAGFACSQCGQPLFVYKLEQVSEKGKAYTNYFGRCNVAEHEKLILLAQLKPEKDSDEAVTYSLGKFGQRALDFYSIHVTKESTHPVKPLAQIAGNRYASHPVGKALSDACMGTIASFLSKYQDIIIEHQKVVKGNQKRLESLRELAGKENLEYPSVTLPPQPHTKEGVDAYNEVIARVRMWVNLNLWQKLKLSRDDAKPLLRLKKFPSFPLVERQANEVDWWDMVCNVKKLINEKKEDGKVFWQNLAGYKRQEALRPYLSSEEDRKKGKKFARYQLGDLLLHLYKKHGEDWGKVYDEAWERIDKKVEGLSKHIKLEEERRSEDAQSKAALTDWLRAKASFVIEGLKEADKDEFCRCELKLQKWYGDLRGKPFAIEAENSILDISGFSKQYNCAFIWQKDGVKKLNLYLIINYFKGGKLRFKKIKPEAFEANRFYTVINKKSGEIVPMEVNFNFDDPNLIILPLAFGKRQGREFIWNDLLSLETGSLKLANGRVIEKTLYNRRTRQDEPALFVALTFERREVLDSSNIKPMNLIGVDRGENIPAVIALTDPEGCPLSRFKDSLGNPTHILRIGESYKEKQRTIQAKKEVEQRRAGGYSRKYASKAKNLADDMVRNTARDLLYYAVTQDAMLIFENLSRGFGRQGKRTFMAERQYTRMEDWLTAKLAYEGLPSKTYLSKTLAQYTSKTCSNCGFTITSADYDRVLEKLKKTATGWMTTINGKELKVEGQITYYNRYKRQNVVKDLSVELDRLSEESVNNDISSWTKGRSGEALSLLKKRFSHRPVQEKFVCLNCGFETHADEQAALNIARSWLFLRSQEYKKYQTNKTTGNTDKRAFVETWQSFYRKKLKEVWKPAV

SEQ ID NO: 48130 - protein, 978 aa, synthetic construct
  REGION 1..978: note = engineered CasX variant
QEIKRINKIRRRLVKDSNTKKAGKTGPMKTLLVRVMTPDLRERLENLRKKPENIPQPISNTSRANLNKLLTDYTEMKKAILHVYWEEFQKDPVGLMSRVAQPASKKIDQNKLKPEMDEKGNLTTAGFACSQCGQPLFVYKLEQVSEKGKAYTNYFGRCNVAEHEKLILLAQLKPEKDSDEAVTYSLGKFGQRALDFYSIHVTKESTHPVKPLAQIAGNRYASSPVGKALSDACMGTIASFLSKYQDIIIEHQKVVKGNQKRLESLRELAGKENLEYPSVTLPPQPHTKEGVDAYNEVIARVRMWVNLNLWQKLKLSRDDAKPLLRLKKFPSFPLVERQANEVDWWDMVCNVKKLINEKKEDGKVFWQNLAGYKRQEALRPYLSSEEDRKKGKKFARYQLGDLLLHLYKKHGEDWGKVYDEAWERIDKKVEGLSKHIKLEEERRSEDAQSKAALTDWLRAKASFVIEGLKEADKDEFCRCELKLQKWYGDLRGKPFAIEAENSILDISGFSKQYNCAFIWQKDGVKKLNLYLIINYFKGGKLRFKKIKPEAFEANRFYTVINKKSGEIVPMEVNFNFDDPNLIILPLAFGKRQGREFIWNDLLSLETGSLKLANGRVIEKTLYNRRTRQDEPALFVALTFERREVLDSSNIKPMNLIGVDRGENIPAVIALTDPEGCPLSRFKDSLGNPTHILRIGESYKEKQRTIQAKKEVEQRRAGGYSRKYASKAKNLADDMVRNTARDLLYYAVTQDAMLIFENLSRGFGRQGKRTFMAERQYTRMEDWLTAKLAYEGLPSKTYLSKTLAQYTSKTCSNCGFTITSADYDRVLEKLKKTATGWMTTINGKELKVEGQITYYNRYKRQNVVKDLSVELDRLSEESVNNDISSWTKGRSGEALSLLKKRFSHRPVQEKFVCLNCGFETHADEQAALNIARSWLFLRSQEYKKYQTNKTTGNTDKRAFVETWQSFYRKKLKEVWKPAV

SEQ ID NO: 48131 - protein, 978 aa, synthetic construct
  REGION 1..978: note = engineered CasX variant
QEIKRINKIRRRLVKDSNTKKAGKTGPMKTLLVRVMTPDLRERLENLRKKPENIPQPISNTSRANLNKLLTDYTEMKKAILHVYWEEFQKDPVGLMSRVAQPASKKIDQNKLKPEMDEKGNLTTAGFACSQCGQPLFVYKLEQVSEKGKAYTNYFGRCNVAEHEKLILLAQLKPEKDSDEAVTYSLGKFGQRALDFYSIHVTKESTHPVKPLAQIAGNRYASTPVGKALSDACMGTIASFLSKYQDIIIEHQKVVKGNQKRLESLRELAGKENLEYPSVTLPPQPHTKEGVDAYNEVIARVRMWVNLNLWQKLKLSRDDAKPLLRLKKFPSFPLVERQANEVDWWDMVCNVKKLINEKKEDGKVFWQNLAGYKRQEALRPYLSSEEDRKKGKKFARYQLGDLLLHLYKKHGEDWGKVYDEAWERIDKKVEGLSKHIKLEEERRSEDAQSKAALTDWLRAKASFVIEGLKEADKDEFCRCELKLQKWYGDLRGKPFAIEAENSILDISGFSKQYNCAFIWQKDGVKKLNLYLIINYFKGGKLRFKKIKPEAFEANRFYTVINKKSGEIVPMEVNFNFDDPNLIILPLAFGKRQGREFIWNDLLSLETGSLKLANGRVIEKTLYNRRTRQDEPALFVALTFERREVLDSSNIKPMNLIGVDRGENIPAVIALTDPEGCPLSRFKDSLGNPTHILRIGESYKEKQRTIQAKKEVEQRRAGGYSRKYASKAKNLADDMVRNTARDLLYYAVTQDAMLIFENLSRGFGRQGKRTFMAERQYTRMEDWLTAKLAYEGLPSKTYLSKTLAQYTSKTCSNCGFTITSADYDRVLEKLKKTATGWMTTINGKELKVEGQITYYNRYKRQNVVKDLSVELDRLSEESVNNDISSWTKGRSGEALSLLKKRFSHRPVQEKFVCLNCGFETHADEQAALNIARSWLFLRSQEYKKYQTNKTTGNTDKRAFVETWQSFYRKKLKEVWKPAV

SEQ ID NO: 48132 - protein, 978 aa, synthetic construct
  REGION 1..978: note = engineered CasX variant
QEIKRINKIRRRLVKDSNTKKAGKTGPMKTLLVRVMTPDLRERLENLRKKPENIPQPISNTSRANLNKLLTDYTEMKKAILHVYWEEFQKDPVGLMSRVAQPASKKIDQNKLKPEMDEKGNLTTAGFACSQCGQPLFVYKLEQVSEKGKAYTNYFGRCNVAEHEKLILLAQLKPEKDSDEAVTYSLGKFGQRALDFYSIHVTKESTHPVKPLAQIAGNRYASAPVGKALSDACMGTIASFLSKYQDIIIEHQKVVKGNQKRLESLRELAGKENLEYPSVTLPPQPHTKEGVDAYNEVIARVRMWVNLNLWQKLKLSRDDAKPLLRLKKFPSFPLVERQANEVDWWDMVCNVKKLINEKKEDGKVFWQNLAGYKRQEALRPYLSSEEDRKKGKKFARYQLGDLLLHLYKKHGEDWGKVYDEAWERIDKKVEGLSKHIKLEEERRSEDAQSKAALTDWLRAKASFVIEGLKEADKDEFCRCELKLQKWYGDLRGKPFAIEAENSILDISGFSKQYNCAFIWQKDGVKKLNLYLIINYFKGGKLRFKKIKPEAFEANRFYTVINKKSGEIVPMEVNFNFDDPNLIILPLAFGKRQGREFIWNDLLSLETGSLKLANGRVIEKTLYNRRTRQDEPALFVALTFERREVLDSSNIKPMNLIGVDRGENIPAVIALTDPEGCPLSRFKDSLGNPTHILRIGESYKEKQRTIQAKKEVEQRRAGGYSRKYASKAKNLADDMVRNTARDLLYYAVTQDAMLIFENLSRGFGRQGKRTFMAERQYTRMEDWLTAKLAYEGLPSKTYLSKTLAQYTSKTCSNCGFTITSADYDRVLEKLKKTATGWMTTINGKELKVEGQITYYNRYKRQNVVKDLSVELDRLSEESVNNDISSWTKGRSGEALSLLKKRFSHRPVQEKFVCLNCGFETHADEQAALNIARSWLFLRSQEYKKYQTNKTTGNTDKRAFVETWQSFYRKKLKEVWKPAV

SEQ ID NO: 48133 - protein, 978 aa, synthetic construct
  REGION 1..978: note = engineered CasX variant
QEIKRINKIRRRLVKDSNTKKAGKTGPMKTLLVRVMTPDLRERLENLRKKPENIPQPISNTSRANLNKLLTDYTEMKKAILHVYWEEFQKDPVGLMSRVAQPASKKIDQNKLKPEMDEKGNLTTAGFACSQCGQPLFVYKLEQVSEKGKAYTNYFGRCNVAEHEKLILLAQLKPEKDSDEAVTYSLGKFGQRALDFYSIHVTKESTHPVKPLAQIAGNRYASVPVGKALSDACMGTIASFLSKYQDIIIEHQKVVKGNQKRLESLRELAGKENLEYPSVTLPPQPHTKEGVDAYNEVIARVRMWVNLNLWQKLKLSRDDAKPLLRLKKFPSFPLVERQANEVDWWDMVCNVKKLINEKKEDGKVFWQNLAGYKRQEALRPYLSSEEDRKKGKKFARYQLGDLLLHLYKKHGEDWGKVYDEAWERIDKKVEGLSKHIKLEEERRSEDAQSKAALTDWLRAKASFVIEGLKEADKDEFCRCELKLQKWYGDLRGKPFAIEAENSILDISGFSKQYNCAFIWQKDGVKKLNLYLIINYFKGGKLRFKKIKPEAFEANRFYTVINKKSGEIVPMEVNFNFDDPNLIILPLAFGKRQGREFIWNDLLSLETGSLKLANGRVIEKTLYNRRTRQDEPALFVALTFERREVLDSSNIKPMNLIGVDRGENIPAVIALTDPEGCPLSRFKDSLGNPTHILRIGESYKEKQRTIQAKKEVEQRRAGGYSRKYASKAKNLADDMVRNTARDLLYYAVTQDAMLIFENLSRGFGRQGKRTFMAERQYTRMEDWLTAKLAYEGLPSKTYLSKTLAQYTSKTCSNCGFTITSADYDRVLEKLKKTATGWMTTINGKELKVEGQITYYNRYKRQNVVKDLSVELDRLSEESVNNDISSWTKGRSGEALSLLKKRFSHRPVQEKFVCLNCGFETHADEQAALNIARSWLFLRSQEYKKYQTNKTTGNTDKRAFVETWQSFYRKKLKEVWKPAV

SEQ ID NO: 48134 - protein, 978 aa, synthetic construct
  REGION 1..978: note = engineered CasX variant
QEIKRINKIRRRLVKDSNTKKAGKTGPMKTLLVRVMTPDLRERLENLRKKPENIPQPISNTSRANLNKLLTDYTEMKKAILHVYWEEFQKDPVGLMSRVAQPASKKIDQNKLKPEMDEKGNLTTAGFACSQCGQPLFVYKLEQVSEKGKAYTNYFGRCNVAEHEKLIKLAQLKPEKDSDEAVTYSLGKFGQRALDFYSIHVTKESTHPVKPLAQIAGNRYASGPVGKALSDACMGTIASFLSKYQDIIIEHQKVVKGNQKRLESLRELAGKENLEYPSVTLPPQPHTKEGVDAYNEVIARVRMWVNLNLWQKLKLSRDDAKPLLRLKKFPSFPLVERQANEVDWWDMVCNVKKLINEKKEDGKVFWQNLAGYKRQEALRPYLSSEEDRKKGKKFARYQLGDLLLHLYKKHGEDWGKVYDEAWERIDKKVEGLSKHIKLEEERRSEDAQSKAALTDWLRAKASFVIEGLKEADKDEFCRCELKLQKWYGDLRGKPFAIEAENSILDISGFSKQYNCAFIWQKDGVKKLNLYLIINYFKGGKLRFKKIKPEAFEANRFYTVINKKSGEIVPMEVNFNFDDPNLIILPLAFGKRQGREFIWNDLLSLETGSLKLANGRVIEKTLYNRRTRQDEPALFVALTFERREVLDSSNIKPMNLIGVDRGENIPAVIALTDPEGCPLSRFKDSLGNPTHILRIGESYKEKQRTIQAKKEVEQRRAGGYSRKYASKAKNLADDMVRNTARDLLYYAVTQDAMLIFENLSRGFGRQGKRTFMAERQYTRMEDWLTAKLAYEGLPSKTYLSKTLAQYTSKTCSNCGFTITSADYDRVLEKLKKTATGWMTTINGKELKVEGQITYYNRYKRQNVVKDLSVELDRLSEESVNNDISSWTKGRSGEALSLLKKRFSHRPVQEKFVCLNCGFETHADEQAALNIARSWLFLRSQEYKKYQTNKTTGNTDKRAFVETWQSFYRKKLKEVWKPAV

SEQ ID NO: 48135 - protein, 977 aa, synthetic construct
  REGION 1..977: note = engineered CasX variant
QEIKRINKIRRRLVKDSNTKKAGKTGPMKTLLVRVMTPDLRERLENLRKKPENIPQPISNTSRANLNKLLTDYTEMKKAILHVYWEEFQKDPVGLMSRVAQPASKKIDQNKLKPEMDEKGNLTTAGFACSQCGQPLFVYKLEQVSEKGKAYTNYFGRCNVAEHEKLILLAQLKPEKDSDEAVTYSLGKFGQRALDFYSIHVTKESTHPVKPLAQIAGNRYASPVGKALSDACMGTIASFLSKYQDIIIEHQKVVKGNQKRLESLRELAGKENLEYPSVTLPPQPHTKEGVDAYNEVIARVRMWVNLNLWQKLKLSRDDAKPLLRLKKFPSFPLVERQANEVDWWDMVCNVKKLINEKKEDGKVFWQNLAGYKRQEALRPYLSSEEDRKKGKKFARYQLGDLLLHLYKKHGEDWGKVYDEAWERIDKKVEGLSKHIKLEEERRSEDAQSKAALTDWLRAKASFVIEGLKEADKDEFCRCELKLQKWYGDLRGKPFAIEAENSILDISGFSKQYNCAFIWQKDGVKKLNLYLIINYFKGGKLRFKKIKPEAFEANRFYTVINKKSGEIVPMEVNFNFDDPNLIILPLAFGKRQGREFIWNDLLSLETGSLKLANGRVIEKTLYNRRTRQDEPALFVALTFERREVLDSSNIKPMNLIGVDRGENIPAVIALTDPEGCPLSRFKDSLGNPTHILRIGESYKEKQRTIQAKKEVEQRRAGGYSRKYASKAKNLADDMVRNTARDLLYYAVTQDAMLIFENLSRGFGRQGKRTFMAERQYTRMEDWLTAKLAYEGLPSKTYLSKTLAQYTSKTCSNCGFTITSADYDRVLEKLKKTATGWMTTINGKELKVEGQITYYNRYKRQNVVKDLSVELDRLSEESVNNDISSWTKGRSGEALSLLKKRFSHRPVQEKFVCLNCGFETHADEQAALNIARSWLFLRSQEYKKYQTNKTTGNTDKRAFVETWQSFYRKKLKEVWKPAV

SEQ ID NO: 48136 - protein, 978 aa, synthetic construct
  REGION 1..978: note = engineered CasX variant
QEIKRINKIRRRLVKDSNTKKAGKTGPMKTLLVRVMTPDLRERLENLRKKPENIPQPISNTSRANLNKLLTDYTEMKKAILHVYWEEFQKDPVGLMSRVAQPASKKIDQNKLKPEMDEKGNLTTAGFACSQCGQPLFVYKLEQVSEKGKAYTNYFGRCNVAEHEKLILLAQLKPEKDSDEAVTYSLGKFGQRALDFYSIHVTKESTHPVKPLAQIAGNRYASYPVGKALSDACMGTIASFLSKYQDIIIEHQKVVKGNQKRLESLRELAGKENLEYPSVTLPPQPHTKEGVDAYNEVIARVRMWVNLNLWQKLKLSRDDAKPLLRLKKFPSFPLVERQANEVDWWDMVCNVKKLINEKKEDGKVFWQNLAGYKRQEALRPYLSSEEDRKKGKKFARYQLGDLLLHLEKKHPEDWGKVYDEAWERIDKKVEGLSKHIKLEEERRSEDAQSKAALTDWLRAKASFVIEGLKEADKDEFCRCELKLQKWYGDLRGKPFAIEAENSILDISGFSKQYNCAFIWQKDGVKKLNLYLIINYFKGGKLRFKKIKPEAFEANRFYTVINKKSGEIVPMEVNFNFDDPNLIILPLAFGKRQGREFIWNDLLSLETGSLKLANGRVIEKTLYNRRTRQDEPALFVALTFERREVLDSSNIKPMNLIGVDRGENIPAVIALTDPEGCPLSRFKDSLGNPTHILRIGESYKEKQRTIQAKKEVEQRRAGGYSRKYASKAKNLADDMVRNTARDLLYYAVTQDAMLIFENLSRGFGRQGKRTFMAERQYTRMEDWLTAKLAYEGLPSKTYLSKTLAQYTSKTCSNCGFTITSADYDRVLEKLKKTATGWMTTINGKELKVEGQITYYNRYKRQNVVKDLSVELDRLSEESVNNDISSWTKGRSGEALSLLKKRFSHRPVQEKFVCLNCGFETHADEQAALNIARSWLFLRSQEYKKYQTNKTTGNTDKRAFVETWQSFYRKKLKEVWKPAV

SEQ ID NO: 48137 - protein, 978 aa, synthetic construct
  REGION 1..978: note = engineered CasX variant
QEIKRINKIRRRLVKDSNTKKAGKTGPMKTLLVRVMTPDLRERLENLRKKPENIPQPISNTSRANLNKLLTDYTEMKKAILHVYWEEFQKDPVGLMSRVAQPASKKIDQNKLKPEMDEKGNLTTAGFACSQCGQPLFVYKLEQVSEKGKAYTNYFGRCNVAEHEKLILLAQLKPEKDSDEAVTYSLGKFGQRALDFYSIHVTKESTHPVKPLAQIAGNRYASHPVGKALSDACMGTIASFLSKYQDIIIEHQKVVKGNQKRLESLRELAGKENLEYPSVTLPPQPHTKEGVDAYNEVIARVRMWVNLNLWQKLKLSRDDAKPLLRLKKFPSFPLVERQANEVDWWDMVCNVKKLINEKKEDGKVFWQNLAGYKRQEALRPYLSSEEDRKKGKKFARYQLGDLLLHLEKKHPEDWGKVYDEAWERIDKKVEGLSKHIKLEEERRSEDAQSKAALTDWLRAKASFVIEGLKEADKDEFCRCELKLQKWYGDLRGKPFAIEAENSILDISGFSKQYNCAFIWQKDGVKKLNLYLIINYFKGGKLRFKKIKPEAFEANRFYTVINKKSGEIVPMEVNFNFDDPNLIILPLAFGKRQGREFIWNDLLSLETGSLKLANGRVIEKTLYNRRTRQDEPALFVALTFERREVLDSSNIKPMNLIGVDRGENIPAVIALTDPEGCPLSRFKDSLGNPTHILRIGESYKEKQRTIQAKKEVEQRRAGGYSRKYASKAKNLADDMVRNTARDLLYYAVTQDAMLIFENLSRGFGRQGKRTFMAERQYTRMEDWLTAKLAYEGLPSKTYLSKTLAQYTSKTCSNCGFTITSADYDRVLEKLKKTATGWMTTINGKELKVEGQITYYNRYKRQNVVKDLSVELDRLSEESVNNDISSWTKGRSGEALSLLKKRFSHRPVQEKFVCLNCGFETHADEQAALNIARSWLFLRSQEYKKYQTNKTTGNTDKRAFVETWQSFYRKKLKEVWKPAV

SEQ ID NO: 48138 - protein, 978 aa, synthetic construct
  REGION 1..978: note = engineered CasX variant
QEIKRINKIRRRLVKDSNTKKAGKTGPMKTLLVRVMTPDLRERLENLRKKPENIPQPISNTSRANLNKLLTDYTEMKKAILHVYWEEFQKDPVGLMSRVAQPASKKIDQNKLKPEMDEKGNLTTAGFACSQCGQPLFVYKLEQVSEKGKAYTNYFGRCNVAEHEKLILLAQLKPEKDSDEAVTYSLGKFGQRALDFYSIHVTKESTHPVKPLAQIAGNRYASSPVGKALSDACMGTIASFLSKYQDIIIEHQKVVKGNQKRLESLRELAGKENLEYPSVTLPPQPHTKEGVDAYNEVIARVRMWVNLNLWQKLKLSRDDAKPLLRLKKFPSFPLVERQANEVDWWDMVCNVKKLINEKKEDGKVFWQNLAGYKRQEALRPYLSSEEDRKKGKKFARYQLGDLLLHLEKKHPEDWGKVYDEAWERIDKKVEGLSKHIKLEEERRSEDAQSKAALTDWLRAKASFVIEGLKEADKDEFCRCELKLQKWYGDLRGKPFAIEAENSILDISGFSKQYNCAFIWQKDGVKKLNLYLIINYFKGGKLRFKKIKPEAFEANRFYTVINKKSGEIVPMEVNFNFDDPNLIILPLAFGKRQGREFIWNDLLSLETGSLKLANGRVIEKTLYNRRTRQDEPALFVALTFERREVLDSSNIKPMNLIGVDRGENIPAVIALTDPEGCPLSRFKDSLGNPTHILRIGESYKEKQRTIQAKKEVEQRRAGGYSRKYASKAKNLADDMVRNTARDLLYYAVTQDAMLIFENLSRGFGRQGKRTFMAERQYTRMEDWLTAKLAYEGLPSKTYLSKTLAQYTSKTCSNCGFTITSADYDRVLEKLKKTATGWMTTINGKELKVEGQITYYNRYKRQNVVKDLSVELDRLSEESVNNDISSWTKGRSGEALSLLKKRFSHRPVQEKFVCLNCGFETHADEQAALNIARSWLFLRSQEYKKYQTNKTTGNTDKRAFVETWQSFYRKKLKEVWKPAV

SEQ ID NO: 48139 - protein, 978 aa, synthetic construct
  REGION 1..978: note = engineered CasX variant
QEIKRINKIRRRLVKDSNTKKAGKTGPMKTLLVRVMTPDLRERLENLRKKPENIPQPISNTSRANLNKLLTDYTEMKKAILHVYWEEFQKDPVGLMSRVAQPASKKIDQNKLKPEMDEKGNLTTAGFACSQCGQPLFVYKLEQVSEKGKAYTNYFGRCNVAEHEKLILLAQLKPEKDSDEAVTYSLGKFGQRALDFYSIHVTKESTHPVKPLAQIAGNRYASTPVGKALSDACMGTIASFLSKYQDIIIEHQKVVKGNQKRLESLRELAGKENLEYPSVTLPPQPHTKEGVDAYNEVIARVRMWVNLNLWQKLKLSRDDAKPLLRLKKFPSFPLVERQANEVDWWDMVCNVKKLINEKKEDGKVFWQNLAGYKRQEALRPYLSSEEDRKKGKKFARYQLGDLLLHLEKKHPEDWGKVYDEAWERIDKKVEGLSKHIKLEEERRSEDAQSKAALTDWLRAKASFVIEGLKEADKDEFCRCELKLQKWYGDLRGKPFAIEAENSILDISGFSKQYNCAFIWQKDGVKKLNLYLIINYFKGGKLRFKKIKPEAFEANRFYTVINKKSGEIVPMEVNFNFDDPNLIILPLAFGKRQGREFIWNDLLSLETGSLKLANGRVIEKTLYNRRTRQDEPALFVALTFERREVLDSSNIKPMNLIGVDRGENIPAVIALTDPEGCPLSRFKDSLGNPTHILRIGESYKEKQRTIQAKKEVEQRRAGGYSRKYASKAKNLADDMVRNTARDLLYYAVTQDAMLIFENLSRGFGRQGKRTFMAERQYTRMEDWLTAKLAYEGLPSKTYLSKTLAQYTSKTCSNCGFTITSADYDRVLEKLKKTATGWMTTINGKELKVEGQITYYNRYKRQNVVKDLSVELDRLSEESVNNDISSWTKGRSGEALSLLKKRFSHRPVQEKFVCLNCGFETHADEQAALNIARSWLFLRSQEYKKYQTNKTTGNTDKRAFVETWQSFYRKKLKEVWKPAV

SEQ ID NO: 48140 - protein, 978 aa, synthetic construct
  REGION 1..978: note = engineered CasX variant
QEIKRINKIRRRLVKDSNTKKAGKTGPMKTLLVRVMTPDLRERLENLRKKPENIPQPISNTSRANLNKLLTDYTEMKKAILHVYWEEFQKDPVGLMSRVAQPASKKIDQNKLKPEMDEKGNLTTAGFACSQCGQPLFVYKLEQVSEKGKAYTNYFGRCNVAEHEKLILLAQLKPEKDSDEAVTYSLGKFGQRALDFYSIHVTKESTHPVKPLAQIAGNRYASAPVGKALSDACMGTIASFLSKYQDIIIEHQKVVKGNQKRLESLRELAGKENLEYPSVTLPPQPHTKEGVDAYNEVIARVRMWVNLNLWQKLKLSRDDAKPLLRLKKFPSFPLVERQANEVDWWDMVCNVKKLINEKKEDGKVFWQNLAGYKRQEALRPYLSSEEDRKKGKKFARYQLGDLLLHLEKKHPEDWGKVYDEAWERIDKKVEGLSKHIKLEEERRSEDAQSKAALTDWLRAKASFVIEGLKEADKDEFCRCELKLQKWYGDLRGKPFAIEAENSILDISGFSKQYNCAFIWQKDGVKKLNLYLIINYFKGGKLRFKKIKPEAFEANRFYTVINKKSGEIVPMEVNFNFDDPNLIILPLAFGKRQGREFIWNDLLSLETGSLKLANGRVIEKTLYNRRTRQDEPALFVALTFERREVLDSSNIKPMNLIGVDRGENIPAVIALTDPEGCPLSRFKDSLGNPTHILRIGESYKEKQRTIQAKKEVEQRRAGGYSRKYASKAKNLADDMVRNTARDLLYYAVTQDAMLIFENLSRGFGRQGKRTFMAERQYTRMEDWLTAKLAYEGLPSKTYLSKTLAQYTSKTCSNCGFTITSADYDRVLEKLKKTATGWMTTINGKELKVEGQITYYNRYKRQNVVKDLSVELDRLSEESVNNDISSWTKGRSGEALSLLKKRFSHRPVQEKFVCLNCGFETHADEQAALNIARSWLFLRSQEYKKYQTNKTTGNTDKRAFVETWQSFYRKKLKEVWKPAV

SEQ ID NO: 48141 - protein, 978 aa, synthetic construct
  REGION 1..978: note = engineered CasX variant
QEIKRINKIRRRLVKDSNTKKAGKTGPMKTLLVRVMTPDLRERLENLRKKPENIPQPISNTSRANLNKLLTDYTEMKKAILHVYWEEFQKDPVGLMSRVAQPASKKIDQNKLKPEMDEKGNLTTAGFACSQCGQPLFVYKLEQVSEKGKAYTNYFGRCNVAEHEKLILLAQLKPEKDSDEAVTYSLGKFGQRALDFYSIHVTKESTHPVKPLAQIAGNRYASVPVGKALSDACMGTIASFLSKYQDIIIEHQKVVKGNQKRLESLRELAGKENLEYPSVTLPPQPHTKEGVDAYNEVIARVRMWVNLNLWQKLKLSRDDAKPLLRLKKFPSFPLVERQANEVDWWDMVCNVKKLINEKKEDGKVFWQNLAGYKRQEALRPYLSSEEDRKKGKKFARYQLGDLLLHLEKKHPEDWGKVYDEAWERIDKKVEGLSKHIKLEEERRSEDAQSKAALTDWLRAKASFVIEGLKEADKDEFCRCELKLQKWYGDLRGKPFAIEAENSILDISGFSKQYNCAFIWQKDGVKKLNLYLIINYFKGGKLRFKKIKPEAFEANRFYTVINKKSGEIVPMEVNFNFDDPNLIILPLAFGKRQGREFIWNDLLSLETGSLKLANGRVIEKTLYNRRTRQDEPALFVALTFERREVLDSSNIKPMNLIGVDRGENIPAVIALTDPEGCPLSRFKDSLGNPTHILRIGESYKEKQRTIQAKKEVEQRRAGGYSRKYASKAKNLADDMVRNTARDLLYYAVTQDAMLIFENLSRGFGRQGKRTFMAERQYTRMEDWLTAKLAYEGLPSKTYLSKTLAQYTSKTCSNCGFTITSADYDRVLEKLKKTATGWMTTINGKELKVEGQITYYNRYKRQNVVKDLSVELDRLSEESVNNDISSWTKGRSGEALSLLKKRFSHRPVQEKFVCLNCGFETHADEQAALNIARSWLFLRSQEYKKYQTNKTTGNTDKRAFVETWQSFYRKKLKEVWKPAV

SEQ ID NO: 48142 - protein, 978 aa, synthetic construct
  REGION 1..978: note = engineered CasX variant
QEIKRINKIRRRLVKDSNTKKAGKTGPMKTLLVRVMTPDLRERLENLRKKPENIPQPISNTSRANLNKLLTDYTEMKKAILHVYWEEFQKDPVGLMSRVAQPASKKIDQNKLKPEMDEKGNLTTAGFACSQCGQPLFVYKLEQVSEKGKAYTNYFGRCNVAEHEKLIKLAQLKPEKDSDEAVTYSLGKFGQRALDFYSIHVTKESTHPVKPLAQIAGNRYASGPVGKALSDACMGTIASFLSKYQDIIIEHQKVVKGNQKRLESLRELAGKENLEYPSVTLPPQPHTKEGVDAYNEVIARVRMWVNLNLWQKLKLSRDDAKPLLRLKKFPSFPLVERQANEVDWWDMVCNVKKLINEKKEDGKVFWQNLAGYKRQEALRPYLSSEEDRKKGKKFARYQLGDLLLHLEKKHPEDWGKVYDEAWERIDKKVEGLSKHIKLEEERRSEDAQSKAALTDWLRAKASFVIEGLKEADKDEFCRCELKLQKWYGDLRGKPFAIEAENSILDISGFSKQYNCAFIWQKDGVKKLNLYLIINYFKGGKLRFKKIKPEAFEANRFYTVINKKSGEIVPMEVNFNFDDPNLIILPLAFGKRQGREFIWNDLLSLETGSLKLANGRVIEKTLYNRRTRQDEPALFVALTFERREVLDSSNIKPMNLIGVDRGENIPAVIALTDPEGCPLSRFKDSLGNPTHILRIGESYKEKQRTIQAKKEVEQRRAGGYSRKYASKAKNLADDMVRNTARDLLYYAVTQDAMLIFENLSRGFGRQGKRTFMAERQYTRMEDWLTAKLAYEGLPSKTYLSKTLAQYTSKTCSNCGFTITSADYDRVLEKLKKTATGWMTTINGKELKVEGQITYYNRYKRQNVVKDLSVELDRLSEESVNNDISSWTKGRSGEALSLLKKRFSHRPVQEKFVCLNCGFETHADEQAALNIARSWLFLRSQEYKKYQTNKTTGNTDKRAFVETWQSFYRKKLKEVWKPAV

SEQ ID NO: 48143 - protein, 977 aa, synthetic construct
  REGION 1..977: note = engineered CasX variant
QEIKRINKIRRRLVKDSNTKKAGKTGPMKTLLVRVMTPDLRERLENLRKKPENIPQPISNTSRANLNKLLTDYTEMKKAILHVYWEEFQKDPVGLMSRVAQPASKKIDQNKLKPEMDEKGNLTTAGFACSQCGQPLFVYKLEQVSEKGKAYTNYFGRCNVAEHEKLILLAQLKPEKDSDEAVTYSLGKFGQRALDFYSIHVTKESTHPVKPLAQIAGNRYASPVGKALSDACMGTIASFLSKYQDIIIEHQKVVKGNQKRLESLRELAGKENLEYPSVTLPPQPHTKEGVDAYNEVIARVRMWVNLNLWQKLKLSRDDAKPLLRLKKFPSFPLVERQANEVDWWDMVCNVKKLINEKKEDGKVFWQNLAGYKRQEALRPYLSSEEDRKKGKKFARYQLGDLLLHLEKKHPEDWGKVYDEAWERIDKKVEGLSKHIKLEEERRSEDAQSKAALTDWLRAKASFVIEGLKEADKDEFCRCELKLQKWYGDLRGKPFAIEAENSILDISGFSKQYNCAFIWQKDGVKKLNLYLIINYFKGGKLRFKKIKPEAFEANRFYTVINKKSGEIVPMEVNFNFDDPNLIILPLAFGKRQGREFIWNDLLSLETGSLKLANGRVIEKTLYNRRTRQDEPALFVALTFERREVLDSSNIKPMNLIGVDRGENIPAVIALTDPEGCPLSRFKDSLGNPTHILRIGESYKEKQRTIQAKKEVEQRRAGGYSRKYASKAKNLADDMVRNTARDLLYYAVTQDAMLIFENLSRGFGRQGKRTFMAERQYTRMEDWLTAKLAYEGLPSKTYLSKTLAQYTSKTCSNCGFTITSADYDRVLEKLKKTATGWMTTINGKELKVEGQITYYNRYKRQNVVKDLSVELDRLSEESVNNDISSWTKGRSGEALSLLKKRFSHRPVQEKFVCLNCGFETHADEQAALNIARSWLFLRSQEYKKYQTNKTTGNTDKRAFVETWQSFYRKKLKEVWKPAV

SEQ ID NO: 48144 - protein, 979 aa, synthetic construct
  REGION 1..979: note = engineered CasX variant
QEIKRINKIRRRLVKDSNTKKAGKTGPMKTLLVRVMTPDLRERLENLRKKPENIPQPISNTSRANLNKLLTDYTEMKKAILHVYWEEFQKDPVGLMSRVAQPASKKIDQNKLKPEMDEKGNLTTAGFACSQCGQPLFVYKLEQVSEKGKAYTNYFGRCNVAEHEKLILLAQLKPEKDSDEAVTYSLGKFGQRALDFYSIHVTKESTHPVKPLAQIAGNRYASYPVGKALSDACMGTIASFLSKYQDIIIEHQKVVKGNQKRLESLRELAGKENLEYPSVTLPPQPHTKEGVDAYNEVIARVRMWVNLNLWQKLKLSRDDAKPLLRLKKFPSFPLVERQANEVDWWDMVCNVKKLINEKKEDGKVFWQNLAGYKRQEALRPYLSSEEDRKKGKKFARYQLGDLLLHLEKKHGERDWGKVYDEAWERIDKKVEGLSKHIKLEEERRSEDAQSKAALTDWLRAKASFVIEGLKEADKDEFCRCELKLQKWYGDLRGKPFAIEAENSILDISGFSKQYNCAFIWQKDGVKKLNLYLIINYFKGGKLRFKKIKPEAFEANRFYTVINKKSGEIVPMEVNFNFDDPNLIILPLAFGKRQGREFIWNDLLSLETGSLKLANGRVIEKTLYNRRTRQDEPALFVALTFERREVLDSSNIKPMNLIGVDRGENIPAVIALTDPEGCPLSRFKDSLGNPTHILRIGESYKEKQRTIQAKKEVEQRRAGGYSRKYASKAKNLADDMVRNTARDLLYYAVTQDAMLIFENLSRGFGRQGKRTFMAERQYTRMEDWLTAKLAYEGLPSKTYLSKTLAQYTSKTCSNCGFTITSADYDRVLEKLKKTATGWMTTINGKELKVEGQITYYNRYKRQNVVKDLSVELDRLSEESVNNDISSWTKGRSGEALSLLKKRFSHRPVQEKFVCLNCGFETHADEQAALNIARSWLFLRSQEYKKYQTNKTTGNTDKRAFVETWQSFYRKKLKEVWKPAV

SEQ ID NO: 48145 - protein, 979 aa, synthetic construct
  REGION 1..979: note = engineered CasX variant
QEIKRINKIRRRLVKDSNTKKAGKTGPMKTLLVRVMTPDLRERLENLRKKPENIPQPISNTSRANLNKLLTDYTEMKKAILHVYWEEFQKDPVGLMSRVAQPASKKIDQNKLKPEMDEKGNLTTAGFACSQCGQPLFVYKLEQVSEKGKAYTNYFGRCNVAEHEKLILLAQLKPEKDSDEAVTYSLGKFGQRALDFYSIHVTKESTHPVKPLAQIAGNRYASHPVGKALSDACMGTIASFLSKYQDIIIEHQKVVKGNQKRLESLRELAGKENLEYPSVTLPPQPHTKEGVDAYNEVIARVRMWVNLNLWQKLKLSRDDAKPLLRLKKFPSFPLVERQANEVDWWDMVCNVKKLINEKKEDGKVFWQNLAGYKRQEALRPYLSSEEDRKKGKKFARYQLGDLLLHLEKKHGERDWGKVYDEAWERIDKKVEGLSKHIKLEEERRSEDAQSKAALTDWLRAKASFVIEGLKEADKDEFCRCELKLQKWYGDLRGKPFAIEAENSILDISGFSKQYNCAFIWQKDGVKKLNLYLIINYFKGGKLRFKKIKPEAFEANRFYTVINKKSGEIVPMEVNFNFDDPNLIILPLAFGKRQGREFIWNDLLSLETGSLKLANGRVIEKTLYNRRTRQDEPALFVALTFERREVLDSSNIKPMNLIGVDRGENIPAVIALTDPEGCPLSRFKDSLGNPTHILRIGESYKEKQRTIQAKKEVEQRRAGGYSRKYASKAKNLADDMVRNTARDLLYYAVTQDAMLIFENLSRGFGRQGKRTFMAERQYTRMEDWLTAKLAYEGLPSKTYLSKTLAQYTSKTCSNCGFTITSADYDRVLEKLKKTATGWMTTINGKELKVEGQITYYNRYKRQNVVKDLSVELDRLSEESVNNDISSWTKGRSGEALSLLKKRFSHRPVQEKFVCLNCGFETHADEQAALNIARSWLFLRSQEYKKYQTNKTTGNTDKRAFVETWQSFYRKKLKEVWKPAV

SEQ ID NO: 48146 - protein, 979 aa, synthetic construct
  REGION 1..979: note = engineered CasX variant
QEIKRINKIRRRLVKDSNTKKAGKTGPMKTLLVRVMTPDLRERLENLRKKPENIPQPISNTSRANLNKLLTDYTEMKKAILHVYWEEFQKDPVGLMSRVAQPASKKIDQNKLKPEMDEKGNLTTAGFACSQCGQPLFVYKLEQVSEKGKAYTNYFGRCNVAEHEKLILLAQLKPEKDSDEAVTYSLGKFGQRALDFYSIHVTKESTHPVKPLAQIAGNRYASSPVGKALSDACMGTIASFLSKYQDIIIEHQKVVKGNQKRLESLRELAGKENLEYPSVTLPPQPHTKEGVDAYNEVIARVRMWVNLNLWQKLKLSRDDAKPLLRLKKFPSFPLVERQANEVDWWDMVCNVKKLINEKKEDGKVFWQNLAGYKRQEALRPYLSSEEDRKKGKKFARYQLGDLLLHLEKKHGERDWGKVYDEAWERIDKKVEGLSKHIKLEEERRSEDAQSKAALTDWLRAKASFVIEGLKEADKDEFCRCELKLQKWYGDLRGKPFAIEAENSILDISGFSKQYNCAFIWQKDGVKKLNLYLIINYFKGGKLRFKKIKPEAFEANRFYTVINKKSGEIVPMEVNFNFDDPNLIILPLAFGKRQGREFIWNDLLSLETGSLKLANGRVIEKTLYNRRTRQDEPALFVALTFERREVLDSSNIKPMNLIGVDRGENIPAVIALTDPEGCPLSRFKDSLGNPTHILRIGESYKEKQRTIQAKKEVEQRRAGGYSRKYASKAKNLADDMVRNTARDLLYYAVTQDAMLIFENLSRGFGRQGKRTFMAERQYTRMEDWLTAKLAYEGLPSKTYLSKTLAQYTSKTCSNCGFTITSADYDRVLEKLKKTATGWMTTINGKELKVEGQITYYNRYKRQNVVKDLSVELDRLSEESVNNDISSWTKGRSGEALSLLKKRFSHRPVQEKFVCLNCGFETHADEQAALNIARSWLFLRSQEYKKYQTNKTTGNTDKRAFVETWQSFYRKKLKEVWKPAV

SEQ ID NO: 48147 - protein, 979 aa, synthetic construct
  REGION 1..979: note = engineered CasX variant
QEIKRINKIRRRLVKDSNTKKAGKTGPMKTLLVRVMTPDLRERLENLRKKPENIPQPISNTSRANLNKLLTDYTEMKKAILHVYWEEFQKDPVGLMSRVAQPASKKIDQNKLKPEMDEKGNLTTAGFACSQCGQPLFVYKLEQVSEKGKAYTNYFGRCNVAEHEKLILLAQLKPEKDSDEAVTYSLGKFGQRALDFYSIHVTKESTHPVKPLAQIAGNRYASTPVGKALSDACMGTIASFLSKYQDIIIEHQKVVKGNQKRLESLRELAGKENLEYPSVTLPPQPHTKEGVDAYNEVIARVRMWVNLNLWQKLKLSRDDAKPLLRLKKFPSFPLVERQANEVDWWDMVCNVKKLINEKKEDGKVFWQNLAGYKRQEALRPYLSSEEDRKKGKKFARYQLGDLLLHLEKKHGERDWGKVYDEAWERIDKKVEGLSKHIKLEEERRSEDAQSKAALTDWLRAKASFVIEGLKEADKDEFCRCELKLQKWYGDLRGKPFAIEAENSILDISGFSKQYNCAFIWQKDGVKKLNLYLIINYFKGGKLRFKKIKPEAFEANRFYTVINKKSGEIVPMEVNFNFDDPNLIILPLAFGKRQGREFIWNDLLSLETGSLKLANGRVIEKTLYNRRTRQDEPALFVALTFERREVLDSSNIKPMNLIGVDRGENIPAVIALTDPEGCPLSRFKDSLGNPTHILRIGESYKEKQRTIQAKKEVEQRRAGGYSRKYASKAKNLADDMVRNTARDLLYYAVTQDAMLIFENLSRGFGRQGKRTFMAERQYTRMEDWLTAKLAYEGLPSKTYLSKTLAQYTSKTCSNCGFTITSADYDRVLEKLKKTATGWMTTINGKELKVEGQITYYNRYKRQNVVKDLSVELDRLSEESVNNDISSWTKGRSGEALSLLKKRFSHRPVQEKFVCLNCGFETHADEQAALNIARSWLFLRSQEYKKYQTNKTTGNTDKRAFVETWQSFYRKKLKEVWKPAV

SEQ ID NO: 48148 - protein, 979 aa, synthetic construct
  REGION 1..979: note = engineered CasX variant
QEIKRINKIRRRLVKDSNTKKAGKTGPMKTLLVRVMTPDLRERLENLRKKPENIPQPISNTSRANLNKLLTDYTEMKKAILHVYWEEFQKDPVGLMSRVAQPASKKIDQNKLKPEMDEKGNLTTAGFACSQCGQPLFVYKLEQVSEKGKAYTNYFGRCNVAEHEKLILLAQLKPEKDSDEAVTYSLGKFGQRALDFYSIHVTKESTHPVKPLAQIAGNRYASAPVGKALSDACMGTIASFLSKYQDIIIEHQKVVKGNQKRLESLRELAGKENLEYPSVTLPPQPHTKEGVDAYNEVIARVRMWVNLNLWQKLKLSRDDAKPLLRLKKFPSFPLVERQANEVDWWDMVCNVKKLINEKKEDGKVFWQNLAGYKRQEALRPYLSSEEDRKKGKKFARYQLGDLLLHLEKKHGERDWGKVYDEAWERIDKKVEGLSKHIKLEEERRSEDAQSKAALTDWLRAKASFVIEGLKEADKDEFCRCELKLQKWYGDLRGKPFAIEAENSILDISGFSKQYNCAFIWQKDGVKKLNLYLIINYFKGGKLRFKKIKPEAFEANRFYTVINKKSGEIVPMEVNFNFDDPNLIILPLAFGKRQGREFIWNDLLSLETGSLKLANGRVIEKTLYNRRTRQDEPALFVALTFERREVLDSSNIKPMNLIGVDRGENIPAVIALTDPEGCPLSRFKDSLGNPTHILRIGESYKEKQRTIQAKKEVEQRRAGGYSRKYASKAKNLADDMVRNTARDLLYYAVTQDAMLIFENLSRGFGRQGKRTFMAERQYTRMEDWLTAKLAYEGLPSKTYLSKTLAQYTSKTCSNCGFTITSADYDRVLEKLKKTATGWMTTINGKELKVEGQITYYNRYKRQNVVKDLSVELDRLSEESVNNDISSWTKGRSGEALSLLKKRFSHRPVQEKFVCLNCGFETHADEQAALNIARSWLFLRSQEYKKYQTNKTTGNTDKRAFVETWQSFYRKKLKEVWKPAV

SEQ ID NO: 48149 - protein, 979 aa, synthetic construct
  REGION 1..979: note = engineered CasX variant
QEIKRINKIRRRLVKDSNTKKAGKTGPMKTLLVRVMTPDLRERLENLRKKPENIPQPISNTSRANLNKLLTDYTEMKKAILHVYWEEFQKDPVGLMSRVAQPASKKIDQNKLKPEMDEKGNLTTAGFACSQCGQPLFVYKLEQVSEKGKAYTNYFGRCNVAEHEKLILLAQLKPEKDSDEAVTYSLGKFGQRALDFYSIHVTKESTHPVKPLAQIAGNRYASVPVGKALSDACMGTIASFLSKYQDIIIEHQKVVKGNQKRLESLRELAGKENLEYPSVTLPPQPHTKEGVDAYNEVIARVRMWVNLNLWQKLKLSRDDAKPLLRLKKFPSFPLVERQANEVDWWDMVCNVKKLINEKKEDGKVFWQNLAGYKRQEALRPYLSSEEDRKKGKKFARYQLGDLLLHLEKKHGERDWGKVYDEAWERIDKKVEGLSKHIKLEEERRSEDAQSKAALTDWLRAKASFVIEGLKEADKDEFCRCELKLQKWYGDLRGKPFAIEAENSILDISGFSKQYNCAFIWQKDGVKKLNLYLIINYFKGGKLRFKKIKPEAFEANRFYTVINKKSGEIVPMEVNFNFDDPNLIILPLAFGKRQGREFIWNDLLSLETGSLKLANGRVIEKTLYNRRTRQDEPALFVALTFERREVLDSSNIKPMNLIGVDRGENIPAVIALTDPEGCPLSRFKDSLGNPTHILRIGESYKEKQRTIQAKKEVEQRRAGGYSRKYASKAKNLADDMVRNTARDLLYYAVTQDAMLIFENLSRGFGRQGKRTFMAERQYTRMEDWLTAKLAYEGLPSKTYLSKTLAQYTSKTCSNCGFTITSADYDRVLEKLKKTATGWMTTINGKELKVEGQITYYNRYKRQNVVKDLSVELDRLSEESVNNDISSWTKGRSGEALSLLKKRFSHRPVQEKFVCLNCGFETHADEQAALNIARSWLFLRSQEYKKYQTNKTTGNTDKRAFVETWQSFYRKKLKEVWKPAV

SEQ ID NO: 48150 - protein, 979 aa, synthetic construct
  REGION 1..979: note = engineered CasX variant
QEIKRINKIRRRLVKDSNTKKAGKTGPMKTLLVRVMTPDLRERLENLRKKPENIPQPISNTSRANLNKLLTDYTEMKKAILHVYWEEFQKDPVGLMSRVAQPASKKIDQNKLKPEMDEKGNLTTAGFACSQCGQPLFVYKLEQVSEKGKAYTNYFGRCNVAEHEKLIKLAQLKPEKDSDEAVTYSLGKFGQRALDFYSIHVTKESTHPVKPLAQIAGNRYASGPVGKALSDACMGTIASFLSKYQDIIIEHQKVVKGNQKRLESLRELAGKENLEYPSVTLPPQPHTKEGVDAYNEVIARVRMWVNLNLWQKLKLSRDDAKPLLRLKKFPSFPLVERQANEVDWWDMVCNVKKLINEKKEDGKVFWQNLAGYKRQEALRPYLSSEEDRKKGKKFARYQLGDLLLHLEKKHGERDWGKVYDEAWERIDKKVEGLSKHIKLEEERRSEDAQSKAALTDWLRAKASFVIEGLKEADKDEFCRCELKLQKWYGDLRGKPFAIEAENSILDISGFSKQYNCAFIWQKDGVKKLNLYLIINYFKGGKLRFKKIKPEAFEANRFYTVINKKSGEIVPMEVNFNFDDPNLIILPLAFGKRQGREFIWNDLLSLETGSLKLANGRVIEKTLYNRRTRQDEPALFVALTFERREVLDSSNIKPMNLIGVDRGENIPAVIALTDPEGCPLSRFKDSLGNPTHILRIGESYKEKQRTIQAKKEVEQRRAGGYSRKYASKAKNLADDMVRNTARDLLYYAVTQDAMLIFENLSRGFGRQGKRTFMAERQYTRMEDWLTAKLAYEGLPSKTYLSKTLAQYTSKTCSNCGFTITSADYDRVLEKLKKTATGWMTTINGKELKVEGQITYYNRYKRQNVVKDLSVELDRLSEESVNNDISSWTKGRSGEALSLLKKRFSHRPVQEKFVCLNCGFETHADEQAALNIARSWLFLRSQEYKKYQTNKTTGNTDKRAFVETWQSFYRKKLKEVWKPAV

SEQ ID NO: 48151 - protein, 978 aa, synthetic construct
  REGION 1..978: note = engineered CasX variant
QEIKRINKIRRRLVKDSNTKKAGKTGPMKTLLVRVMTPDLRERLENLRKKPENIPQPISNTSRANLNKLLTDYTEMKKAILHVYWEEFQKDPVGLMSRVAQPASKKIDQNKLKPEMDEKGNLTTAGFACSQCGQPLFVYKLEQVSEKGKAYTNYFGRCNVAEHEKLILLAQLKPEKDSDEAVTYSLGKFGQRALDFYSIHVTKESTHPVKPLAQIAGNRYASPVGKALSDACMGTIASFLSKYQDIIIEHQKVVKGNQKRLESLRELAGKENLEYPSVTLPPQPHTKEGVDAYNEVIARVRMWVNLNLWQKLKLSRDDAKPLLRLKKFPSFPLVERQANEVDWWDMVCNVKKLINEKKEDGKVFWQNLAGYKRQEALRPYLSSEEDRKKGKKFARYQLGDLLLHLEKKHGERDWGKVYDEAWERIDKKVEGLSKHIKLEEERRSEDAQSKAALTDWLRAKASFVIEGLKEADKDEFCRCELKLQKWYGDLRGKPFAIEAENSILDISGFSKQYNCAFIWQKDGVKKLNLYLIINYFKGGKLRFKKIKPEAFEANRFYTVINKKSGEIVPMEVNFNFDDPNLIILPLAFGKRQGREFIWNDLLSLETGSLKLANGRVIEKTLYNRRTRQDEPALFVALTFERREVLDSSNIKPMNLIGVDRGENIPAVIALTDPEGCPLSRFKDSLGNPTHILRIGESYKEKQRTIQAKKEVEQRRAGGYSRKYASKAKNLADDMVRNTARDLLYYAVTQDAMLIFENLSRGFGRQGKRTFMAERQYTRMEDWLTAKLAYEGLPSKTYLSKTLAQYTSKTCSNCGFTITSADYDRVLEKLKKTATGWMTTINGKELKVEGQITYYNRYKRQNVVKDLSVELDRLSEESVNNDISSWTKGRSGEALSLLKKRFSHRPVQEKFVCLNCGFETHADEQAALNIARSWLFLRSQEYKKYQTNKTTGNTDKRAFVETWQSFYRKKLKEVWKPAV

SEQ ID NO: 48152 - protein, 979 aa, synthetic construct
  REGION 1..979: note = engineered CasX variant
QEIKRINKIRRRLVKDSNTKKAGKTGPMKTLLVRVMTPDLRERLENLRKKPENIPQPISNTSRANLNKLLTDYTEMKKAILHVYWEEFQKDPVGLMSRVAQPASKKIDQNKLKPEMDEKGNLTTAGFACSQCGQPLFVYKLEQVSEKGKAYTNYFGRCNVAEHEKLILLAQLKPEKDSDEAVTYSLGKFGQRALDFYSIHVTKESTHPVKPLAQIAGNRYASYPVGKALSDACMGTIASFLSKYQDIIIEHQKVVKGNQKRLESLRELAGKENLEYPSVTLPPQPHTKEGVDAYNEVIARVRMWVNLNLWQKLKLSRDDAKPLLRLKKFPSFPLVERQANEVDWWDMVCNVKKLINEKKEDGKVFWQNLAGYKRQEALRPYLSSEEDRKKGKKFARYQLGDLLLHLEKKHGEYDWGKVYDEAWERIDKKVEGLSKHIKLEEERRSEDAQSKAALTDWLRAKASFVIEGLKEADKDEFCRCELKLQKWYGDLRGKPFAIEAENSILDISGFSKQYNCAFIWQKDGVKKLNLYLIINYFKGGKLRFKKIKPEAFEANRFYTVINKKSGEIVPMEVNFNFDDPNLIILPLAFGKRQGREFIWNDLLSLETGSLKLANGRVIEKTLYNRRTRQDEPALFVALTFERREVLDSSNIKPMNLIGVDRGENIPAVIALTDPEGCPLSRFKDSLGNPTHILRIGESYKEKQRTIQAKKEVEQRRAGGYSRKYASKAKNLADDMVRNTARDLLYYAVTQDAMLIFENLSRGFGRQGKRTFMAERQYTRMEDWLTAKLAYEGLPSKTYLSKTLAQYTSKTCSNCGFTITSADYDRVLEKLKKTATGWMTTINGKELKVEGQITYYNRYKRQNVVKDLSVELDRLSEESVNNDISSWTKGRSGEALSLLKKRFSHRPVQEKFVCLNCGFETHADEQAALNIARSWLFLRSQEYKKYQTNKTTGNTDKRAFVETWQSFYRKKLKEVWKPAV

SEQ ID NO: 48153 - protein, 979 aa, synthetic construct
  REGION 1..979: note = engineered CasX variant
QEIKRINKIRRRLVKDSNTKKAGKTGPMKTLLVRVMTPDLRERLENLRKKPENIPQPISNTSRANLNKLLTDYTEMKKAILHVYWEEFQKDPVGLMSRVAQPASKKIDQNKLKPEMDEKGNLTTAGFACSQCGQPLFVYKLEQVSEKGKAYTNYFGRCNVAEHEKLILLAQLKPEKDSDEAVTYSLGKFGQRALDFYSIHVTKESTHPVKPLAQIAGNRYASHPVGKALSDACMGTIASFLSKYQDIIIEHQKVVKGNQKRLESLRELAGKENLEYPSVTLPPQPHTKEGVDAYNEVIARVRMWVNLNLWQKLKLSRDDAKPLLRLKKFPSFPLVERQANEVDWWDMVCNVKKLINEKKEDGKVFWQNLAGYKRQEALRPYLSSEEDRKKGKKFARYQLGDLLLHLEKKHGEYDWGKVYDEAWERIDKKVEGLSKHIKLEEERRSEDAQSKAALTDWLRAKASFVIEGLKEADKDEFCRCELKLQKWYGDLRGKPFAIEAENSILDISGFSKQYNCAFIWQKDGVKKLNLYLIINYFKGGKLRFKKIKPEAFEANRFYTVINKKSGEIVPMEVNFNFDDPNLIILPLAFGKRQGREFIWNDLLSLETGSLKLANGRVIEKTLYNRRTRQDEPALFVALTFERREVLDSSNIKPMNLIGVDRGENIPAVIALTDPEGCPLSRFKDSLGNPTHILRIGESYKEKQRTIQAKKEVEQRRAGGYSRKYASKAKNLADDMVRNTARDLLYYAVTQDAMLIFENLSRGFGRQGKRTFMAERQYTRMEDWLTAKLAYEGLPSKTYLSKTLAQYTSKTCSNCGFTITSADYDRVLEKLKKTATGWMTTINGKELKVEGQITYYNRYKRQNVVKDLSVELDRLSEESVNNDISSWTKGRSGEALSLLKKRFSHRPVQEKFVCLNCGFETHADEQAALNIARSWLFLRSQEYKKYQTNKTTGNTDKRAFVETWQSFYRKKLKEVWKPAV

SEQ ID NO: 48154 - protein, 979 aa, synthetic construct
  REGION 1..979: note = engineered CasX variant
QEIKRINKIRRRLVKDSNTKKAGKTGPMKTLLVRVMTPDLRERLENLRKKPENIPQPISNTSRANLNKLLTDYTEMKKAILHVYWEEFQKDPVGLMSRVAQPASKKIDQNKLKPEMDEKGNLTTAGFACSQCGQPLFVYKLEQVSEKGKAYTNYFGRCNVAEHEKLILLAQLKPEKDSDEAVTYSLGKFGQRALDFYSIHVTKESTHPVKPLAQIAGNRYASSPVGKALSDACMGTIASFLSKYQDIIIEHQKVVKGNQKRLESLRELAGKENLEYPSVTLPPQPHTKEGVDAYNEVIARVRMWVNLNLWQKLKLSRDDAKPLLRLKKFPSFPLVERQANEVDWWDMVCNVKKLINEKKEDGKVFWQNLAGYKRQEALRPYLSSEEDRKKGKKFARYQLGDLLLHLEKKHGEYDWGKVYDEAWERIDKKVEGLSKHIKLEEERRSEDAQSKAALTDWLRAKASFVIEGLKEADKDEFCRCELKLQKWYGDLRGKPFAIEAENSILDISGFSKQYNCAFIWQKDGVKKLNLYLIINYFKGGKLRFKKIKPEAFEANRFYTVINKKSGEIVPMEVNFNFDDPNLIILPLAFGKRQGREFIWNDLLSLETGSLKLANGRVIEKTLYNRRTRQDEPALFVALTFERREVLDSSNIKPMNLIGVDRGENIPAVIALTDPEGCPLSRFKDSLGNPTHILRIGESYKEKQRTIQAKKEVEQRRAGGYSRKYASKAKNLADDMVRNTARDLLYYAVTQDAMLIFENLSRGFGRQGKRTFMAERQYTRMEDWLTAKLAYEGLPSKTYLSKTLAQYTSKTCSNCGFTITSADYDRVLEKLKKTATGWMTTINGKELKVEGQITYYNRYKRQNVVKDLSVELDRLSEESVNNDISSWTKGRSGEALSLLKKRFSHRPVQEKFVCLNCGFETHADEQAALNIARSWLFLRSQEYKKYQTNKTTGNTDKRAFVETWQSFYRKKLKEVWKPAV

SEQ ID NO: 48155 - protein, 979 aa, synthetic construct
  REGION 1..979: note = engineered CasX variant
QEIKRINKIRRRLVKDSNTKKAGKTGPMKTLLVRVMTPDLRERLENLRKKPENIPQPISNTSRANLNKLLTDYTEMKKAILHVYWEEFQKDPVGLMSRVAQPASKKIDQNKLKPEMDEKGNLTTAGFACSQCGQPLFVYKLEQVSEKGKAYTNYFGRCNVAEHEKLILLAQLKPEKDSDEAVTYSLGKFGQRALDFYSIHVTKESTHPVKPLAQIAGNRYASTPVGKALSDACMGTIASFLSKYQDIIIEHQKVVKGNQKRLESLRELAGKENLEYPSVTLPPQPHTKEGVDAYNEVIARVRMWVNLNLWQKLKLSRDDAKPLLRLKKFPSFPLVERQANEVDWWDMVCNVKKLINEKKEDGKVFWQNLAGYKRQEALRPYLSSEEDRKKGKKFARYQLGDLLLHLEKKHGEYDWGKVYDEAWERIDKKVEGLSKHIKLEEERRSEDAQSKAALTDWLRAKASFVIEGLKEADKDEFCRCELKLQKWYGDLRGKPFAIEAENSILDISGFSKQYNCAFIWQKDGVKKLNLYLIINYFKGGKLRFKKIKPEAFEANRFYTVINKKSGEIVPMEVNFNFDDPNLIILPLAFGKRQGREFIWNDLLSLETGSLKLANGRVIEKTLYNRRTRQDEPALFVALTFERREVLDSSNIKPMNLIGVDRGENIPAVIALTDPEGCPLSRFKDSLGNPTHILRIGESYKEKQRTIQAKKEVEQRRAGGYSRKYASKAKNLADDMVRNTARDLLYYAVTQDAMLIFENLSRGFGRQGKRTFMAERQYTRMEDWLTAKLAYEGLPSKTYLSKTLAQYTSKTCSNCGFTITSADYDRVLEKLKKTATGWMTTINGKELKVEGQITYYNRYKRQNVVKDLSVELDRLSEESVNNDISSWTKGRSGEALSLLKKRFSHRPVQEKFVCLNCGFETHADEQAALNIARSWLFLRSQEYKKYQTNKTTGNTDKRAFVETWQSFYRKKLKEVWKPAV

SEQ ID NO: 48156 - protein, 979 aa, synthetic construct
  REGION 1..979: note = engineered CasX variant
QEIKRINKIRRRLVKDSNTKKAGKTGPMKTLLVRVMTPDLRERLENLRKKPENIPQPISNTSRANLNKLLTDYTEMKKAILHVYWEEFQKDPVGLMSRVAQPASKKIDQNKLKPEMDEKGNLTTAGFACSQCGQPLFVYKLEQVSEKGKAYTNYFGRCNVAEHEKLILLAQLKPEKDSDEAVTYSLGKFGQRALDFYSIHVTKESTHPVKPLAQIAGNRYASAPVGKALSDACMGTIASFLSKYQDIIIEHQKVVKGNQKRLESLRELAGKENLEYPSVTLPPQPHTKEGVDAYNEVIARVRMWVNLNLWQKLKLSRDDAKPLLRLKKFPSFPLVERQANEVDWWDMVCNVKKLINEKKEDGKVFWQNLAGYKRQEALRPYLSSEEDRKKGKKFARYQLGDLLLHLEKKHGEYDWGKVYDEAWERIDKKVEGLSKHIKLEEERRSEDAQSKAALTDWLRAKASFVIEGLKEADKDEFCRCELKLQKWYGDLRGKPFAIEAENSILDISGFSKQYNCAFIWQKDGVKKLNLYLIINYFKGGKLRFKKIKPEAFEANRFYTVINKKSGEIVPMEVNFNFDDPNLIILPLAFGKRQGREFIWNDLLSLETGSLKLANGRVIEKTLYNRRTRQDEPALFVALTFERREVLDSSNIKPMNLIGVDRGENIPAVIALTDPEGCPLSRFKDSLGNPTHILRIGESYKEKQRTIQAKKEVEQRRAGGYSRKYASKAKNLADDMVRNTARDLLYYAVTQDAMLIFENLSRGFGRQGKRTFMAERQYTRMEDWLTAKLAYEGLPSKTYLSKTLAQYTSKTCSNCGFTITSADYDRVLEKLKKTATGWMTTINGKELKVEGQITYYNRYKRQNVVKDLSVELDRLSEESVNNDISSWTKGRSGEALSLLKKRFSHRPVQEKFVCLNCGFETHADEQAALNIARSWLFLRSQEYKKYQTNKTTGNTDKRAFVETWQSFYRKKLKEVWKPAV

SEQ ID NO: 48157 - protein, 979 aa, synthetic construct
  REGION 1..979: note = engineered CasX variant
QEIKRINKIRRRLVKDSNTKKAGKTGPMKTLLVRVMTPDLRERLENLRKKPENIPQPISNTSRANLNKLLTDYTEMKKAILHVYWEEFQKDPVGLMSRVAQPASKKIDQNKLKPEMDEKGNLTTAGFACSQCGQPLFVYKLEQVSEKGKAYTNYFGRCNVAEHEKLILLAQLKPEKDSDEAVTYSLGKFGQRALDFYSIHVTKESTHPVKPLAQIAGNRYASVPVGKALSDACMGTIASFLSKYQDIIIEHQKVVKGNQKRLESLRELAGKENLEYPSVTLPPQPHTKEGVDAYNEVIARVRMWVNLNLWQKLKLSRDDAKPLLRLKKFPSFPLVERQANEVDWWDMVCNVKKLINEKKEDGKVFWQNLAGYKRQEALRPYLSSEEDRKKGKKFARYQLGDLLLHLEKKHGEYDWGKVYDEAWERIDKKVEGLSKHIKLEEERRSEDAQSKAALTDWLRAKASFVIEGLKEADKDEFCRCELKLQKWYGDLRGKPFAIEAENSILDISGFSKQYNCAFIWQKDGVKKLNLYLIINYFKGGKLRFKKIKPEAFEANRFYTVINKKSGEIVPMEVNFNFDDPNLIILPLAFGKRQGREFIWNDLLSLETGSLKLANGRVIEKTLYNRRTRQDEPALFVALTFERREVLDSSNIKPMNLIGVDRGENIPAVIALTDPEGCPLSRFKDSLGNPTHILRIGESYKEKQRTIQAKKEVEQRRAGGYSRKYASKAKNLADDMVRNTARDLLYYAVTQDAMLIFENLSRGFGRQGKRTFMAERQYTRMEDWLTAKLAYEGLPSKTYLSKTLAQYTSKTCSNCGFTITSADYDRVLEKLKKTATGWMTTINGKELKVEGQITYYNRYKRQNVVKDLSVELDRLSEESVNNDISSWTKGRSGEALSLLKKRFSHRPVQEKFVCLNCGFETHADEQAALNIARSWLFLRSQEYKKYQTNKTTGNTDKRAFVETWQSFYRKKLKEVWKPAV

SEQ ID NO: 48158 - protein, 979 aa, synthetic construct
  REGION 1..979: note = engineered CasX variant
QEIKRINKIRRRLVKDSNTKKAGKTGPMKTLLVRVMTPDLRERLENLRKKPENIPQPISNTSRANLNKLLTDYTEMKKAILHVYWEEFQKDPVGLMSRVAQPASKKIDQNKLKPEMDEKGNLTTAGFACSQCGQPLFVYKLEQVSEKGKAYTNYFGRCNVAEHEKLIKLAQLKPEKDSDEAVTYSLGKFGQRALDFYSIHVTKESTHPVKPLAQIAGNRYASGPVGKALSDACMGTIASFLSKYQDIIIEHQKVVKGNQKRLESLRELAGKENLEYPSVTLPPQPHTKEGVDAYNEVIARVRMWVNLNLWQKLKLSRDDAKPLLRLKKFPSFPLVERQANEVDWWDMVCNVKKLINEKKEDGKVFWQNLAGYKRQEALRPYLSSEEDRKKGKKFARYQLGDLLLHLEKKHGEYDWGKVYDEAWERIDKKVEGLSKHIKLEEERRSEDAQSKAALTDWLRAKASFVIEGLKEADKDEFCRCELKLQKWYGDLRGKPFAIEAENSILDISGFSKQYNCAFIWQKDGVKKLNLYLIINYFKGGKLRFKKIKPEAFEANRFYTVINKKSGEIVPMEVNFNFDDPNLIILPLAFGKRQGREFIWNDLLSLETGSLKLANGRVIEKTLYNRRTRQDEPALFVALTFERREVLDSSNIKPMNLIGVDRGENIPAVIALTDPEGCPLSRFKDSLGNPTHILRIGESYKEKQRTIQAKKEVEQRRAGGYSRKYASKAKNLADDMVRNTARDLLYYAVTQDAMLIFENLSRGFGRQGKRTFMAERQYTRMEDWLTAKLAYEGLPSKTYLSKTLAQYTSKTCSNCGFTITSADYDRVLEKLKKTATGWMTTINGKELKVEGQITYYNRYKRQNVVKDLSVELDRLSEESVNNDISSWTKGRSGEALSLLKKRFSHRPVQEKFVCLNCGFETHADEQAALNIARSWLFLRSQEYKKYQTNKTTGNTDKRAFVETWQSFYRKKLKEVWKPAV

SEQ ID NO: 48159 - protein, 978 aa, synthetic construct
  REGION 1..978: note = engineered CasX variant
QEIKRINKIRRRLVKDSNTKKAGKTGPMKTLLVRVMTPDLRERLENLRKKPENIPQPISNTSRANLNKLLTDYTEMKKAILHVYWEEFQKDPVGLMSRVAQPASKKIDQNKLKPEMDEKGNLTTAGFACSQCGQPLFVYKLEQVSEKGKAYTNYFGRCNVAEHEKLILLAQLKPEKDSDEAVTYSLGKFGQRALDFYSIHVTKESTHPVKPLAQIAGNRYASPVGKALSDACMGTIASFLSKYQDIIIEHQKVVKGNQKRLESLRELAGKENLEYPSVTLPPQPHTKEGVDAYNEVIARVRMWVNLNLWQKLKLSRDDAKPLLRLKKFPSFPLVERQANEVDWWDMVCNVKKLINEKKEDGKVFWQNLAGYKRQEALRPYLSSEEDRKKGKKFARYQLGDLLLHLEKKHGEYDWGKVYDEAWERIDKKVEGLSKHIKLEEERRSEDAQSKAALTDWLRAKASFVIEGLKEADKDEFCRCELKLQKWYGDLRGKPFAIEAENSILDISGFSKQYNCAFIWQKDGVKKLNLYLIINYFKGGKLRFKKIKPEAFEANRFYTVINKKSGEIVPMEVNFNFDDPNLIILPLAFGKRQGREFIWNDLLSLETGSLKLANGRVIEKTLYNRRTRQDEPALFVALTFERREVLDSSNIKPMNLIGVDRGENIPAVIALTDPEGCPLSRFKDSLGNPTHILRIGESYKEKQRTIQAKKEVEQRRAGGYSRKYASKAKNLADDMVRNTARDLLYYAVTQDAMLIFENLSRGFGRQGKRTFMAERQYTRMEDWLTAKLAYEGLPSKTYLSKTLAQYTSKTCSNCGFTITSADYDRVLEKLKKTATGWMTTINGKELKVEGQITYYNRYKRQNVVKDLSVELDRLSEESVNNDISSWTKGRSGEALSLLKKRFSHRPVQEKFVCLNCGFETHADEQAALNIARSWLFLRSQEYKKYQTNKTTGNTDKRAFVETWQSFYRKKLKEVWKPAV

SEQ ID NO: 48160 - protein, 978 aa, synthetic construct
  REGION 1..978: note = engineered CasX variant
QEIKRINKIRRRLVKDSNTKKAGKTGPMKTLLVRVMTPDLRERLENLRKKPENIPQPISNTSRANLNKLLTDYTEMKKAILHVYWEEFQKDPVGLMSRVAQPASKKIDQNKLKPEMDEKGNLTTAGFACSQCGQPLFVYKLEQVSEKGKAYTNYFGRCNVAEHEKLILLAQLKPEKDSDEAVTYSLGKFGQRALDFYSIHVTKESTHPVKPLAQIAGNRYASYPVGKALSDACMGTIASFLSKYQDIIIEHQKVVKGNQKRLESLRELAGKENLEYPSVTLPPQPHTKEGVDAYNEVIARVRMWVNLNLWQKLKLSRDDAKPLLRLKKFPSFPLVERQANEVDWWDMVCNVKKLINEKKEDGKVFWQNLAGYKRQEALRPYLSSEEDRKKGKKFARYQLGDLLLHLEKKHGEDWGDVYDEAWERIDKKVEGLSKHIKLEEERRSEDAQSKAALTDWLRAKASFVIEGLKEADKDEFCRCELKLQKWYGDLRGKPFAIEAENSILDISGFSKQYNCAFIWQKDGVKKLNLYLIINYFKGGKLRFKKIKPEAFEANRFYTVINKKSGEIVPMEVNFNFDDPNLIILPLAFGKRQGREFIWNDLLSLETGSLKLANGRVIEKTLYNRRTRQDEPALFVALTFERREVLDSSNIKPMNLIGVDRGENIPAVIALTDPEGCPLSRFKDSLGNPTHILRIGESYKEKQRTIQAKKEVEQRRAGGYSRKYASKAKNLADDMVRNTARDLLYYAVTQDAMLIFENLSRGFGRQGKRTFMAERQYTRMEDWLTAKLAYEGLPSKTYLSKTLAQYTSKTCSNCGFTITSADYDRVLEKLKKTATGWMTTINGKELKVEGQITYYNRYKRQNVVKDLSVELDRLSEESVNNDISSWTKGRSGEALSLLKKRFSHRPVQEKFVCLNCGFETHADEQAALNIARSWLFLRSQEYKKYQTNKTTGNTDKRAFVETWQSFYRKKLKEVWKPAV

SEQ ID NO: 48161 - protein, 978 aa, synthetic construct
  REGION 1..978: note = engineered CasX variant
QEIKRINKIRRRLVKDSNTKKAGKTGPMKTLLVRVMTPDLRERLENLRKKPENIPQPISNTSRANLNKLLTDYTEMKKAILHVYWEEFQKDPVGLMSRVAQPASKKIDQNKLKPEMDEKGNLTTAGFACSQCGQPLFVYKLEQVSEKGKAYTNYFGRCNVAEHEKLILLAQLKPEKDSDEAVTYSLGKFGQRALDFYSIHVTKESTHPVKPLAQIAGNRYASHPVGKALSDACMGTIASFLSKYQDIIIEHQKVVKGNQKRLESLRELAGKENLEYPSVTLPPQPHTKEGVDAYNEVIARVRMWVNLNLWQKLKLSRDDAKPLLRLKKFPSFPLVERQANEVDWWDMVCNVKKLINEKKEDGKVFWQNLAGYKRQEALRPYLSSEEDRKKGKKFARYQLGDLLLHLEKKHGEDWGDVYDEAWERIDKKVEGLSKHIKLEEERRSEDAQSKAALTDWLRAKASFVIEGLKEADKDEFCRCELKLQKWYGDLRGKPFAIEAENSILDISGFSKQYNCAFIWQKDGVKKLNLYLIINYFKGGKLRFKKIKPEAFEANRFYTVINKKSGEIVPMEVNFNFDDPNLIILPLAFGKRQGREFIWNDLLSLETGSLKLANGRVIEKTLYNRRTRQDEPALFVALTFERREVLDSSNIKPMNLIGVDRGENIPAVIALTDPEGCPLSRFKDSLGNPTHILRIGESYKEKQRTIQAKKEVEQRRAGGYSRKYASKAKNLADDMVRNTARDLLYYAVTQDAMLIFENLSRGFGRQGKRTFMAERQYTRMEDWLTAKLAYEGLPSKTYLSKTLAQYTSKTCSNCGFTITSADYDRVLEKLKKTATGWMTTINGKELKVEGQITYYNRYKRQNVVKDLSVELDRLSEESVNNDISSWTKGRSGEALSLLKKRFSHRPVQEKFVCLNCGFETHADEQAALNIARSWLFLRSQEYKKYQTNKTTGNTDKRAFVETWQSFYRKKLKEVWKPAV

SEQ ID NO: 48162 - protein, 978 aa, synthetic construct
  REGION 1..978: note = engineered CasX variant
QEIKRINKIRRRLVKDSNTKKAGKTGPMKTLLVRVMTPDLRERLENLRKKPENIPQPISNTSRANLNKLLTDYTEMKKAILHVYWEEFQKDPVGLMSRVAQPASKKIDQNKLKPEMDEKGNLTTAGFACSQCGQPLFVYKLEQVSEKGKAYTNYFGRCNVAEHEKLILLAQLKPEKDSDEAVTYSLGKFGQRALDFYSIHVTKESTHPVKPLAQIAGNRYASSPVGKALSDACMGTIASFLSKYQDIIIEHQKVVKGNQKRLESLRELAGKENLEYPSVTLPPQPHTKEGVDAYNEVIARVRMWVNLNLWQKLKLSRDDAKPLLRLKKFPSFPLVERQANEVDWWDMVCNVKKLINEKKEDGKVFWQNLAGYKRQEALRPYLSSEEDRKKGKKFARYQLGDLLLHLEKKHGEDWGDVYDEAWERIDKKVEGLSKHIKLEEERRSEDAQSKAALTDWLRAKASFVIEGLKEADKDEFCRCELKLQKWYGDLRGKPFAIEAENSILDISGFSKQYNCAFIWQKDGVKKLNLYLIINYFKGGKLRFKKIKPEAFEANRFYTVINKKSGEIVPMEVNFNFDDPNLIILPLAFGKRQGREFIWNDLLSLETGSLKLANGRVIEKTLYNRRTRQDEPALFVALTFERREVLDSSNIKPMNLIGVDRGENIPAVIALTDPEGCPLSRFKDSLGNPTHILRIGESYKEKQRTIQAKKEVEQRRAGGYSRKYASKAKNLADDMVRNTARDLLYYAVTQDAMLIFENLSRGFGRQGKRTFMAERQYTRMEDWLTAKLAYEGLPSKTYLSKTLAQYTSKTCSNCGFTITSADYDRVLEKLKKTATGWMTTINGKELKVEGQITYYNRYKRQNVVKDLSVELDRLSEESVNNDISSWTKGRSGEALSLLKKRFSHRPVQEKFVCLNCGFETHADEQAALNIARSWLFLRSQEYKKYQTNKTTGNTDKRAFVETWQSFYRKKLKEVWKPAV

SEQ ID NO: 48163 - protein, 978 aa, synthetic construct
  REGION 1..978: note = engineered CasX variant
QEIKRINKIRRRLVKDSNTKKAGKTGPMKTLLVRVMTPDLRERLENLRKKPENIPQPISNTSRANLNKLLTDYTEMKKAILHVYWEEFQKDPVGLMSRVAQPASKKIDQNKLKPEMDEKGNLTTAGFACSQCGQPLFVYKLEQVSEKGKAYTNYFGRCNVAEHEKLILLAQLKPEKDSDEAVTYSLGKFGQRALDFYSIHVTKESTHPVKPLAQIAGNRYASTPVGKALSDACMGTIASFLSKYQDIIIEHQKVVKGNQKRLESLRELAGKENLEYPSVTLPPQPHTKEGVDAYNEVIARVRMWVNLNLWQKLKLSRDDAKPLLRLKKFPSFPLVERQANEVDWWDMVCNVKKLINEKKEDGKVFWQNLAGYKRQEALRPYLSSEEDRKKGKKFARYQLGDLLLHLEKKHGEDWGDVYDEAWERIDKKVEGLSKHIKLEEERRSEDAQSKAALTDWLRAKASFVIEGLKEADKDEFCRCELKLQKWYGDLRGKPFAIEAENSILDISGFSKQYNCAFIWQKDGVKKLNLYLIINYFKGGKLRFKKIKPEAFEANRFYTVINKKSGEIVPMEVNFNFDDPNLIILPLAFGKRQGREFIWNDLLSLETGSLKLANGRVIEKTLYNRRTRQDEPALFVALTFERREVLDSSNIKPMNLIGVDRGENIPAVIALTDPEGCPLSRFKDSLGNPTHILRIGESYKEKQRTIQAKKEVEQRRAGGYSRKYASKAKNLADDMVRNTARDLLYYAVTQDAMLIFENLSRGFGRQGKRTFMAERQYTRMEDWLTAKLAYEGLPSKTYLSKTLAQYTSKTCSNCGFTITSADYDRVLEKLKKTATGWMTTINGKELKVEGQITYYNRYKRQNVVKDLSVELDRLSEESVNNDISSWTKGRSGEALSLLKKRFSHRPVQEKFVCLNCGFETHADEQAALNIARSWLFLRSQEYKKYQTNKTTGNTDKRAFVETWQSFYRKKLKEVWKPAV

SEQ ID NO: 48164 - protein, 978 aa, synthetic construct
  REGION 1..978: note = engineered CasX variant
QEIKRINKIRRRLVKDSNTKKAGKTGPMKTLLVRVMTPDLRERLENLRKKPENIPQPISNTSRANLNKLLTDYTEMKKAILHVYWEEFQKDPVGLMSRVAQPASKKIDQNKLKPEMDEKGNLTTAGFACSQCGQPLFVYKLEQVSEKGKAYTNYFGRCNVAEHEKLILLAQLKPEKDSDEAVTYSLGKFGQRALDFYSIHVTKESTHPVKPLAQIAGNRYASAPVGKALSDACMGTIASFLSKYQDIIIEHQKVVKGNQKRLESLRELAGKENLEYPSVTLPPQPHTKEGVDAYNEVIARVRMWVNLNLWQKLKLSRDDAKPLLRLKKFPSFPLVERQANEVDWWDMVCNVKKLINEKKEDGKVFWQNLAGYKRQEALRPYLSSEEDRKKGKKFARYQLGDLLLHLEKKHGEDWGDVYDEAWERIDKKVEGLSKHIKLEEERRSEDAQSKAALTDWLRAKASFVIEGLKEADKDEFCRCELKLQKWYGDLRGKPFAIEAENSILDISGFSKQYNCAFIWQKDGVKKLNLYLIINYFKGGKLRFKKIKPEAFEANRFYTVINKKSGEIVPMEVNFNFDDPNLIILPLAFGKRQGREFIWNDLLSLETGSLKLANGRVIEKTLYNRRTRQDEPALFVALTFERREVLDSSNIKPMNLIGVDRGENIPAVIALTDPEGCPLSRFKDSLGNPTHILRIGESYKEKQRTIQAKKEVEQRRAGGYSRKYASKAKNLADDMVRNTARDLLYYAVTQDAMLIFENLSRGFGRQGKRTFMAERQYTRMEDWLTAKLAYEGLPSKTYLSKTLAQYTSKTCSNCGFTITSADYDRVLEKLKKTATGWMTTINGKELKVEGQITYYNRYKRQNVVKDLSVELDRLSEESVNNDISSWTKGRSGEALSLLKKRFSHRPVQEKFVCLNCGFETHADEQAALNIARSWLFLRSQEYKKYQTNKTTGNTDKRAFVETWQSFYRKKLKEVWKPAV

SEQ ID NO: 48165 - protein, 978 aa, synthetic construct
  REGION 1..978: note = engineered CasX variant
QEIKRINKIRRRLVKDSNTKKAGKTGPMKTLLVRVMTPDLRERLENLRKKPENIPQPISNTSRANLNKLLTDYTEMKKAILHVYWEEFQKDPVGLMSRVAQPASKKIDQNKLKPEMDEKGNLTTAGFACSQCGQPLFVYKLEQVSEKGKAYTNYFGRCNVAEHEKLILLAQLKPEKDSDEAVTYSLGKFGQRALDFYSIHVTKESTHPVKPLAQIAGNRYASVPVGKALSDACMGTIASFLSKYQDIIIEHQKVVKGNQKRLESLRELAGKENLEYPSVTLPPQPHTKEGVDAYNEVIARVRMWVNLNLWQKLKLSRDDAKPLLRLKKFPSFPLVERQANEVDWWDMVCNVKKLINEKKEDGKVFWQNLAGYKRQEALRPYLSSEEDRKKGKKFARYQLGDLLLHLEKKHGEDWGDVYDEAWERIDKKVEGLSKHIKLEEERRSEDAQSKAALTDWLRAKASFVIEGLKEADKDEFCRCELKLQKWYGDLRGKPFAIEAENSILDISGFSKQYNCAFIWQKDGVKKLNLYLIINYFKGGKLRFKKIKPEAFEANRFYTVINKKSGEIVPMEVNFNFDDPNLIILPLAFGKRQGREFIWNDLLSLETGSLKLANGRVIEKTLYNRRTRQDEPALFVALTFERREVLDSSNIKPMNLIGVDRGENIPAVIALTDPEGCPLSRFKDSLGNPTHILRIGESYKEKQRTIQAKKEVEQRRAGGYSRKYASKAKNLADDMVRNTARDLLYYAVTQDAMLIFENLSRGFGRQGKRTFMAERQYTRMEDWLTAKLAYEGLPSKTYLSKTLAQYTSKTCSNCGFTITSADYDRVLEKLKKTATGWMTTINGKELKVEGQITYYNRYKRQNVVKDLSVELDRLSEESVNNDISSWTKGRSGEALSLLKKRFSHRPVQEKFVCLNCGFETHADEQAALNIARSWLFLRSQEYKKYQTNKTTGNTDKRAFVETWQSFYRKKLKEVWKPAV

SEQ ID NO: 48166 - protein, 978 aa, synthetic construct
  REGION 1..978: note = engineered CasX variant
QEIKRINKIRRRLVKDSNTKKAGKTGPMKTLLVRVMTPDLRERLENLRKKPENIPQPISNTSRANLNKLLTDYTEMKKAILHVYWEEFQKDPVGLMSRVAQPASKKIDQNKLKPEMDEKGNLTTAGFACSQCGQPLFVYKLEQVSEKGKAYTNYFGRCNVAEHEKLIKLAQLKPEKDSDEAVTYSLGKFGQRALDFYSIHVTKESTHPVKPLAQIAGNRYASGPVGKALSDACMGTIASFLSKYQDIIIEHQKVVKGNQKRLESLRELAGKENLEYPSVTLPPQPHTKEGVDAYNEVIARVRMWVNLNLWQKLKLSRDDAKPLLRLKKFPSFPLVERQANEVDWWDMVCNVKKLINEKKEDGKVFWQNLAGYKRQEALRPYLSSEEDRKKGKKFARYQLGDLLLHLEKKHGEDWGDVYDEAWERIDKKVEGLSKHIKLEEERRSEDAQSKAALTDWLRAKASFVIEGLKEADKDEFCRCELKLQKWYGDLRGKPFAIEAENSILDISGFSKQYNCAFIWQKDGVKKLNLYLIINYFKGGKLRFKKIKPEAFEANRFYTVINKKSGEIVPMEVNFNFDDPNLIILPLAFGKRQGREFIWNDLLSLETGSLKLANGRVIEKTLYNRRTRQDEPALFVALTFERREVLDSSNIKPMNLIGVDRGENIPAVIALTDPEGCPLSRFKDSLGNPTHILRIGESYKEKQRTIQAKKEVEQRRAGGYSRKYASKAKNLADDMVRNTARDLLYYAVTQDAMLIFENLSRGFGRQGKRTFMAERQYTRMEDWLTAKLAYEGLPSKTYLSKTLAQYTSKTCSNCGFTITSADYDRVLEKLKKTATGWMTTINGKELKVEGQITYYNRYKRQNVVKDLSVELDRLSEESVNNDISSWTKGRSGEALSLLKKRFSHRPVQEKFVCLNCGFETHADEQAALNIARSWLFLRSQEYKKYQTNKTTGNTDKRAFVETWQSFYRKKLKEVWKPAV

SEQ ID NO: 48167 - protein, 977 aa, synthetic construct
  REGION 1..977: note = engineered CasX variant
QEIKRINKIRRRLVKDSNTKKAGKTGPMKTLLVRVMTPDLRERLENLRKKPENIPQPISNTSRANLNKLLTDYTEMKKAILHVYWEEFQKDPVGLMSRVAQPASKKIDQNKLKPEMDEKGNLTTAGFACSQCGQPLFVYKLEQVSEKGKAYTNYFGRCNVAEHEKLILLAQLKPEKDSDEAVTYSLGKFGQRALDFYSIHVTKESTHPVKPLAQIAGNRYASPVGKALSDACMGTIASFLSKYQDIIIEHQKVVKGNQKRLESLRELAGKENLEYPSVTLPPQPHTKEGVDAYNEVIARVRMWVNLNLWQKLKLSRDDAKPLLRLKKFPSFPLVERQANEVDWWDMVCNVKKLINEKKEDGKVFWQNLAGYKRQEALRPYLSSEEDRKKGKKFARYQLGDLLLHLEKKHGEDWGDVYDEAWERIDKKVEGLSKHIKLEEERRSEDAQSKAALTDWLRAKASFVIEGLKEADKDEFCRCELKLQKWYGDLRGKPFAIEAENSILDISGFSKQYNCAFIWQKDGVKKLNLYLIINYFKGGKLRFKKIKPEAFEANRFYTVINKKSGEIVPMEVNFNFDDPNLIILPLAFGKRQGREFIWNDLLSLETGSLKLANGRVIEKTLYNRRTRQDEPALFVALTFERREVLDSSNIKPMNLIGVDRGENIPAVIALTDPEGCPLSRFKDSLGNPTHILRIGESYKEKQRTIQAKKEVEQRRAGGYSRKYASKAKNLADDMVRNTARDLLYYAVTQDAMLIFENLSRGFGRQGKRTFMAERQYTRMEDWLTAKLAYEGLPSKTYLSKTLAQYTSKTCSNCGFTITSADYDRVLEKLKKTATGWMTTINGKELKVEGQITYYNRYKRQNVVKDLSVELDRLSEESVNNDISSWTKGRSGEALSLLKKRFSHRPVQEKFVCLNCGFETHADEQAALNIARSWLFLRSQEYKKYQTNKTTGNTDKRAFVETWQSFYRKKLKEVWKPAV

SEQ ID NO: 48168 - protein, 978 aa, synthetic construct
  REGION 1..978: note = engineered CasX variant
QEIKRINKIRRRLVKDSNTKKAGKTGPMKTLLVRVMTPDLRERLENLRKKPENIPQPISNTSRANLNKLLTDYTEMKKAILHVYWEEFQKDPVGLMSRVAQPASKKIDQNKLKPEMDEKGNLTTAGFACSQCGQPLFVYKLEQVSEKGKAYTNYFGRCNVAEHEKLILLAQLKPEKDSDEAVTYSLGKFGQRALDFYSIHVTKESTHPVKPLAQIAGNRYASYPVGKALSDACMGTIASFLSKYQDIIIEHQKVVKGNQKRLESLRELAGKENLEYPSVTLPPQPHTKEGVDAYNEVIARVRMWVNLNLWQKLKLSRDDAKPLLRLKKFPSFPLVERQANEVDWWDMVCNVKKLINEKKEDGKVFWQNLAGYKRQEALRPYLSSEEDRKKGKKFARYQLGDLLLHLEKKHGEDWGKVYGEAWERIDKKVEGLSKHIKLEEERRSEDAQSKAALTDWLRAKASFVIEGLKEADKDEFCRCELKLQKWYGDLRGKPFAIEAENSILDISGFSKQYNCAFIWQKDGVKKLNLYLIINYFKGGKLRFKKIKPEAFEANRFYTVINKKSGEIVPMEVNFNFDDPNLIILPLAFGKRQGREFIWNDLLSLETGSLKLANGRVIEKTLYNRRTRQDEPALFVALTFERREVLDSSNIKPMNLIGVDRGENIPAVIALTDPEGCPLSRFKDSLGNPTHILRIGESYKEKQRTIQAKKEVEQRRAGGYSRKYASKAKNLADDMVRNTARDLLYYAVTQDAMLIFENLSRGFGRQGKRTFMAERQYTRMEDWLTAKLAYEGLPSKTYLSKTLAQYTSKTCSNCGFTITSADYDRVLEKLKKTATGWMTTINGKELKVEGQITYYNRYKRQNVVKDLSVELDRLSEESVNNDISSWTKGRSGEALSLLKKRFSHRPVQEKFVCLNCGFETHADEQAALNIARSWLFLRSQEYKKYQTNKTTGNTDKRAFVETWQSFYRKKLKEVWKPAV

SEQ ID NO: 48169 - protein, 978 aa, synthetic construct
  REGION 1..978: note = engineered CasX variant
QEIKRINKIRRRLVKDSNTKKAGKTGPMKTLLVRVMTPDLRERLENLRKKPENIPQPISNTSRANLNKLLTDYTEMKKAILHVYWEEFQKDPVGLMSRVAQPASKKIDQNKLKPEMDEKGNLTTAGFACSQCGQPLFVYKLEQVSEKGKAYTNYFGRCNVAEHEKLILLAQLKPEKDSDEAVTYSLGKFGQRALDFYSIHVTKESTHPVKPLAQIAGNRYASHPVGKALSDACMGTIASFLSKYQDIIIEHQKVVKGNQKRLESLRELAGKENLEYPSVTLPPQPHTKEGVDAYNEVIARVRMWVNLNLWQKLKLSRDDAKPLLRLKKFPSFPLVERQANEVDWWDMVCNVKKLINEKKEDGKVFWQNLAGYKRQEALRPYLSSEEDRKKGKKFARYQLGDLLLHLEKKHGEDWGKVYGEAWERIDKKVEGLSKHIKLEEERRSEDAQSKAALTDWLRAKASFVIEGLKEADKDEFCRCELKLQKWYGDLRGKPFAIEAENSILDISGFSKQYNCAFIWQKDGVKKLNLYLIINYFKGGKLRFKKIKPEAFEANRFYTVINKKSGEIVPMEVNFNFDDPNLIILPLAFGKRQGREFIWNDLLSLETGSLKLANGRVIEKTLYNRRTRQDEPALFVALTFERREVLDSSNIKPMNLIGVDRGENIPAVIALTDPEGCPLSRFKDSLGNPTHILRIGESYKEKQRTIQAKKEVEQRRAGGYSRKYASKAKNLADDMVRNTARDLLYYAVTQDAMLIFENLSRGFGRQGKRTFMAERQYTRMEDWLTAKLAYEGLPSKTYLSKTLAQYTSKTCSNCGFTITSADYDRVLEKLKKTATGWMTTINGKELKVEGQITYYNRYKRQNVVKDLSVELDRLSEESVNNDISSWTKGRSGEALSLLKKRFSHRPVQEKFVCLNCGFETHADEQAALNIARSWLFLRSQEYKKYQTNKTTGNTDKRAFVETWQSFYRKKLKEVWKPAV

SEQ ID NO: 48170 - protein, 978 aa, synthetic construct
  REGION 1..978: note = engineered CasX variant
QEIKRINKIRRRLVKDSNTKKAGKTGPMKTLLVRVMTPDLRERLENLRKKPENIPQPISNTSRANLNKLLTDYTEMKKAILHVYWEEFQKDPVGLMSRVAQPASKKIDQNKLKPEMDEKGNLTTAGFACSQCGQPLFVYKLEQVSEKGKAYTNYFGRCNVAEHEKLILLAQLKPEKDSDEAVTYSLGKFGQRALDFYSIHVTKESTHPVKPLAQIAGNRYASSPVGKALSDACMGTIASFLSKYQDIIIEHQKVVKGNQKRLESLRELAGKENLEYPSVTLPPQPHTKEGVDAYNEVIARVRMWVNLNLWQKLKLSRDDAKPLLRLKKFPSFPLVERQANEVDWWDMVCNVKKLINEKKEDGKVFWQNLAGYKRQEALRPYLSSEEDRKKGKKFARYQLGDLLLHLEKKHGEDWGKVYGEAWERIDKKVEGLSKHIKLEEERRSEDAQSKAALTDWLRAKASFVIEGLKEADKDEFCRCELKLQKWYGDLRGKPFAIEAENSILDISGFSKQYNCAFIWQKDGVKKLNLYLIINYFKGGKLRFKKIKPEAFEANRFYTVINKKSGEIVPMEVNFNFDDPNLIILPLAFGKRQGREFIWNDLLSLETGSLKLANGRVIEKTLYNRRTRQDEPALFVALTFERREVLDSSNIKPMNLIGVDRGENIPAVIALTDPEGCPLSRFKDSLGNPTHILRIGESYKEKQRTIQAKKEVEQRRAGGYSRKYASKAKNLADDMVRNTARDLLYYAVTQDAMLIFENLSRGFGRQGKRTFMAERQYTRMEDWLTAKLAYEGLPSKTYLSKTLAQYTSKTCSNCGFTITSADYDRVLEKLKKTATGWMTTINGKELKVEGQITYYNRYKRQNVVKDLSVELDRLSEESVNNDISSWTKGRSGEALSLLKKRFSHRPVQEKFVCLNCGFETHADEQAALNIARSWLFLRSQEYKKYQTNKTTGNTDKRAFVETWQSFYRKKLKEVWKPAV

SEQ ID NO: 48171 - protein, 978 aa, synthetic construct
  REGION 1..978: note = engineered CasX variant
QEIKRINKIRRRLVKDSNTKKAGKTGPMKTLLVRVMTPDLRERLENLRKKPENIPQPISNTSRANLNKLLTDYTEMKKAILHVYWEEFQKDPVGLMSRVAQPASKKIDQNKLKPEMDEKGNLTTAGFACSQCGQPLFVYKLEQVSEKGKAYTNYFGRCNVAEHEKLILLAQLKPEKDSDEAVTYSLGKFGQRALDFYSIHVTKESTHPVKPLAQIAGNRYASTPVGKALSDACMGTIASFLSKYQDIIIEHQKVVKGNQKRLESLRELAGKENLEYPSVTLPPQPHTKEGVDAYNEVIARVRMWVNLNLWQKLKLSRDDAKPLLRLKKFPSFPLVERQANEVDWWDMVCNVKKLINEKKEDGKVFWQNLAGYKRQEALRPYLSSEEDRKKGKKFARYQLGDLLLHLEKKHGEDWGKVYGEAWERIDKKVEGLSKHIKLEEERRSEDAQSKAALTDWLRAKASFVIEGLKEADKDEFCRCELKLQKWYGDLRGKPFAIEAENSILDISGFSKQYNCAFIWQKDGVKKLNLYLIINYFKGGKLRFKKIKPEAFEANRFYTVINKKSGEIVPMEVNFNFDDPNLIILPLAFGKRQGREFIWNDLLSLETGSLKLANGRVIEKTLYNRRTRQDEPALFVALTFERREVLDSSNIKPMNLIGVDRGENIPAVIALTDPEGCPLSRFKDSLGNPTHILRIGESYKEKQRTIQAKKEVEQRRAGGYSRKYASKAKNLADDMVRNTARDLLYYAVTQDAMLIFENLSRGFGRQGKRTFMAERQYTRMEDWLTAKLAYEGLPSKTYLSKTLAQYTSKTCSNCGFTITSADYDRVLEKLKKTATGWMTTINGKELKVEGQITYYNRYKRQNVVKDLSVELDRLSEESVNNDISSWTKGRSGEALSLLKKRFSHRPVQEKFVCLNCGFETHADEQAALNIARSWLFLRSQEYKKYQTNKTTGNTDKRAFVETWQSFYRKKLKEVWKPAV

SEQ ID NO: 48172 - protein, 978 aa, synthetic construct
  REGION 1..978: note = engineered CasX variant
QEIKRINKIRRRLVKDSNTKKAGKTGPMKTLLVRVMTPDLRERLENLRKKPENIPQPISNTSRANLNKLLTDYTEMKKAILHVYWEEFQKDPVGLMSRVAQPASKKIDQNKLKPEMDEKGNLTTAGFACSQCGQPLFVYKLEQVSEKGKAYTNYFGRCNVAEHEKLILLAQLKPEKDSDEAVTYSLGKFGQRALDFYSIHVTKESTHPVKPLAQIAGNRYASAPVGKALSDACMGTIASFLSKYQDIIIEHQKVVKGNQKRLESLRELAGKENLEYPSVTLPPQPHTKEGVDAYNEVIARVRMWVNLNLWQKLKLSRDDAKPLLRLKKFPSFPLVERQANEVDWWDMVCNVKKLINEKKEDGKVFWQNLAGYKRQEALRPYLSSEEDRKKGKKFARYQLGDLLLHLEKKHGEDWGKVYGEAWERIDKKVEGLSKHIKLEEERRSEDAQSKAALTDWLRAKASFVIEGLKEADKDEFCRCELKLQKWYGDLRGKPFAIEAENSILDISGFSKQYNCAFIWQKDGVKKLNLYLIINYFKGGKLRFKKIKPEAFEANRFYTVINKKSGEIVPMEVNFNFDDPNLIILPLAFGKRQGREFIWNDLLSLETGSLKLANGRVIEKTLYNRRTRQDEPALFVALTFERREVLDSSNIKPMNLIGVDRGENIPAVIALTDPEGCPLSRFKDSLGNPTHILRIGESYKEKQRTIQAKKEVEQRRAGGYSRKYASKAKNLADDMVRNTARDLLYYAVTQDAMLIFENLSRGFGRQGKRTFMAERQYTRMEDWLTAKLAYEGLPSKTYLSKTLAQYTSKTCSNCGFTITSADYDRVLEKLKKTATGWMTTINGKELKVEGQITYYNRYKRQNVVKDLSVELDRLSEESVNNDISSWTKGRSGEALSLLKKRFSHRPVQEKFVCLNCGFETHADEQAALNIARSWLFLRSQEYKKYQTNKTTGNTDKRAFVETWQSFYRKKLKEVWKPAV

SEQ ID NO: 48173 - protein, 978 aa, synthetic construct
  REGION 1..978: note = engineered CasX variant
QEIKRINKIRRRLVKDSNTKKAGKTGPMKTLLVRVMTPDLRERLENLRKKPENIPQPISNTSRANLNKLLTDYTEMKKAILHVYWEEFQKDPVGLMSRVAQPASKKIDQNKLKPEMDEKGNLTTAGFACSQCGQPLFVYKLEQVSEKGKAYTNYFGRCNVAEHEKLILLAQLKPEKDSDEAVTYSLGKFGQRALDFYSIHVTKESTHPVKPLAQIAGNRYASVPVGKALSDACMGTIASFLSKYQDIIIEHQKVVKGNQKRLESLRELAGKENLEYPSVTLPPQPHTKEGVDAYNEVIARVRMWVNLNLWQKLKLSRDDAKPLLRLKKFPSFPLVERQANEVDWWDMVCNVKKLINEKKEDGKVFWQNLAGYKRQEALRPYLSSEEDRKKGKKFARYQLGDLLLHLEKKHGEDWGKVYGEAWERIDKKVEGLSKHIKLEEERRSEDAQSKAALTDWLRAKASFVIEGLKEADKDEFCRCELKLQKWYGDLRGKPFAIEAENSILDISGFSKQYNCAFIWQKDGVKKLNLYLIINYFKGGKLRFKKIKPEAFEANRFYTVINKKSGEIVPMEVNFNFDDPNLIILPLAFGKRQGREFIWNDLLSLETGSLKLANGRVIEKTLYNRRTRQDEPALFVALTFERREVLDSSNIKPMNLIGVDRGENIPAVIALTDPEGCPLSRFKDSLGNPTHILRIGESYKEKQRTIQAKKEVEQRRAGGYSRKYASKAKNLADDMVRNTARDLLYYAVTQDAMLIFENLSRGFGRQGKRTFMAERQYTRMEDWLTAKLAYEGLPSKTYLSKTLAQYTSKTCSNCGFTITSADYDRVLEKLKKTATGWMTTINGKELKVEGQITYYNRYKRQNVVKDLSVELDRLSEESVNNDISSWTKGRSGEALSLLKKRFSHRPVQEKFVCLNCGFETHADEQAALNIARSWLFLRSQEYKKYQTNKTTGNTDKRAFVETWQSFYRKKLKEVWKPAV

SEQ ID NO: 48174 - protein, 978 aa, synthetic construct
  REGION 1..978: note = engineered CasX variant
QEIKRINKIRRRLVKDSNTKKAGKTGPMKTLLVRVMTPDLRERLENLRKKPENIPQPISNTSRANLNKLLTDYTEMKKAILHVYWEEFQKDPVGLMSRVAQPASKKIDQNKLKPEMDEKGNLTTAGFACSQCGQPLFVYKLEQVSEKGKAYTNYFGRCNVAEHEKLIKLAQLKPEKDSDEAVTYSLGKFGQRALDFYSIHVTKESTHPVKPLAQIAGNRYASGPVGKALSDACMGTIASFLSKYQDIIIEHQKVVKGNQKRLESLRELAGKENLEYPSVTLPPQPHTKEGVDAYNEVIARVRMWVNLNLWQKLKLSRDDAKPLLRLKKFPSFPLVERQANEVDWWDMVCNVKKLINEKKEDGKVFWQNLAGYKRQEALRPYLSSEEDRKKGKKFARYQLGDLLLHLEKKHGEDWGKVYGEAWERIDKKVEGLSKHIKLEEERRSEDAQSKAALTDWLRAKASFVIEGLKEADKDEFCRCELKLQKWYGDLRGKPFAIEAENSILDISGFSKQYNCAFIWQKDGVKKLNLYLIINYFKGGKLRFKKIKPEAFEANRFYTVINKKSGEIVPMEVNFNFDDPNLIILPLAFGKRQGREFIWNDLLSLETGSLKLANGRVIEKTLYNRRTRQDEPALFVALTFERREVLDSSNIKPMNLIGVDRGENIPAVIALTDPEGCPLSRFKDSLGNPTHILRIGESYKEKQRTIQAKKEVEQRRAGGYSRKYASKAKNLADDMVRNTARDLLYYAVTQDAMLIFENLSRGFGRQGKRTFMAERQYTRMEDWLTAKLAYEGLPSKTYLSKTLAQYTSKTCSNCGFTITSADYDRVLEKLKKTATGWMTTINGKELKVEGQITYYNRYKRQNVVKDLSVELDRLSEESVNNDISSWTKGRSGEALSLLKKRFSHRPVQEKFVCLNCGFETHADEQAALNIARSWLFLRSQEYKKYQTNKTTGNTDKRAFVETWQSFYRKKLKEVWKPAV

SEQ ID NO: 48175 - protein, 977 aa, synthetic construct
  REGION 1..977: note = engineered CasX variant
QEIKRINKIRRRLVKDSNTKKAGKTGPMKTLLVRVMTPDLRERLENLRKKPENIPQPISNTSRANLNKLLTDYTEMKKAILHVYWEEFQKDPVGLMSRVAQPASKKIDQNKLKPEMDEKGNLTTAGFACSQCGQPLFVYKLEQVSEKGKAYTNYFGRCNVAEHEKLILLAQLKPEKDSDEAVTYSLGKFGQRALDFYSIHVTKESTHPVKPLAQIAGNRYASPVGKALSDACMGTIASFLSKYQDIIIEHQKVVKGNQKRLESLRELAGKENLEYPSVTLPPQPHTKEGVDAYNEVIARVRMWVNLNLWQKLKLSRDDAKPLLRLKKFPSFPLVERQANEVDWWDMVCNVKKLINEKKEDGKVFWQNLAGYKRQEALRPYLSSEEDRKKGKKFARYQLGDLLLHLEKKHGEDWGKVYGEAWERIDKKVEGLSKHIKLEEERRSEDAQSKAALTDWLRAKASFVIEGLKEADKDEFCRCELKLQKWYGDLRGKPFAIEAENSILDISGFSKQYNCAFIWQKDGVKKLNLYLIINYFKGGKLRFKKIKPEAFEANRFYTVINKKSGEIVPMEVNFNFDDPNLIILPLAFGKRQGREFIWNDLLSLETGSLKLANGRVIEKTLYNRRTRQDEPALFVALTFERREVLDSSNIKPMNLIGVDRGENIPAVIALTDPEGCPLSRFKDSLGNPTHILRIGESYKEKQRTIQAKKEVEQRRAGGYSRKYASKAKNLADDMVRNTARDLLYYAVTQDAMLIFENLSRGFGRQGKRTFMAERQYTRMEDWLTAKLAYEGLPSKTYLSKTLAQYTSKTCSNCGFTITSADYDRVLEKLKKTATGWMTTINGKELKVEGQITYYNRYKRQNVVKDLSVELDRLSEESVNNDISSWTKGRSGEALSLLKKRFSHRPVQEKFVCLNCGFETHADEQAALNIARSWLFLRSQEYKKYQTNKTTGNTDKRAFVETWQSFYRKKLKEVWKPAV

SEQ ID NO: 48176 - protein, 978 aa, synthetic construct
  REGION 1..978: note = engineered CasX variant
QEIKRINKIRRRLVKDSNTKKAGKTGPMKTLLVRVMTPDLRERLENLRKKPENIPQPISNTSRANLNKLLTDYTEMKKAILHVYWEEFQKDPVGLMSRVAQPASKKIDQNKLKPEMDEKGNLTTAGFACSQCGQPLFVYKLEQVSEKGKAYTNYFGRCNVAEHEKLILLAQLKPEKDSDEAVTYSLGKFGQRALDFYSIHVTKESTHPVKPLAQIAGNRYASYPVGKALSDACMGTIASFLSKYQDIIIEHQKVVKGNQKRLESLRELAGKENLEYPSVTLPPQPHTKEGVDAYNEVIARVRMWVNLNLWQKLKLSRDDAKPLLRLKKFPSFPLVERQANEVDWWDMVCNVKKLINEKKEDGKVFWQNLAGYKRQEALRPYLSSEEDRKKGKKFARYQLGDLLLHLEKKHGEDWGKVYDEAWERIDKKVEGLSKHIKLEEERRSEDAQSKAALTDWLRAKASFVIEGKKEADKDEFCRCELKLQKWYGDLRGKPFAIEAENSILDISGFSKQYNCAFIWQKDGVKKLNLYLIINYFKGGKLRFKKIKPEAFEANRFYTVINKKSGEIVPMEVNFNFDDPNLIILPLAFGKRQGREFIWNDLLSLETGSLKLANGRVIEKTLYNRRTRQDEPALFVALTFERREVLDSSNIKPMNLIGVDRGENIPAVIALTDPEGCPLSRFKDSLGNPTHILRIGESYKEKQRTIQAKKEVEQRRAGGYSRKYASKAKNLADDMVRNTARDLLYYAVTQDAMLIFENLSRGFGRQGKRTFMAERQYTRMEDWLTAKLAYEGLPSKTYLSKTLAQYTSKTCSNCGFTITSADYDRVLEKLKKTATGWMTTINGKELKVEGQITYYNRYKRQNVVKDLSVELDRLSEESVNNDISSWTKGRSGEALSLLKKRFSHRPVQEKFVCLNCGFETHADEQAALNIARSWLFLRSQEYKKYQTNKTTGNTDKRAFVETWQSFYRKKLKEVWKPAV

SEQ ID NO: 48177 - protein, 978 aa, synthetic construct
  REGION 1..978: note = engineered CasX variant
QEIKRINKIRRRLVKDSNTKKAGKTGPMKTLLVRVMTPDLRERLENLRKKPENIPQPISNTSRANLNKLLTDYTEMKKAILHVYWEEFQKDPVGLMSRVAQPASKKIDQNKLKPEMDEKGNLTTAGFACSQCGQPLFVYKLEQVSEKGKAYTNYFGRCNVAEHEKLILLAQLKPEKDSDEAVTYSLGKFGQRALDFYSIHVTKESTHPVKPLAQIAGNRYASHPVGKALSDACMGTIASFLSKYQDIIIEHQKVVKGNQKRLESLRELAGKENLEYPSVTLPPQPHTKEGVDAYNEVIARVRMWVNLNLWQKLKLSRDDAKPLLRLKKFPSFPLVERQANEVDWWDMVCNVKKLINEKKEDGKVFWQNLAGYKRQEALRPYLSSEEDRKKGKKFARYQLGDLLLHLEKKHGEDWGKVYDEAWERIDKKVEGLSKHIKLEEERRSEDAQSKAALTDWLRAKASFVIEGKKEADKDEFCRCELKLQKWYGDLRGKPFAIEAENSILDISGFSKQYNCAFIWQKDGVKKLNLYLIINYFKGGKLRFKKIKPEAFEANRFYTVINKKSGEIVPMEVNFNFDDPNLIILPLAFGKRQGREFIWNDLLSLETGSLKLANGRVIEKTLYNRRTRQDEPALFVALTFERREVLDSSNIKPMNLIGVDRGENIPAVIALTDPEGCPLSRFKDSLGNPTHILRIGESYKEKQRTIQAKKEVEQRRAGGYSRKYASKAKNLADDMVRNTARDLLYYAVTQDAMLIFENLSRGFGRQGKRTFMAERQYTRMEDWLTAKLAYEGLPSKTYLSKTLAQYTSKTCSNCGFTITSADYDRVLEKLKKTATGWMTTINGKELKVEGQITYYNRYKRQNVVKDLSVELDRLSEESVNNDISSWTKGRSGEALSLLKKRFSHRPVQEKFVCLNCGFETHADEQAALNIARSWLFLRSQEYKKYQTNKTTGNTDKRAFVETWQSFYRKKLKEVWKPAV

SEQ ID NO: 48178 - protein, 978 aa, synthetic construct
  REGION 1..978: note = engineered CasX variant
QEIKRINKIRRRLVKDSNTKKAGKTGPMKTLLVRVMTPDLRERLENLRKKPENIPQPISNTSRANLNKLLTDYTEMKKAILHVYWEEFQKDPVGLMSRVAQPASKKIDQNKLKPEMDEKGNLTTAGFACSQCGQPLFVYKLEQVSEKGKAYTNYFGRCNVAEHEKLILLAQLKPEKDSDEAVTYSLGKFGQRALDFYSIHVTKESTHPVKPLAQIAGNRYASSPVGKALSDACMGTIASFLSKYQDIIIEHQKVVKGNQKRLESLRELAGKENLEYPSVTLPPQPHTKEGVDAYNEVIARVRMWVNLNLWQKLKLSRDDAKPLLRLKKFPSFPLVERQANEVDWWDMVCNVKKLINEKKEDGKVFWQNLAGYKRQEALRPYLSSEEDRKKGKKFARYQLGDLLLHLEKKHGEDWGKVYDEAWERIDKKVEGLSKHIKLEEERRSEDAQSKAALTDWLRAKASFVIEGKKEADKDEFCRCELKLQKWYGDLRGKPFAIEAENSILDISGFSKQYNCAFIWQKDGVKKLNLYLIINYFKGGKLRFKKIKPEAFEANRFYTVINKKSGEIVPMEVNFNFDDPNLIILPLAFGKRQGREFIWNDLLSLETGSLKLANGRVIEKTLYNRRTRQDEPALFVALTFERREVLDSSNIKPMNLIGVDRGENIPAVIALTDPEGCPLSRFKDSLGNPTHILRIGESYKEKQRTIQAKKEVEQRRAGGYSRKYASKAKNLADDMVRNTARDLLYYAVTQDAMLIFENLSRGFGRQGKRTFMAERQYTRMEDWLTAKLAYEGLPSKTYLSKTLAQYTSKTCSNCGFTITSADYDRVLEKLKKTATGWMTTINGKELKVEGQITYYNRYKRQNVVKDLSVELDRLSEESVNNDISSWTKGRSGEALSLLKKRFSHRPVQEKFVCLNCGFETHADEQAALNIARSWLFLRSQEYKKYQTNKTTGNTDKRAFVETWQSFYRKKLKEVWKPAV

SEQ ID NO: 48179 - protein, 978 aa, synthetic construct
  REGION 1..978: note = engineered CasX variant
QEIKRINKIRRRLVKDSNTKKAGKTGPMKTLLVRVMTPDLRERLENLRKKPENIPQPISNTSRANLNKLLTDYTEMKKAILHVYWEEFQKDPVGLMSRVAQPASKKIDQNKLKPEMDEKGNLTTAGFACSQCGQPLFVYKLEQVSEKGKAYTNYFGRCNVAEHEKLILLAQLKPEKDSDEAVTYSLGKFGQRALDFYSIHVTKESTHPVKPLAQIAGNRYASTPVGKALSDACMGTIASFLSKYQDIIIEHQKVVKGNQKRLESLRELAGKENLEYPSVTLPPQPHTKEGVDAYNEVIARVRMWVNLNLWQKLKLSRDDAKPLLRLKKFPSFPLVERQANEVDWWDMVCNVKKLINEKKEDGKVFWQNLAGYKRQEALRPYLSSEEDRKKGKKFARYQLGDLLLHLEKKHGEDWGKVYDEAWERIDKKVEGLSKHIKLEEERRSEDAQSKAALTDWLRAKASFVIEGKKEADKDEFCRCELKLQKWYGDLRGKPFAIEAENSILDISGFSKQYNCAFIWQKDGVKKLNLYLIINYFKGGKLRFKKIKPEAFEANRFYTVINKKSGEIVPMEVNFNFDDPNLIILPLAFGKRQGREFIWNDLLSLETGSLKLANGRVIEKTLYNRRTRQDEPALFVALTFERREVLDSSNIKPMNLIGVDRGENIPAVIALTDPEGCPLSRFKDSLGNPTHILRIGESYKEKQRTIQAKKEVEQRRAGGYSRKYASKAKNLADDMVRNTARDLLYYAVTQDAMLIFENLSRGFGRQGKRTFMAERQYTRMEDWLTAKLAYEGLPSKTYLSKTLAQYTSKTCSNCGFTITSADYDRVLEKLKKTATGWMTTINGKELKVEGQITYYNRYKRQNVVKDLSVELDRLSEESVNNDISSWTKGRSGEALSLLKKRFSHRPVQEKFVCLNCGFETHADEQAALNIARSWLFLRSQEYKKYQTNKTTGNTDKRAFVETWQSFYRKKLKEVWKPAV

SEQ ID NO: 48180 - protein, 978 aa, synthetic construct
  REGION 1..978: note = engineered CasX variant
QEIKRINKIRRRLVKDSNTKKAGKTGPMKTLLVRVMTPDLRERLENLRKKPENIPQPISNTSRANLNKLLTDYTEMKKAILHVYWEEFQKDPVGLMSRVAQPASKKIDQNKLKPEMDEKGNLTTAGFACSQCGQPLFVYKLEQVSEKGKAYTNYFGRCNVAEHEKLILLAQLKPEKDSDEAVTYSLGKFGQRALDFYSIHVTKESTHPVKPLAQIAGNRYASAPVGKALSDACMGTIASFLSKYQDIIIEHQKVVKGNQKRLESLRELAGKENLEYPSVTLPPQPHTKEGVDAYNEVIARVRMWVNLNLWQKLKLSRDDAKPLLRLKKFPSFPLVERQANEVDWWDMVCNVKKLINEKKEDGKVFWQNLAGYKRQEALRPYLSSEEDRKKGKKFARYQLGDLLLHLEKKHGEDWGKVYDEAWERIDKKVEGLSKHIKLEEERRSEDAQSKAALTDWLRAKASFVIEGKKEADKDEFCRCELKLQKWYGDLRGKPFAIEAENSILDISGFSKQYNCAFIWQKDGVKKLNLYLIINYFKGGKLRFKKIKPEAFEANRFYTVINKKSGEIVPMEVNFNFDDPNLIILPLAFGKRQGREFIWNDLLSLETGSLKLANGRVIEKTLYNRRTRQDEPALFVALTFERREVLDSSNIKPMNLIGVDRGENIPAVIALTDPEGCPLSRFKDSLGNPTHILRIGESYKEKQRTIQAKKEVEQRRAGGYSRKYASKAKNLADDMVRNTARDLLYYAVTQDAMLIFENLSRGFGRQGKRTFMAERQYTRMEDWLTAKLAYEGLPSKTYLSKTLAQYTSKTCSNCGFTITSADYDRVLEKLKKTATGWMTTINGKELKVEGQITYYNRYKRQNVVKDLSVELDRLSEESVNNDISSWTKGRSGEALSLLKKRFSHRPVQEKFVCLNCGFETHADEQAALNIARSWLFLRSQEYKKYQTNKTTGNTDKRAFVETWQSFYRKKLKEVWKPAV

SEQ ID NO: 48181 - protein, 978 aa, synthetic construct
  REGION 1..978: note = engineered CasX variant
QEIKRINKIRRRLVKDSNTKKAGKTGPMKTLLVRVMTPDLRERLENLRKKPENIPQPISNTSRANLNKLLTDYTEMKKAILHVYWEEFQKDPVGLMSRVAQPASKKIDQNKLKPEMDEKGNLTTAGFACSQCGQPLFVYKLEQVSEKGKAYTNYFGRCNVAEHEKLILLAQLKPEKDSDEAVTYSLGKFGQRALDFYSIHVTKESTHPVKPLAQIAGNRYASVPVGKALSDACMGTIASFLSKYQDIIIEHQKVVKGNQKRLESLRELAGKENLEYPSVTLPPQPHTKEGVDAYNEVIARVRMWVNLNLWQKLKLSRDDAKPLLRLKKFPSFPLVERQANEVDWWDMVCNVKKLINEKKEDGKVFWQNLAGYKRQEALRPYLSSEEDRKKGKKFARYQLGDLLLHLEKKHGEDWGKVYDEAWERIDKKVEGLSKHIKLEEERRSEDAQSKAALTDWLRAKASFVIEGKKEADKDEFCRCELKLQKWYGDLRGKPFAIEAENSILDISGFSKQYNCAFIWQKDGVKKLNLYLIINYFKGGKLRFKKIKPEAFEANRFYTVINKKSGEIVPMEVNFNFDDPNLIILPLAFGKRQGREFIWNDLLSLETGSLKLANGRVIEKTLYNRRTRQDEPALFVALTFERREVLDSSNIKPMNLIGVDRGENIPAVIALTDPEGCPLSRFKDSLGNPTHILRIGESYKEKQRTIQAKKEVEQRRAGGYSRKYASKAKNLADDMVRNTARDLLYYAVTQDAMLIFENLSRGFGRQGKRTFMAERQYTRMEDWLTAKLAYEGLPSKTYLSKTLAQYTSKTCSNCGFTITSADYDRVLEKLKKTATGWMTTINGKELKVEGQITYYNRYKRQNVVKDLSVELDRLSEESVNNDISSWTKGRSGEALSLLKKRFSHRPVQEKFVCLNCGFETHADEQAALNIARSWLFLRSQEYKKYQTNKTTGNTDKRAFVETWQSFYRKKLKEVWKPAV

SEQ ID NO: 48182 - protein, 978 aa, synthetic construct
  REGION 1..978: note = engineered CasX variant
QEIKRINKIRRRLVKDSNTKKAGKTGPMKTLLVRVMTPDLRERLENLRKKPENIPQPISNTSRANLNKLLTDYTEMKKAILHVYWEEFQKDPVGLMSRVAQPASKKIDQNKLKPEMDEKGNLTTAGFACSQCGQPLFVYKLEQVSEKGKAYTNYFGRCNVAEHEKLIKLAQLKPEKDSDEAVTYSLGKFGQRALDFYSIHVTKESTHPVKPLAQIAGNRYASGPVGKALSDACMGTIASFLSKYQDIIIEHQKVVKGNQKRLESLRELAGKENLEYPSVTLPPQPHTKEGVDAYNEVIARVRMWVNLNLWQKLKLSRDDAKPLLRLKKFPSFPLVERQANEVDWWDMVCNVKKLINEKKEDGKVFWQNLAGYKRQEALRPYLSSEEDRKKGKKFARYQLGDLLLHLEKKHGEDWGKVYDEAWERIDKKVEGLSKHIKLEEERRSEDAQSKAALTDWLRAKASFVIEGKKEADKDEFCRCELKLQKWYGDLRGKPFAIEAENSILDISGFSKQYNCAFIWQKDGVKKLNLYLIINYFKGGKLRFKKIKPEAFEANRFYTVINKKSGEIVPMEVNFNFDDPNLIILPLAFGKRQGREFIWNDLLSLETGSLKLANGRVIEKTLYNRRTRQDEPALFVALTFERREVLDSSNIKPMNLIGVDRGENIPAVIALTDPEGCPLSRFKDSLGNPTHILRIGESYKEKQRTIQAKKEVEQRRAGGYSRKYASKAKNLADDMVRNTARDLLYYAVTQDAMLIFENLSRGFGRQGKRTFMAERQYTRMEDWLTAKLAYEGLPSKTYLSKTLAQYTSKTCSNCGFTITSADYDRVLEKLKKTATGWMTTINGKELKVEGQITYYNRYKRQNVVKDLSVELDRLSEESVNNDISSWTKGRSGEALSLLKKRFSHRPVQEKFVCLNCGFETHADEQAALNIARSWLFLRSQEYKKYQTNKTTGNTDKRAFVETWQSFYRKKLKEVWKPAV

SEQ ID NO: 48183 - protein, 977 aa, synthetic construct
  REGION 1..977: note = engineered CasX variant
QEIKRINKIRRRLVKDSNTKKAGKTGPMKTLLVRVMTPDLRERLENLRKKPENIPQPISNTSRANLNKLLTDYTEMKKAILHVYWEEFQKDPVGLMSRVAQPASKKIDQNKLKPEMDEKGNLTTAGFACSQCGQPLFVYKLEQVSEKGKAYTNYFGRCNVAEHEKLILLAQLKPEKDSDEAVTYSLGKFGQRALDFYSIHVTKESTHPVKPLAQIAGNRYASPVGKALSDACMGTIASFLSKYQDIIIEHQKVVKGNQKRLESLRELAGKENLEYPSVTLPPQPHTKEGVDAYNEVIARVRMWVNLNLWQKLKLSRDDAKPLLRLKKFPSFPLVERQANEVDWWDMVCNVKKLINEKKEDGKVFWQNLAGYKRQEALRPYLSSEEDRKKGKKFARYQLGDLLLHLEKKHGEDWGKVYDEAWERIDKKVEGLSKHIKLEEERRSEDAQSKAALTDWLRAKASFVIEGKKEADKDEFCRCELKLQKWYGDLRGKPFAIEAENSILDISGFSKQYNCAFIWQKDGVKKLNLYLIINYFKGGKLRFKKIKPEAFEANRFYTVINKKSGEIVPMEVNFNFDDPNLIILPLAFGKRQGREFIWNDLLSLETGSLKLANGRVIEKTLYNRRTRQDEPALFVALTFERREVLDSSNIKPMNLIGVDRGENIPAVIALTDPEGCPLSRFKDSLGNPTHILRIGESYKEKQRTIQAKKEVEQRRAGGYSRKYASKAKNLADDMVRNTARDLLYYAVTQDAMLIFENLSRGFGRQGKRTFMAERQYTRMEDWLTAKLAYEGLPSKTYLSKTLAQYTSKTCSNCGFTITSADYDRVLEKLKKTATGWMTTINGKELKVEGQITYYNRYKRQNVVKDLSVELDRLSEESVNNDISSWTKGRSGEALSLLKKRFSHRPVQEKFVCLNCGFETHADEQAALNIARSWLFLRSQEYKKYQTNKTTGNTDKRAFVETWQSFYRKKLKEVWKPAV

SEQ ID NO: 48184 - protein, 978 aa, synthetic construct
  REGION 1..978: note = engineered CasX variant
QEIKRINKIRRRLVKDSNTKKAGKTGPMKTLLVRVMTPDLRERLENLRKKPENIPQPISNTSRANLNKLLTDYTEMKKAILHVYWEEFQKDPVGLMSRVAQPASKKIDQNKLKPEMDEKGNLTTAGFACSQCGQPLFVYKLEQVSEKGKAYTNYFGRCNVAEHEKLILLAQLKPEKDSDEAVTYSLGKFGQRALDFYSIHVTKESTHPVKPLAQIAGNRYASYPVGKALSDACMGTIASFLSKYQDIIIEHQKVVKGNQKRLESLRELAGKENLEYPSVTLPPQPHTKEGVDAYNEVIARVRMWVNLNLWQKLKLSRDDAKPLLRLKKFPSFPLVERQANEVDWWDMVCNVKKLINEKKEDGKVFWQNLAGYKRQEALRPYLSSEEDRKKGKKFARYQLGDLLLHLEKKHGEDWGKVYDEAWERIDKKVEGLSKHIKLEEERRSEDAQSKAALTDWLRAKASFVIEGSKEADKDEFCRCELKLQKWYGDLRGKPFAIEAENSILDISGFSKQYNCAFIWQKDGVKKLNLYLIINYFKGGKLRFKKIKPEAFEANRFYTVINKKSGEIVPMEVNFNFDDPNLIILPLAFGKRQGREFIWNDLLSLETGSLKLANGRVIEKTLYNRRTRQDEPALFVALTFERREVLDSSNIKPMNLIGVDRGENIPAVIALTDPEGCPLSRFKDSLGNPTHILRIGESYKEKQRTIQAKKEVEQRRAGGYSRKYASKAKNLADDMVRNTARDLLYYAVTQDAMLIFENLSRGFGRQGKRTFMAERQYTRMEDWLTAKLAYEGLPSKTYLSKTLAQYTSKTCSNCGFTITSADYDRVLEKLKKTATGWMTTINGKELKVEGQITYYNRYKRQNVVKDLSVELDRLSEESVNNDISSWTKGRSGEALSLLKKRFSHRPVQEKFVCLNCGFETHADEQAALNIARSWLFLRSQEYKKYQTNKTTGNTDKRAFVETWQSFYRKKLKEVWKPAV

SEQ ID NO: 48185 - protein, 978 aa, synthetic construct
  REGION 1..978: note = engineered CasX variant
QEIKRINKIRRRLVKDSNTKKAGKTGPMKTLLVRVMTPDLRERLENLRKKPENIPQPISNTSRANLNKLLTDYTEMKKAILHVYWEEFQKDPVGLMSRVAQPASKKIDQNKLKPEMDEKGNLTTAGFACSQCGQPLFVYKLEQVSEKGKAYTNYFGRCNVAEHEKLILLAQLKPEKDSDEAVTYSLGKFGQRALDFYSIHVTKESTHPVKPLAQIAGNRYASHPVGKALSDACMGTIASFLSKYQDIIIEHQKVVKGNQKRLESLRELAGKENLEYPSVTLPPQPHTKEGVDAYNEVIARVRMWVNLNLWQKLKLSRDDAKPLLRLKKFPSFPLVERQANEVDWWDMVCNVKKLINEKKEDGKVFWQNLAGYKRQEALRPYLSSEEDRKKGKKFARYQLGDLLLHLEKKHGEDWGKVYDEAWERIDKKVEGLSKHIKLEEERRSEDAQSKAALTDWLRAKASFVIEGSKEADKDEFCRCELKLQKWYGDLRGKPFAIEAENSILDISGFSKQYNCAFIWQKDGVKKLNLYLIINYFKGGKLRFKKIKPEAFEANRFYTVINKKSGEIVPMEVNFNFDDPNLIILPLAFGKRQGREFIWNDLLSLETGSLKLANGRVIEKTLYNRRTRQDEPALFVALTFERREVLDSSNIKPMNLIGVDRGENIPAVIALTDPEGCPLSRFKDSLGNPTHILRIGESYKEKQRTIQAKKEVEQRRAGGYSRKYASKAKNLADDMVRNTARDLLYYAVTQDAMLIFENLSRGFGRQGKRTFMAERQYTRMEDWLTAKLAYEGLPSKTYLSKTLAQYTSKTCSNCGFTITSADYDRVLEKLKKTATGWMTTINGKELKVEGQITYYNRYKRQNVVKDLSVELDRLSEESVNNDISSWTKGRSGEALSLLKKRFSHRPVQEKFVCLNCGFETHADEQAALNIARSWLFLRSQEYKKYQTNKTTGNTDKRAFVETWQSFYRKKLKEVWKPAV

SEQ ID NO: 48186 - protein, 978 aa, synthetic construct
  REGION 1..978: note = engineered CasX variant
QEIKRINKIRRRLVKDSNTKKAGKTGPMKTLLVRVMTPDLRERLENLRKKPENIPQPISNTSRANLNKLLTDYTEMKKAILHVYWEEFQKDPVGLMSRVAQPASKKIDQNKLKPEMDEKGNLTTAGFACSQCGQPLFVYKLEQVSEKGKAYTNYFGRCNVAEHEKLILLAQLKPEKDSDEAVTYSLGKFGQRALDFYSIHVTKESTHPVKPLAQIAGNRYASSPVGKALSDACMGTIASFLSKYQDIIIEHQKVVKGNQKRLESLRELAGKENLEYPSVTLPPQPHTKEGVDAYNEVIARVRMWVNLNLWQKLKLSRDDAKPLLRLKKFPSFPLVERQANEVDWWDMVCNVKKLINEKKEDGKVFWQNLAGYKRQEALRPYLSSEEDRKKGKKFARYQLGDLLLHLEKKHGEDWGKVYDEAWERIDKKVEGLSKHIKLEEERRSEDAQSKAALTDWLRAKASFVIEGSKEADKDEFCRCELKLQKWYGDLRGKPFAIEAENSILDISGFSKQYNCAFIWQKDGVKKLNLYLIINYFKGGKLRFKKIKPEAFEANRFYTVINKKSGEIVPMEVNFNFDDPNLIILPLAFGKRQGREFIWNDLLSLETGSLKLANGRVIEKTLYNRRTRQDEPALFVALTFERREVLDSSNIKPMNLIGVDRGENIPAVIALTDPEGCPLSRFKDSLGNPTHILRIGESYKEKQRTIQAKKEVEQRRAGGYSRKYASKAKNLADDMVRNTARDLLYYAVTQDAMLIFENLSRGFGRQGKRTFMAERQYTRMEDWLTAKLAYEGLPSKTYLSKTLAQYTSKTCSNCGFTITSADYDRVLEKLKKTATGWMTTINGKELKVEGQITYYNRYKRQNVVKDLSVELDRLSEESVNNDISSWTKGRSGEALSLLKKRFSHRPVQEKFVCLNCGFETHADEQAALNIARSWLFLRSQEYKKYQTNKTTGNTDKRAFVETWQSFYRKKLKEVWKPAV

SEQ ID NO: 48187 - protein, 978 aa, synthetic construct
  REGION 1..978: note = engineered CasX variant
QEIKRINKIRRRLVKDSNTKKAGKTGPMKTLLVRVMTPDLRERLENLRKKPENIPQPISNTSRANLNKLLTDYTEMKKAILHVYWEEFQKDPVGLMSRVAQPASKKIDQNKLKPEMDEKGNLTTAGFACSQCGQPLFVYKLEQVSEKGKAYTNYFGRCNVAEHEKLILLAQLKPEKDSDEAVTYSLGKFGQRALDFYSIHVTKESTHPVKPLAQIAGNRYASTPVGKALSDACMGTIASFLSKYQDIIIEHQKVVKGNQKRLESLRELAGKENLEYPSVTLPPQPHTKEGVDAYNEVIARVRMWVNLNLWQKLKLSRDDAKPLLRLKKFPSFPLVERQANEVDWWDMVCNVKKLINEKKEDGKVFWQNLAGYKRQEALRPYLSSEEDRKKGKKFARYQLGDLLLHLEKKHGEDWGKVYDEAWERIDKKVEGLSKHIKLEEERRSEDAQSKAALTDWLRAKASFVIEGSKEADKDEFCRCELKLQKWYGDLRGKPFAIEAENSILDISGFSKQYNCAFIWQKDGVKKLNLYLIINYFKGGKLRFKKIKPEAFEANRFYTVINKKSGEIVPMEVNFNFDDPNLIILPLAFGKRQGREFIWNDLLSLETGSLKLANGRVIEKTLYNRRTRQDEPALFVALTFERREVLDSSNIKPMNLIGVDRGENIPAVIALTDPEGCPLSRFKDSLGNPTHILRIGESYKEKQRTIQAKKEVEQRRAGGYSRKYASKAKNLADDMVRNTARDLLYYAVTQDAMLIFENLSRGFGRQGKRTFMAERQYTRMEDWLTAKLAYEGLPSKTYLSKTLAQYTSKTCSNCGFTITSADYDRVLEKLKKTATGWMTTINGKELKVEGQITYYNRYKRQNVVKDLSVELDRLSEESVNNDISSWTKGRSGEALSLLKKRFSHRPVQEKFVCLNCGFETHADEQAALNIARSWLFLRSQEYKKYQTNKTTGNTDKRAFVETWQSFYRKKLKEVWKPAV

SEQ ID NO: 48188 - protein, 978 aa, synthetic construct
  REGION 1..978: note = engineered CasX variant
QEIKRINKIRRRLVKDSNTKKAGKTGPMKTLLVRVMTPDLRERLENLRKKPENIPQPISNTSRANLNKLLTDYTEMKKAILHVYWEEFQKDPVGLMSRVAQPASKKIDQNKLKPEMDEKGNLTTAGFACSQCGQPLFVYKLEQVSEKGKAYTNYFGRCNVAEHEKLILLAQLKPEKDSDEAVTYSLGKFGQRALDFYSIHVTKESTHPVKPLAQIAGNRYASAPVGKALSDACMGTIASFLSKYQDIIIEHQKVVKGNQKRLESLRELAGKENLEYPSVTLPPQPHTKEGVDAYNEVIARVRMWVNLNLWQKLKLSRDDAKPLLRLKKFPSFPLVERQANEVDWWDMVCNVKKLINEKKEDGKVFWQNLAGYKRQEALRPYLSSEEDRKKGKKFARYQLGDLLLHLEKKHGEDWGKVYDEAWERIDKKVEGLSKHIKLEEERRSEDAQSKAALTDWLRAKASFVIEGSKEADKDEFCRCELKLQKWYGDLRGKPFAIEAENSILDISGFSKQYNCAFIWQKDGVKKLNLYLIINYFKGGKLRFKKIKPEAFEANRFYTVINKKSGEIVPMEVNFNFDDPNLIILPLAFGKRQGREFIWNDLLSLETGSLKLANGRVIEKTLYNRRTRQDEPALFVALTFERREVLDSSNIKPMNLIGVDRGENIPAVIALTDPEGCPLSRFKDSLGNPTHILRIGESYKEKQRTIQAKKEVEQRRAGGYSRKYASKAKNLADDMVRNTARDLLYYAVTQDAMLIFENLSRGFGRQGKRTFMAERQYTRMEDWLTAKLAYEGLPSKTYLSKTLAQYTSKTCSNCGFTITSADYDRVLEKLKKTATGWMTTINGKELKVEGQITYYNRYKRQNVVKDLSVELDRLSEESVNNDISSWTKGRSGEALSLLKKRFSHRPVQEKFVCLNCGFETHADEQAALNIARSWLFLRSQEYKKYQTNKTTGNTDKRAFVETWQSFYRKKLKEVWKPAV

SEQ ID NO: 48189 - protein, 978 aa, synthetic construct
  REGION 1..978: note = engineered CasX variant
QEIKRINKIRRRLVKDSNTKKAGKTGPMKTLLVRVMTPDLRERLENLRKKPENIPQPISNTSRANLNKLLTDYTEMKKAILHVYWEEFQKDPVGLMSRVAQPASKKIDQNKLKPEMDEKGNLTTAGFACSQCGQPLFVYKLEQVSEKGKAYTNYFGRCNVAEHEKLILLAQLKPEKDSDEAVTYSLGKFGQRALDFYSIHVTKESTHPVKPLAQIAGNRYASVPVGKALSDACMGTIASFLSKYQDIIIEHQKVVKGNQKRLESLRELAGKENLEYPSVTLPPQPHTKEGVDAYNEVIARVRMWVNLNLWQKLKLSRDDAKPLLRLKKFPSFPLVERQANEVDWWDMVCNVKKLINEKKEDGKVFWQNLAGYKRQEALRPYLSSEEDRKKGKKFARYQLGDLLLHLEKKHGEDWGKVYDEAWERIDKKVEGLSKHIKLEEERRSEDAQSKAALTDWLRAKASFVIEGSKEADKDEFCRCELKLQKWYGDLRGKPFAIEAENSILDISGFSKQYNCAFIWQKDGVKKLNLYLIINYFKGGKLRFKKIKPEAFEANRFYTVINKKSGEIVPMEVNFNFDDPNLIILPLAFGKRQGREFIWNDLLSLETGSLKLANGRVIEKTLYNRRTRQDEPALFVALTFERREVLDSSNIKPMNLIGVDRGENIPAVIALTDPEGCPLSRFKDSLGNPTHILRIGESYKEKQRTIQAKKEVEQRRAGGYSRKYASKAKNLADDMVRNTARDLLYYAVTQDAMLIFENLSRGFGRQGKRTFMAERQYTRMEDWLTAKLAYEGLPSKTYLSKTLAQYTSKTCSNCGFTITSADYDRVLEKLKKTATGWMTTINGKELKVEGQITYYNRYKRQNVVKDLSVELDRLSEESVNNDISSWTKGRSGEALSLLKKRFSHRPVQEKFVCLNCGFETHADEQAALNIARSWLFLRSQEYKKYQTNKTTGNTDKRAFVETWQSFYRKKLKEVWKPAV

SEQ ID NO: 48190 - protein, 978 aa, synthetic construct
  REGION 1..978: note = engineered CasX variant
QEIKRINKIRRRLVKDSNTKKAGKTGPMKTLLVRVMTPDLRERLENLRKKPENIPQPISNTSRANLNKLLTDYTEMKKAILHVYWEEFQKDPVGLMSRVAQPASKKIDQNKLKPEMDEKGNLTTAGFACSQCGQPLFVYKLEQVSEKGKAYTNYFGRCNVAEHEKLIKLAQLKPEKDSDEAVTYSLGKFGQRALDFYSIHVTKESTHPVKPLAQIAGNRYASGPVGKALSDACMGTIASFLSKYQDIIIEHQKVVKGNQKRLESLRELAGKENLEYPSVTLPPQPHTKEGVDAYNEVIARVRMWVNLNLWQKLKLSRDDAKPLLRLKKFPSFPLVERQANEVDWWDMVCNVKKLINEKKEDGKVFWQNLAGYKRQEALRPYLSSEEDRKKGKKFARYQLGDLLLHLEKKHGEDWGKVYDEAWERIDKKVEGLSKHIKLEEERRSEDAQSKAALTDWLRAKASFVIEGSKEADKDEFCRCELKLQKWYGDLRGKPFAIEAENSILDISGFSKQYNCAFIWQKDGVKKLNLYLIINYFKGGKLRFKKIKPEAFEANRFYTVINKKSGEIVPMEVNFNFDDPNLIILPLAFGKRQGREFIWNDLLSLETGSLKLANGRVIEKTLYNRRTRQDEPALFVALTFERREVLDSSNIKPMNLIGVDRGENIPAVIALTDPEGCPLSRFKDSLGNPTHILRIGESYKEKQRTIQAKKEVEQRRAGGYSRKYASKAKNLADDMVRNTARDLLYYAVTQDAMLIFENLSRGFGRQGKRTFMAERQYTRMEDWLTAKLAYEGLPSKTYLSKTLAQYTSKTCSNCGFTITSADYDRVLEKLKKTATGWMTTINGKELKVEGQITYYNRYKRQNVVKDLSVELDRLSEESVNNDISSWTKGRSGEALSLLKKRFSHRPVQEKFVCLNCGFETHADEQAALNIARSWLFLRSQEYKKYQTNKTTGNTDKRAFVETWQSFYRKKLKEVWKPAV

SEQ ID NO: 48191 - protein, 977 aa, synthetic construct
  REGION 1..977: note = engineered CasX variant
QEIKRINKIRRRLVKDSNTKKAGKTGPMKTLLVRVMTPDLRERLENLRKKPENIPQPISNTSRANLNKLLTDYTEMKKAILHVYWEEFQKDPVGLMSRVAQPASKKIDQNKLKPEMDEKGNLTTAGFACSQCGQPLFVYKLEQVSEKGKAYTNYFGRCNVAEHEKLILLAQLKPEKDSDEAVTYSLGKFGQRALDFYSIHVTKESTHPVKPLAQIAGNRYASPVGKALSDACMGTIASFLSKYQDIIIEHQKVVKGNQKRLESLRELAGKENLEYPSVTLPPQPHTKEGVDAYNEVIARVRMWVNLNLWQKLKLSRDDAKPLLRLKKFPSFPLVERQANEVDWWDMVCNVKKLINEKKEDGKVFWQNLAGYKRQEALRPYLSSEEDRKKGKKFARYQLGDLLLHLEKKHGEDWGKVYDEAWERIDKKVEGLSKHIKLEEERRSEDAQSKAALTDWLRAKASFVIEGSKEADKDEFCRCELKLQKWYGDLRGKPFAIEAENSILDISGFSKQYNCAFIWQKDGVKKLNLYLIINYFKGGKLRFKKIKPEAFEANRFYTVINKKSGEIVPMEVNFNFDDPNLIILPLAFGKRQGREFIWNDLLSLETGSLKLANGRVIEKTLYNRRTRQDEPALFVALTFERREVLDSSNIKPMNLIGVDRGENIPAVIALTDPEGCPLSRFKDSLGNPTHILRIGESYKEKQRTIQAKKEVEQRRAGGYSRKYASKAKNLADDMVRNTARDLLYYAVTQDAMLIFENLSRGFGRQGKRTFMAERQYTRMEDWLTAKLAYEGLPSKTYLSKTLAQYTSKTCSNCGFTITSADYDRVLEKLKKTATGWMTTINGKELKVEGQITYYNRYKRQNVVKDLSVELDRLSEESVNNDISSWTKGRSGEALSLLKKRFSHRPVQEKFVCLNCGFETHADEQAALNIARSWLFLRSQEYKKYQTNKTTGNTDKRAFVETWQSFYRKKLKEVWKPAV

SEQ ID NO: 48192 - protein, 979 aa, synthetic construct
  REGION 1..979: note = engineered CasX variant
QEIKRINKIRRRLVKDSNTKKAGKTGPMKTLLVRVMTPDLRERLENLRKKPENIPQPISNTSRANLNKLLTDYTEMKKAILHVYWEEFQKDPVGLMSRVAQPASKKIDQNKLKPEMDEKGNLTTAGFACSQCGQPLFVYKLEQVSEKGKAYTNYFGRCNVAEHEKLILLAQLKPEKDSDEAVTYSLGKFGQRALDFYSIHVTKESTHPVKPLAQIAGNRYASYPVGKALSDACMGTIASFLSKYQDIIIEHQKVVKGNQKRLESLRELAGKENLEYPSVTLPPQPHTKEGVDAYNEVIARVRMWVNLNLWQKLKLSRDDAKPLLRLKKFPSFPLVERQANEVDWWDMVCNVKKLINEKKEDGKVFWQNLAGYKRQEALRPYLSSEEDRKKGKKFARYQLGDLLLHLEKKHGEDWGKVYDEAWERIDKKVEGLSKHIKLEEERRSEDAQSKAALTDWLRAKASFVIEGLKEADDKDEFCRCELKLQKWYGDLRGKPFAIEAENSILDISGFSKQYNCAFIWQKDGVKKLNLYLIINYFKGGKLRFKKIKPEAFEANRFYTVINKKSGEIVPMEVNFNFDDPNLIILPLAFGKRQGREFIWNDLLSLETGSLKLANGRVIEKTLYNRRTRQDEPALFVALTFERREVLDSSNIKPMNLIGVDRGENIPAVIALTDPEGCPLSRFKDSLGNPTHILRIGESYKEKQRTIQAKKEVEQRRAGGYSRKYASKAKNLADDMVRNTARDLLYYAVTQDAMLIFENLSRGFGRQGKRTFMAERQYTRMEDWLTAKLAYEGLPSKTYLSKTLAQYTSKTCSNCGFTITSADYDRVLEKLKKTATGWMTTINGKELKVEGQITYYNRYKRQNVVKDLSVELDRLSEESVNNDISSWTKGRSGEALSLLKKRFSHRPVQEKFVCLNCGFETHADEQAALNIARSWLFLRSQEYKKYQTNKTTGNTDKRAFVETWQSFYRKKLKEVWKPAV

SEQ ID NO: 48193 - protein, 979 aa, synthetic construct
  REGION 1..979: note = engineered CasX variant
QEIKRINKIRRRLVKDSNTKKAGKTGPMKTLLVRVMTPDLRERLENLRKKPENIPQPISNTSRANLNKLLTDYTEMKKAILHVYWEEFQKDPVGLMSRVAQPASKKIDQNKLKPEMDEKGNLTTAGFACSQCGQPLFVYKLEQVSEKGKAYTNYFGRCNVAEHEKLILLAQLKPEKDSDEAVTYSLGKFGQRALDFYSIHVTKESTHPVKPLAQIAGNRYASHPVGKALSDACMGTIASFLSKYQDIIIEHQKVVKGNQKRLESLRELAGKENLEYPSVTLPPQPHTKEGVDAYNEVIARVRMWVNLNLWQKLKLSRDDAKPLLRLKKFPSFPLVERQANEVDWWDMVCNVKKLINEKKEDGKVFWQNLAGYKRQEALRPYLSSEEDRKKGKKFARYQLGDLLLHLEKKHGEDWGKVYDEAWERIDKKVEGLSKHIKLEEERRSEDAQSKAALTDWLRAKASFVIEGLKEADDKDEFCRCELKLQKWYGDLRGKPFAIEAENSILDISGFSKQYNCAFIWQKDGVKKLNLYLIINYFKGGKLRFKKIKPEAFEANRFYTVINKKSGEIVPMEVNFNFDDPNLIILPLAFGKRQGREFIWNDLLSLETGSLKLANGRVIEKTLYNRRTRQDEPALFVALTFERREVLDSSNIKPMNLIGVDRGENIPAVIALTDPEGCPLSRFKDSLGNPTHILRIGESYKEKQRTIQAKKEVEQRRAGGYSRKYASKAKNLADDMVRNTARDLLYYAVTQDAMLIFENLSRGFGRQGKRTFMAERQYTRMEDWLTAKLAYEGLPSKTYLSKTLAQYTSKTCSNCGFTITSADYDRVLEKLKKTATGWMTTINGKELKVEGQITYYNRYKRQNVVKDLSVELDRLSEESVNNDISSWTKGRSGEALSLLKKRFSHRPVQEKFVCLNCGFETHADEQAALNIARSWLFLRSQEYKKYQTNKTTGNTDKRAFVETWQSFYRKKLKEVWKPAV

SEQ ID NO: 48194 - protein, 979 aa, synthetic construct
  REGION 1..979: note = engineered CasX variant
QEIKRINKIRRRLVKDSNTKKAGKTGPMKTLLVRVMTPDLRERLENLRKKPENIPQPISNTSRANLNKLLTDYTEMKKAILHVYWEEFQKDPVGLMSRVAQPASKKIDQNKLKPEMDEKGNLTTAGFACSQCGQPLFVYKLEQVSEKGKAYTNYFGRCNVAEHEKLILLAQLKPEKDSDEAVTYSLGKFGQRALDFYSIHVTKESTHPVKPLAQIAGNRYASSPVGKALSDACMGTIASFLSKYQDIIIEHQKVVKGNQKRLESLRELAGKENLEYPSVTLPPQPHTKEGVDAYNEVIARVRMWVNLNLWQKLKLSRDDAKPLLRLKKFPSFPLVERQANEVDWWDMVCNVKKLINEKKEDGKVFWQNLAGYKRQEALRPYLSSEEDRKKGKKFARYQLGDLLLHLEKKHGEDWGKVYDEAWERIDKKVEGLSKHIKLEEERRSEDAQSKAALTDWLRAKASFVIEGLKEADDKDEFCRCELKLQKWYGDLRGKPFAIEAENSILDISGFSKQYNCAFIWQKDGVKKLNLYLIINYFKGGKLRFKKIKPEAFEANRFYTVINKKSGEIVPMEVNFNFDDPNLIILPLAFGKRQGREFIWNDLLSLETGSLKLANGRVIEKTLYNRRTRQDEPALFVALTFERREVLDSSNIKPMNLIGVDRGENIPAVIALTDPEGCPLSRFKDSLGNPTHILRIGESYKEKQRTIQAKKEVEQRRAGGYSRKYASKAKNLADDMVRNTARDLLYYAVTQDAMLIFENLSRGFGRQGKRTFMAERQYTRMEDWLTAKLAYEGLPSKTYLSKTLAQYTSKTCSNCGFTITSADYDRVLEKLKKTATGWMTTINGKELKVEGQITYYNRYKRQNVVKDLSVELDRLSEESVNNDISSWTKGRSGEALSLLKKRFSHRPVQEKFVCLNCGFETHADEQAALNIARSWLFLRSQEYKKYQTNKTTGNTDKRAFVETWQSFYRKKLKEVWKPAV

SEQ ID NO: 48195 - protein, 979 aa, synthetic construct
  REGION 1..979: note = engineered CasX variant
QEIKRINKIRRRLVKDSNTKKAGKTGPMKTLLVRVMTPDLRERLENLRKKPENIPQPISNTSRANLNKLLTDYTEMKKAILHVYWEEFQKDPVGLMSRVAQPASKKIDQNKLKPEMDEKGNLTTAGFACSQCGQPLFVYKLEQVSEKGKAYTNYFGRCNVAEHEKLILLAQLKPEKDSDEAVTYSLGKFGQRALDFYSIHVTKESTHPVKPLAQIAGNRYASTPVGKALSDACMGTIASFLSKYQDIIIEHQKVVKGNQKRLESLRELAGKENLEYPSVTLPPQPHTKEGVDAYNEVIARVRMWVNLNLWQKLKLSRDDAKPLLRLKKFPSFPLVERQANEVDWWDMVCNVKKLINEKKEDGKVFWQNLAGYKRQEALRPYLSSEEDRKKGKKFARYQLGDLLLHLEKKHGEDWGKVYDEAWERIDKKVEGLSKHIKLEEERRSEDAQSKAALTDWLRAKASFVIEGLKEADDKDEFCRCELKLQKWYGDLRGKPFAIEAENSILDISGFSKQYNCAFIWQKDGVKKLNLYLIINYFKGGKLRFKKIKPEAFEANRFYTVINKKSGEIVPMEVNFNFDDPNLIILPLAFGKRQGREFIWNDLLSLETGSLKLANGRVIEKTLYNRRTRQDEPALFVALTFERREVLDSSNIKPMNLIGVDRGENIPAVIALTDPEGCPLSRFKDSLGNPTHILRIGESYKEKQRTIQAKKEVEQRRAGGYSRKYASKAKNLADDMVRNTARDLLYYAVTQDAMLIFENLSRGFGRQGKRTFMAERQYTRMEDWLTAKLAYEGLPSKTYLSKTLAQYTSKTCSNCGFTITSADYDRVLEKLKKTATGWMTTINGKELKVEGQITYYNRYKRQNVVKDLSVELDRLSEESVNNDISSWTKGRSGEALSLLKKRFSHRPVQEKFVCLNCGFETHADEQAALNIARSWLFLRSQEYKKYQTNKTTGNTDKRAFVETWQSFYRKKLKEVWKPAV

SEQ ID NO: 48196 - protein, 979 aa, synthetic construct
  REGION 1..979: note = engineered CasX variant
QEIKRINKIRRRLVKDSNTKKAGKTGPMKTLLVRVMTPDLRERLENLRKKPENIPQPISNTSRANLNKLLTDYTEMKKAILHVYWEEFQKDPVGLMSRVAQPASKKIDQNKLKPEMDEKGNLTTAGFACSQCGQPLFVYKLEQVSEKGKAYTNYFGRCNVAEHEKLILLAQLKPEKDSDEAVTYSLGKFGQRALDFYSIHVTKESTHPVKPLAQIAGNRYASAPVGKALSDACMGTIASFLSKYQDIIIEHQKVVKGNQKRLESLRELAGKENLEYPSVTLPPQPHTKEGVDAYNEVIARVRMWVNLNLWQKLKLSRDDAKPLLRLKKFPSFPLVERQANEVDWWDMVCNVKKLINEKKEDGKVFWQNLAGYKRQEALRPYLSSEEDRKKGKKFARYQLGDLLLHLEKKHGEDWGKVYDEAWERIDKKVEGLSKHIKLEEERRSEDAQSKAALTDWLRAKASFVIEGLKEADDKDEFCRCELKLQKWYGDLRGKPFAIEAENSILDISGFSKQYNCAFIWQKDGVKKLNLYLIINYFKGGKLRFKKIKPEAFEANRFYTVINKKSGEIVPMEVNFNFDDPNLIILPLAFGKRQGREFIWNDLLSLETGSLKLANGRVIEKTLYNRRTRQDEPALFVALTFERREVLDSSNIKPMNLIGVDRGENIPAVIALTDPEGCPLSRFKDSLGNPTHILRIGESYKEKQRTIQAKKEVEQRRAGGYSRKYASKAKNLADDMVRNTARDLLYYAVTQDAMLIFENLSRGFGRQGKRTFMAERQYTRMEDWLTAKLAYEGLPSKTYLSKTLAQYTSKTCSNCGFTITSADYDRVLEKLKKTATGWMTTINGKELKVEGQITYYNRYKRQNVVKDLSVELDRLSEESVNNDISSWTKGRSGEALSLLKKRFSHRPVQEKFVCLNCGFETHADEQAALNIARSWLFLRSQEYKKYQTNKTTGNTDKRAFVETWQSFYRKKLKEVWKPAV

SEQ ID NO: 48197 - protein, 979 aa, synthetic construct
  REGION 1..979: note = engineered CasX variant
QEIKRINKIRRRLVKDSNTKKAGKTGPMKTLLVRVMTPDLRERLENLRKKPENIPQPISNTSRANLNKLLTDYTEMKKAILHVYWEEFQKDPVGLMSRVAQPASKKIDQNKLKPEMDEKGNLTTAGFACSQCGQPLFVYKLEQVSEKGKAYTNYFGRCNVAEHEKLILLAQLKPEKDSDEAVTYSLGKFGQRALDFYSIHVTKESTHPVKPLAQIAGNRYASVPVGKALSDACMGTIASFLSKYQDIIIEHQKVVKGNQKRLESLRELAGKENLEYPSVTLPPQPHTKEGVDAYNEVIARVRMWVNLNLWQKLKLSRDDAKPLLRLKKFPSFPLVERQANEVDWWDMVCNVKKLINEKKEDGKVFWQNLAGYKRQEALRPYLSSEEDRKKGKKFARYQLGDLLLHLEKKHGEDWGKVYDEAWERIDKKVEGLSKHIKLEEERRSEDAQSKAALTDWLRAKASFVIEGLKEADDKDEFCRCELKLQKWYGDLRGKPFAIEAENSILDISGFSKQYNCAFIWQKDGVKKLNLYLIINYFKGGKLRFKKIKPEAFEANRFYTVINKKSGEIVPMEVNFNFDDPNLIILPLAFGKRQGREFIWNDLLSLETGSLKLANGRVIEKTLYNRRTRQDEPALFVALTFERREVLDSSNIKPMNLIGVDRGENIPAVIALTDPEGCPLSRFKDSLGNPTHILRIGESYKEKQRTIQAKKEVEQRRAGGYSRKYASKAKNLADDMVRNTARDLLYYAVTQDAMLIFENLSRGFGRQGKRTFMAERQYTRMEDWLTAKLAYEGLPSKTYLSKTLAQYTSKTCSNCGFTITSADYDRVLEKLKKTATGWMTTINGKELKVEGQITYYNRYKRQNVVKDLSVELDRLSEESVNNDISSWTKGRSGEALSLLKKRFSHRPVQEKFVCLNCGFETHADEQAALNIARSWLFLRSQEYKKYQTNKTTGNTDKRAFVETWQSFYRKKLKEVWKPAV

SEQ ID NO: 48198 - protein, 979 aa, synthetic construct
  REGION 1..979: note = engineered CasX variant
QEIKRINKIRRRLVKDSNTKKAGKTGPMKTLLVRVMTPDLRERLENLRKKPENIPQPISNTSRANLNKLLTDYTEMKKAILHVYWEEFQKDPVGLMSRVAQPASKKIDQNKLKPEMDEKGNLTTAGFACSQCGQPLFVYKLEQVSEKGKAYTNYFGRCNVAEHEKLIKLAQLKPEKDSDEAVTYSLGKFGQRALDFYSIHVTKESTHPVKPLAQIAGNRYASGPVGKALSDACMGTIASFLSKYQDIIIEHQKVVKGNQKRLESLRELAGKENLEYPSVTLPPQPHTKEGVDAYNEVIARVRMWVNLNLWQKLKLSRDDAKPLLRLKKFPSFPLVERQANEVDWWDMVCNVKKLINEKKEDGKVFWQNLAGYKRQEALRPYLSSEEDRKKGKKFARYQLGDLLLHLEKKHGEDWGKVYDEAWERIDKKVEGLSKHIKLEEERRSEDAQSKAALTDWLRAKASFVIEGLKEADDKDEFCRCELKLQKWYGDLRGKPFAIEAENSILDISGFSKQYNCAFIWQKDGVKKLNLYLIINYFKGGKLRFKKIKPEAFEANRFYTVINKKSGEIVPMEVNFNFDDPNLIILPLAFGKRQGREFIWNDLLSLETGSLKLANGRVIEKTLYNRRTRQDEPALFVALTFERREVLDSSNIKPMNLIGVDRGENIPAVIALTDPEGCPLSRFKDSLGNPTHILRIGESYKEKQRTIQAKKEVEQRRAGGYSRKYASKAKNLADDMVRNTARDLLYYAVTQDAMLIFENLSRGFGRQGKRTFMAERQYTRMEDWLTAKLAYEGLPSKTYLSKTLAQYTSKTCSNCGFTITSADYDRVLEKLKKTATGWMTTINGKELKVEGQITYYNRYKRQNVVKDLSVELDRLSEESVNNDISSWTKGRSGEALSLLKKRFSHRPVQEKFVCLNCGFETHADEQAALNIARSWLFLRSQEYKKYQTNKTTGNTDKRAFVETWQSFYRKKLKEVWKPAV

SEQ ID NO: 48199 - protein, 978 aa, synthetic construct
  REGION 1..978: note = engineered CasX variant
QEIKRINKIRRRLVKDSNTKKAGKTGPMKTLLVRVMTPDLRERLENLRKKPENIPQPISNTSRANLNKLLTDYTEMKKAILHVYWEEFQKDPVGLMSRVAQPASKKIDQNKLKPEMDEKGNLTTAGFACSQCGQPLFVYKLEQVSEKGKAYTNYFGRCNVAEHEKLILLAQLKPEKDSDEAVTYSLGKFGQRALDFYSIHVTKESTHPVKPLAQIAGNRYASPVGKALSDACMGTIASFLSKYQDIIIEHQKVVKGNQKRLESLRELAGKENLEYPSVTLPPQPHTKEGVDAYNEVIARVRMWVNLNLWQKLKLSRDDAKPLLRLKKFPSFPLVERQANEVDWWDMVCNVKKLINEKKEDGKVFWQNLAGYKRQEALRPYLSSEEDRKKGKKFARYQLGDLLLHLEKKHGEDWGKVYDEAWERIDKKVEGLSKHIKLEEERRSEDAQSKAALTDWLRAKASFVIEGLKEADDKDEFCRCELKLQKWYGDLRGKPFAIEAENSILDISGFSKQYNCAFIWQKDGVKKLNLYLIINYFKGGKLRFKKIKPEAFEANRFYTVINKKSGEIVPMEVNFNFDDPNLIILPLAFGKRQGREFIWNDLLSLETGSLKLANGRVIEKTLYNRRTRQDEPALFVALTFERREVLDSSNIKPMNLIGVDRGENIPAVIALTDPEGCPLSRFKDSLGNPTHILRIGESYKEKQRTIQAKKEVEQRRAGGYSRKYASKAKNLADDMVRNTARDLLYYAVTQDAMLIFENLSRGFGRQGKRTFMAERQYTRMEDWLTAKLAYEGLPSKTYLSKTLAQYTSKTCSNCGFTITSADYDRVLEKLKKTATGWMTTINGKELKVEGQITYYNRYKRQNVVKDLSVELDRLSEESVNNDISSWTKGRSGEALSLLKKRFSHRPVQEKFVCLNCGFETHADEQAALNIARSWLFLRSQEYKKYQTNKTTGNTDKRAFVETWQSFYRKKLKEVWKPAV

SEQ ID NO: 48200 - protein, 979 aa, synthetic construct
  REGION 1..979: note = engineered CasX variant
QEIKRINKIRRRLVKDSNTKKAGKTGPMKTLLVRVMTPDLRERLENLRKKPENIPQPISNTSRANLNKLLTDYTEMKKAILHVYWEEFQKDPVGLMSRVAQPASKKIDQNKLKPEMDEKGNLTTAGFACSQCGQPLFVYKLEQVSEKGKAYTNYFGRCNVAEHEKLILLAQLKPEKDSDEAVTYSLGKFGQRALDFYSIHVTKESTHPVKPLAQIAGNRYASYPVGKALSDACMGTIASFLSKYQDIIIEHQKVVKGNQKRLESLRELAGKENLEYPSVTLPPQPHTKEGVDAYNEVIARVRMWVNLNLWQKLKLSRDDAKPLLRLKKFPSFPLVERQANEVDWWDMVCNVKKLINEKKEDGKVFWQNLAGYKRQEALRPYLSSEEDRKKGKKFARYQLGDLLLHLEKKHGEDWGKVYDEAWERIDKKVEGLSKHIKLEEERRSEDAQSKAALTDWLRAKASFVIEGLKEADKDEFCRCELKLQKWYGDLRGKPFAIEAENSILDISGFSKQYNCAFIWQKDGVKKLNLYLIINYFKGGKLRFKKIKPEAFEANRFYTVINKKSGEIVPMEVNFNFDDPNLIILPLAFGKRQGREFIWNDLLSLETGSLKLANGRVIEKTLYNRRTRQDEPALFVALTFERREVLDSSNIKPMNLIGVDRGENIPAVIALTDPEGCPLSRFKDSLGNPTHILRIGESYKEKQRTIQAKKEVEQRRAGGYSRKYASKAKNLADDMVRNTARDLLYYAVTQDAMLIFENLSRGFGRQGKRTFMAERQYTRMEDWLTAKLAYEGLPSKTYLSKTLAQYTSKTCSNCGFTITSADYDRVLEKLKKTATGWMTTINGKELKVEGQITYYNRYKRQNVVKDLSVELDRLSEESVNNDISSWTKGRSGNEALSLLKKRFSHRPVQEKFVCLNCGFETHADEQAALNIARSWLFLRSQEYKKYQTNKTTGNTDKRAFVETWQSFYRKKLKEVWKPAV

SEQ ID NO: 48201 - protein, 979 aa, synthetic construct
  REGION 1..979: note = engineered CasX variant
QEIKRINKIRRRLVKDSNTKKAGKTGPMKTLLVRVMTPDLRERLENLRKKPENIPQPISNTSRANLNKLLTDYTEMKKAILHVYWEEFQKDPVGLMSRVAQPASKKIDQNKLKPEMDEKGNLTTAGFACSQCGQPLFVYKLEQVSEKGKAYTNYFGRCNVAEHEKLILLAQLKPEKDSDEAVTYSLGKFGQRALDFYSIHVTKESTHPVKPLAQIAGNRYASHPVGKALSDACMGTIASFLSKYQDIIIEHQKVVKGNQKRLESLRELAGKENLEYPSVTLPPQPHTKEGVDAYNEVIARVRMWVNLNLWQKLKLSRDDAKPLLRLKKFPSFPLVERQANEVDWWDMVCNVKKLINEKKEDGKVFWQNLAGYKRQEALRPYLSSEEDRKKGKKFARYQLGDLLLHLEKKHGEDWGKVYDEAWERIDKKVEGLSKHIKLEEERRSEDAQSKAALTDWLRAKASFVIEGLKEADKDEFCRCELKLQKWYGDLRGKPFAIEAENSILDISGFSKQYNCAFIWQKDGVKKLNLYLIINYFKGGKLRFKKIKPEAFEANRFYTVINKKSGEIVPMEVNFNFDDPNLIILPLAFGKRQGREFIWNDLLSLETGSLKLANGRVIEKTLYNRRTRQDEPALFVALTFERREVLDSSNIKPMNLIGVDRGENIPAVIALTDPEGCPLSRFKDSLGNPTHILRIGESYKEKQRTIQAKKEVEQRRAGGYSRKYASKAKNLADDMVRNTARDLLYYAVTQDAMLIFENLSRGFGRQGKRTFMAERQYTRMEDWLTAKLAYEGLPSKTYLSKTLAQYTSKTCSNCGFTITSADYDRVLEKLKKTATGWMTTINGKELKVEGQITYYNRYKRQNVVKDLSVELDRLSEESVNNDISSWTKGRSGNEALSLLKKRFSHRPVQEKFVCLNCGFETHADEQAALNIARSWLFLRSQEYKKYQTNKTTGNTDKRAFVETWQSFYRKKLKEVWKPAV

SEQ ID NO: 48202 - protein, 979 aa, synthetic construct
  REGION 1..979: note = engineered CasX variant
QEIKRINKIRRRLVKDSNTKKAGKTGPMKTLLVRVMTPDLRERLENLRKKPENIPQPISNTSRANLNKLLTDYTEMKKAILHVYWEEFQKDPVGLMSRVAQPASKKIDQNKLKPEMDEKGNLTTAGFACSQCGQPLFVYKLEQVSEKGKAYTNYFGRCNVAEHEKLILLAQLKPEKDSDEAVTYSLGKFGQRALDFYSIHVTKESTHPVKPLAQIAGNRYASSPVGKALSDACMGTIASFLSKYQDIIIEHQKVVKGNQKRLESLRELAGKENLEYPSVTLPPQPHTKEGVDAYNEVIARVRMWVNLNLWQKLKLSRDDAKPLLRLKKFPSFPLVERQANEVDWWDMVCNVKKLINEKKEDGKVFWQNLAGYKRQEALRPYLSSEEDRKKGKKFARYQLGDLLLHLEKKHGEDWGKVYDEAWERIDKKVEGLSKHIKLEEERRSEDAQSKAALTDWLRAKASFVIEGLKEADKDEFCRCELKLQKWYGDLRGKPFAIEAENSILDISGFSKQYNCAFIWQKDGVKKLNLYLIINYFKGGKLRFKKIKPEAFEANRFYTVINKKSGEIVPMEVNFNFDDPNLIILPLAFGKRQGREFIWNDLLSLETGSLKLANGRVIEKTLYNRRTRQDEPALFVALTFERREVLDSSNIKPMNLIGVDRGENIPAVIALTDPEGCPLSRFKDSLGNPTHILRIGESYKEKQRTIQAKKEVEQRRAGGYSRKYASKAKNLADDMVRNTARDLLYYAVTQDAMLIFENLSRGFGRQGKRTFMAERQYTRMEDWLTAKLAYEGLPSKTYLSKTLAQYTSKTCSNCGFTITSADYDRVLEKLKKTATGWMTTINGKELKVEGQITYYNRYKRQNVVKDLSVELDRLSEESVNNDISSWTKGRSGNEALSLLKKRFSHRPVQEKFVCLNCGFETHADEQAALNIARSWLFLRSQEYKKYQTNKTTGNTDKRAFVETWQSFYRKKLKEVWKPAV

SEQ ID NO: 48203 - protein, 979 aa, synthetic construct
  REGION 1..979: note = engineered CasX variant
QEIKRINKIRRRLVKDSNTKKAGKTGPMKTLLVRVMTPDLRERLENLRKKPENIPQPISNTSRANLNKLLTDYTEMKKAILHVYWEEFQKDPVGLMSRVAQPASKKIDQNKLKPEMDEKGNLTTAGFACSQCGQPLFVYKLEQVSEKGKAYTNYFGRCNVAEHEKLILLAQLKPEKDSDEAVTYSLGKFGQRALDFYSIHVTKESTHPVKPLAQIAGNRYASTPVGKALSDACMGTIASFLSKYQDIIIEHQKVVKGNQKRLESLRELAGKENLEYPSVTLPPQPHTKEGVDAYNEVIARVRMWVNLNLWQKLKLSRDDAKPLLRLKKFPSFPLVERQANEVDWWDMVCNVKKLINEKKEDGKVFWQNLAGYKRQEALRPYLSSEEDRKKGKKFARYQLGDLLLHLEKKHGEDWGKVYDEAWERIDKKVEGLSKHIKLEEERRSEDAQSKAALTDWLRAKASFVIEGLKEADKDEFCRCELKLQKWYGDLRGKPFAIEAENSILDISGFSKQYNCAFIWQKDGVKKLNLYLIINYFKGGKLRFKKIKPEAFEANRFYTVINKKSGEIVPMEVNFNFDDPNLIILPLAFGKRQGREFIWNDLLSLETGSLKLANGRVIEKTLYNRRTRQDEPALFVALTFERREVLDSSNIKPMNLIGVDRGENIPAVIALTDPEGCPLSRFKDSLGNPTHILRIGESYKEKQRTIQAKKEVEQRRAGGYSRKYASKAKNLADDMVRNTARDLLYYAVTQDAMLIFENLSRGFGRQGKRTFMAERQYTRMEDWLTAKLAYEGLPSKTYLSKTLAQYTSKTCSNCGFTITSADYDRVLEKLKKTATGWMTTINGKELKVEGQITYYNRYKRQNVVKDLSVELDRLSEESVNNDISSWTKGRSGNEALSLLKKRFSHRPVQEKFVCLNCGFETHADEQAALNIARSWLFLRSQEYKKYQTNKTTGNTDKRAFVETWQSFYRKKLKEVWKPAV

SEQ ID NO: 48204 - protein, 979 aa, synthetic construct
  REGION 1..979: note = engineered CasX variant
QEIKRINKIRRRLVKDSNTKKAGKTGPMKTLLVRVMTPDLRERLENLRKKPENIPQPISNTSRANLNKLLTDYTEMKKAILHVYWEEFQKDPVGLMSRVAQPASKKIDQNKLKPEMDEKGNLTTAGFACSQCGQPLFVYKLEQVSEKGKAYTNYFGRCNVAEHEKLILLAQLKPEKDSDEAVTYSLGKFGQRALDFYSIHVTKESTHPVKPLAQIAGNRYASAPVGKALSDACMGTIASFLSKYQDIIIEHQKVVKGNQKRLESLRELAGKENLEYPSVTLPPQPHTKEGVDAYNEVIARVRMWVNLNLWQKLKLSRDDAKPLLRLKKFPSFPLVERQANEVDWWDMVCNVKKLINEKKEDGKVFWQNLAGYKRQEALRPYLSSEEDRKKGKKFARYQLGDLLLHLEKKHGEDWGKVYDEAWERIDKKVEGLSKHIKLEEERRSEDAQSKAALTDWLRAKASFVIEGLKEADKDEFCRCELKLQKWYGDLRGKPFAIEAENSILDISGFSKQYNCAFIWQKDGVKKLNLYLIINYFKGGKLRFKKIKPEAFEANRFYTVINKKSGEIVPMEVNFNFDDPNLIILPLAFGKRQGREFIWNDLLSLETGSLKLANGRVIEKTLYNRRTRQDEPALFVALTFERREVLDSSNIKPMNLIGVDRGENIPAVIALTDPEGCPLSRFKDSLGNPTHILRIGESYKEKQRTIQAKKEVEQRRAGGYSRKYASKAKNLADDMVRNTARDLLYYAVTQDAMLIFENLSRGFGRQGKRTFMAERQYTRMEDWLTAKLAYEGLPSKTYLSKTLAQYTSKTCSNCGFTITSADYDRVLEKLKKTATGWMTTINGKELKVEGQITYYNRYKRQNVVKDLSVELDRLSEESVNNDISSWTKGRSGNEALSLLKKRFSHRPVQEKFVCLNCGFETHADEQAALNIARSWLFLRSQEYKKYQTNKTTGNTDKRAFVETWQSFYRKKLKEVWKPAV

SEQ ID NO: 48205 - protein, 979 aa, synthetic construct
  REGION 1..979: note = engineered CasX variant
QEIKRINKIRRRLVKDSNTKKAGKTGPMKTLLVRVMTPDLRERLENLRKKPENIPQPISNTSRANLNKLLTDYTEMKKAILHVYWEEFQKDPVGLMSRVAQPASKKIDQNKLKPEMDEKGNLTTAGFACSQCGQPLFVYKLEQVSEKGKAYTNYFGRCNVAEHEKLILLAQLKPEKDSDEAVTYSLGKFGQRALDFYSIHVTKESTHPVKPLAQIAGNRYASVPVGKALSDACMGTIASFLSKYQDIIIEHQKVVKGNQKRLESLRELAGKENLEYPSVTLPPQPHTKEGVDAYNEVIARVRMWVNLNLWQKLKLSRDDAKPLLRLKKFPSFPLVERQANEVDWWDMVCNVKKLINEKKEDGKVFWQNLAGYKRQEALRPYLSSEEDRKKGKKFARYQLGDLLLHLEKKHGEDWGKVYDEAWERIDKKVEGLSKHIKLEEERRSEDAQSKAALTDWLRAKASFVIEGLKEADKDEFCRCELKLQKWYGDLRGKPFAIEAENSILDISGFSKQYNCAFIWQKDGVKKLNLYLIINYFKGGKLRFKKIKPEAFEANRFYTVINKKSGEIVPMEVNFNFDDPNLIILPLAFGKRQGREFIWNDLLSLETGSLKLANGRVIEKTLYNRRTRQDEPALFVALTFERREVLDSSNIKPMNLIGVDRGENIPAVIALTDPEGCPLSRFKDSLGNPTHILRIGESYKEKQRTIQAKKEVEQRRAGGYSRKYASKAKNLADDMVRNTARDLLYYAVTQDAMLIFENLSRGFGRQGKRTFMAERQYTRMEDWLTAKLAYEGLPSKTYLSKTLAQYTSKTCSNCGFTITSADYDRVLEKLKKTATGWMTTINGKELKVEGQITYYNRYKRQNVVKDLSVELDRLSEESVNNDISSWTKGRSGNEALSLLKKRFSHRPVQEKFVCLNCGFETHADEQAALNIARSWLFLRSQEYKKYQTNKTTGNTDKRAFVETWQSFYRKKLKEVWKPAV

SEQ ID NO: 48206 - protein, 979 aa, synthetic construct
  REGION 1..979: note = engineered CasX variant
QEIKRINKIRRRLVKDSNTKKAGKTGPMKTLLVRVMTPDLRERLENLRKKPENIPQPISNTSRANLNKLLTDYTEMKKAILHVYWEEFQKDPVGLMSRVAQPASKKIDQNKLKPEMDEKGNLTTAGFACSQCGQPLFVYKLEQVSEKGKAYTNYFGRCNVAEHEKLIKLAQLKPEKDSDEAVTYSLGKFGQRALDFYSIHVTKESTHPVKPLAQIAGNRYASGPVGKALSDACMGTIASFLSKYQDIIIEHQKVVKGNQKRLESLRELAGKENLEYPSVTLPPQPHTKEGVDAYNEVIARVRMWVNLNLWQKLKLSRDDAKPLLRLKKFPSFPLVERQANEVDWWDMVCNVKKLINEKKEDGKVFWQNLAGYKRQEALRPYLSSEEDRKKGKKFARYQLGDLLLHLEKKHGEDWGKVYDEAWERIDKKVEGLSKHIKLEEERRSEDAQSKAALTDWLRAKASFVIEGLKEADKDEFCRCELKLQKWYGDLRGKPFAIEAENSILDISGFSKQYNCAFIWQKDGVKKLNLYLIINYFKGGKLRFKKIKPEAFEANRFYTVINKKSGEIVPMEVNFNFDDPNLIILPLAFGKRQGREFIWNDLLSLETGSLKLANGRVIEKTLYNRRTRQDEPALFVALTFERREVLDSSNIKPMNLIGVDRGENIPAVIALTDPEGCPLSRFKDSLGNPTHILRIGESYKEKQRTIQAKKEVEQRRAGGYSRKYASKAKNLADDMVRNTARDLLYYAVTQDAMLIFENLSRGFGRQGKRTFMAERQYTRMEDWLTAKLAYEGLPSKTYLSKTLAQYTSKTCSNCGFTITSADYDRVLEKLKKTATGWMTTINGKELKVEGQITYYNRYKRQNVVKDLSVELDRLSEESVNNDISSWTKGRSGNEALSLLKKRFSHRPVQEKFVCLNCGFETHADEQAALNIARSWLFLRSQEYKKYQTNKTTGNTDKRAFVETWQSFYRKKLKEVWKPAV

SEQ ID NO: 48207 - protein, 978 aa, synthetic construct
  REGION 1..978: note = engineered CasX variant
QEIKRINKIRRRLVKDSNTKKAGKTGPMKTLLVRVMTPDLRERLENLRKKPENIPQPISNTSRANLNKLLTDYTEMKKAILHVYWEEFQKDPVGLMSRVAQPASKKIDQNKLKPEMDEKGNLTTAGFACSQCGQPLFVYKLEQVSEKGKAYTNYFGRCNVAEHEKLILLAQLKPEKDSDEAVTYSLGKFGQRALDFYSIHVTKESTHPVKPLAQIAGNRYASPVGKALSDACMGTIASFLSKYQDIIIEHQKVVKGNQKRLESLRELAGKENLEYPSVTLPPQPHTKEGVDAYNEVIARVRMWVNLNLWQKLKLSRDDAKPLLRLKKFPSFPLVERQANEVDWWDMVCNVKKLINEKKEDGKVFWQNLAGYKRQEALRPYLSSEEDRKKGKKFARYQLGDLLLHLEKKHGEDWGKVYDEAWERIDKKVEGLSKHIKLEEERRSEDAQSKAALTDWLRAKASFVIEGLKEADKDEFCRCELKLQKWYGDLRGKPFAIEAENSILDISGFSKQYNCAFIWQKDGVKKLNLYLIINYFKGGKLRFKKIKPEAFEANRFYTVINKKSGEIVPMEVNFNFDDPNLIILPLAFGKRQGREFIWNDLLSLETGSLKLANGRVIEKTLYNRRTRQDEPALFVALTFERREVLDSSNIKPMNLIGVDRGENIPAVIALTDPEGCPLSRFKDSLGNPTHILRIGESYKEKQRTIQAKKEVEQRRAGGYSRKYASKAKNLADDMVRNTARDLLYYAVTQDAMLIFENLSRGFGRQGKRTFMAERQYTRMEDWLTAKLAYEGLPSKTYLSKTLAQYTSKTCSNCGFTITSADYDRVLEKLKKTATGWMTTINGKELKVEGQITYYNRYKRQNVVKDLSVELDRLSEESVNNDISSWTKGRSGNEALSLLKKRFSHRPVQEKFVCLNCGFETHADEQAALNIARSWLFLRSQEYKKYQTNKTTGNTDKRAFVETWQSFYRKKLKEVWKPAV

SEQ ID NO: 48208 - protein, 978 aa, synthetic construct
  REGION 1..978: note = engineered CasX variant
QEIKRINKIRRRLVKDSNTKKAGKTGPMKTLLVRVMTPDLRERLENLRKKPENIPQPISNTSRANLNKLLTDYTEMKKAILHVYWEEFQKDPVGLMSRVAQPASKKIDQNKLKPEMDEKGNLTTAGFACSQCGQPLFVYKLEQVSEKGKAYTNYFGRCNVAEHEKLILLAQLKPEKDSDEAVTYSLGKFGQRALDFYSIHVTKESTHPVKPLAQIAGNRYASYPVGKALSDACMGTIASFLSKYQDIIIEHQKVVKGNQKRLESLRELAGKENLEYPSVTLPPQPHTKEGVDAYNEVIARVRMWVNLNLWQKLKLSRDDAKPLLRLKKFPSFPLVERQANEVDWWDMVCNVKKLINEKKEDGKVFWQNLAGYKRQEALRPYLSSEEDRQKGKKFARYQLGDLLLHLEKKHGEDWGKVYDEAWERIDKKVEGLSKHIKLEEERRSEDAQSKAALTDWLRAKASFVIEGLKEADKDEFCRCELKLQKWYGDLRGKPFAIEAENSILDISGFSKQYNCAFIWQKDGVKKLNLYLIINYFKGGKLRFKKIKPEAFEANRFYTVINKKSGEIVPMEVNFNFDDPNLIILPLAFGKRQGREFIWNDLLSLETGSLKLANGRVIEKTLYNRRTRQDEPALFVALTFERREVLDSSNIKPMNLIGVDRGENIPAVIALTDPEGCPLSRFKDSLGNPTHILRIGESYKEKQRTIQAKKEVEQRRAGGYSRKYASKAKNLADDMVRNTARDLLYYAVTQDAMLIFENLSRGFGRQGKRTFMAERQYTRMEDWLTAKLAYEGLPSKTYLSKTLAQYTSKTCSNCGFTITSADYDRVLEKLKKTATGWMTTINGKELKVEGQITYYNRYKRQNVVKDLSVELDRLSEESVNNDISSWTKGRSGEALSLLKKRFSHRPVQEKFVCLNCGFETHADEQAALNIARSWLFLRSQEYKKYQTNKTTGNTDKRAFVETWQSFYRKKLKEVWKPAV

SEQ ID NO: 48209 - protein, 978 aa, synthetic construct
  REGION 1..978: note = engineered CasX variant
QEIKRINKIRRRLVKDSNTKKAGKTGPMKTLLVRVMTPDLRERLENLRKKPENIPQPISNTSRANLNKLLTDYTEMKKAILHVYWEEFQKDPVGLMSRVAQPASKKIDQNKLKPEMDEKGNLTTAGFACSQCGQPLFVYKLEQVSEKGKAYTNYFGRCNVAEHEKLILLAQLKPEKDSDEAVTYSLGKFGQRALDFYSIHVTKESTHPVKPLAQIAGNRYASHPVGKALSDACMGTIASFLSKYQDIIIEHQKVVKGNQKRLESLRELAGKENLEYPSVTLPPQPHTKEGVDAYNEVIARVRMWVNLNLWQKLKLSRDDAKPLLRLKKFPSFPLVERQANEVDWWDMVCNVKKLINEKKEDGKVFWQNLAGYKRQEALRPYLSSEEDRQKGKKFARYQLGDLLLHLEKKHGEDWGKVYDEAWERIDKKVEGLSKHIKLEEERRSEDAQSKAALTDWLRAKASFVIEGLKEADKDEFCRCELKLQKWYGDLRGKPFAIEAENSILDISGFSKQYNCAFIWQKDGVKKLNLYLIINYFKGGKLRFKKIKPEAFEANRFYTVINKKSGEIVPMEVNFNFDDPNLIILPLAFGKRQGREFIWNDLLSLETGSLKLANGRVIEKTLYNRRTRQDEPALFVALTFERREVLDSSNIKPMNLIGVDRGENIPAVIALTDPEGCPLSRFKDSLGNPTHILRIGESYKEKQRTIQAKKEVEQRRAGGYSRKYASKAKNLADDMVRNTARDLLYYAVTQDAMLIFENLSRGFGRQGKRTFMAERQYTRMEDWLTAKLAYEGLPSKTYLSKTLAQYTSKTCSNCGFTITSADYDRVLEKLKKTATGWMTTINGKELKVEGQITYYNRYKRQNVVKDLSVELDRLSEESVNNDISSWTKGRSGEALSLLKKRFSHRPVQEKFVCLNCGFETHADEQAALNIARSWLFLRSQEYKKYQTNKTTGNTDKRAFVETWQSFYRKKLKEVWKPAV

SEQ ID NO: 48210 - protein, 978 aa, synthetic construct
  REGION 1..978: note = engineered CasX variant
QEIKRINKIRRRLVKDSNTKKAGKTGPMKTLLVRVMTPDLRERLENLRKKPENIPQPISNTSRANLNKLLTDYTEMKKAILHVYWEEFQKDPVGLMSRVAQPASKKIDQNKLKPEMDEKGNLTTAGFACSQCGQPLFVYKLEQVSEKGKAYTNYFGRCNVAEHEKLILLAQLKPEKDSDEAVTYSLGKFGQRALDFYSIHVTKESTHPVKPLAQIAGNRYASSPVGKALSDACMGTIASFLSKYQDIIIEHQKVVKGNQKRLESLRELAGKENLEYPSVTLPPQPHTKEGVDAYNEVIARVRMWVNLNLWQKLKLSRDDAKPLLRLKKFPSFPLVERQANEVDWWDMVCNVKKLINEKKEDGKVFWQNLAGYKRQEALRPYLSSEEDRQKGKKFARYQLGDLLLHLEKKHGEDWGKVYDEAWERIDKKVEGLSKHIKLEEERRSEDAQSKAALTDWLRAKASFVIEGLKEADKDEFCRCELKLQKWYGDLRGKPFAIEAENSILDISGFSKQYNCAFIWQKDGVKKLNLYLIINYFKGGKLRFKKIKPEAFEANRFYTVINKKSGEIVPMEVNFNFDDPNLIILPLAFGKRQGREFIWNDLLSLETGSLKLANGRVIEKTLYNRRTRQDEPALFVALTFERREVLDSSNIKPMNLIGVDRGENIPAVIALTDPEGCPLSRFKDSLGNPTHILRIGESYKEKQRTIQAKKEVEQRRAGGYSRKYASKAKNLADDMVRNTARDLLYYAVTQDAMLIFENLSRGFGRQGKRTFMAERQYTRMEDWLTAKLAYEGLPSKTYLSKTLAQYTSKTCSNCGFTITSADYDRVLEKLKKTATGWMTTINGKELKVEGQITYYNRYKRQNVVKDLSVELDRLSEESVNNDISSWTKGRSGEALSLLKKRFSHRPVQEKFVCLNCGFETHADEQAALNIARSWLFLRSQEYKKYQTNKTTGNTDKRAFVETWQSFYRKKLKEVWKPAV

SEQ ID NO: 48211 - protein, 978 aa, synthetic construct
  REGION 1..978: note = engineered CasX variant
QEIKRINKIRRRLVKDSNTKKAGKTGPMKTLLVRVMTPDLRERLENLRKKPENIPQPISNTSRANLNKLLTDYTEMKKAILHVYWEEFQKDPVGLMSRVAQPASKKIDQNKLKPEMDEKGNLTTAGFACSQCGQPLFVYKLEQVSEKGKAYTNYFGRCNVAEHEKLILLAQLKPEKDSDEAVTYSLGKFGQRALDFYSIHVTKESTHPVKPLAQIAGNRYASTPVGKALSDACMGTIASFLSKYQDIIIEHQKVVKGNQKRLESLRELAGKENLEYPSVTLPPQPHTKEGVDAYNEVIARVRMWVNLNLWQKLKLSRDDAKPLLRLKKFPSFPLVERQANEVDWWDMVCNVKKLINEKKEDGKVFWQNLAGYKRQEALRPYLSSEEDRQKGKKFARYQLGDLLLHLEKKHGEDWGKVYDEAWERIDKKVEGLSKHIKLEEERRSEDAQSKAALTDWLRAKASFVIEGLKEADKDEFCRCELKLQKWYGDLRGKPFAIEAENSILDISGFSKQYNCAFIWQKDGVKKLNLYLIINYFKGGKLRFKKIKPEAFEANRFYTVINKKSGEIVPMEVNFNFDDPNLIILPLAFGKRQGREFIWNDLLSLETGSLKLANGRVIEKTLYNRRTRQDEPALFVALTFERREVLDSSNIKPMNLIGVDRGENIPAVIALTDPEGCPLSRFKDSLGNPTHILRIGESYKEKQRTIQAKKEVEQRRAGGYSRKYASKAKNLADDMVRNTARDLLYYAVTQDAMLIFENLSRGFGRQGKRTFMAERQYTRMEDWLTAKLAYEGLPSKTYLSKTLAQYTSKTCSNCGFTITSADYDRVLEKLKKTATGWMTTINGKELKVEGQITYYNRYKRQNVVKDLSVELDRLSEESVNNDISSWTKGRSGEALSLLKKRFSHRPVQEKFVCLNCGFETHADEQAALNIARSWLFLRSQEYKKYQTNKTTGNTDKRAFVETWQSFYRKKLKEVWKPAV

SEQ ID NO: 48212 - protein, 978 aa, synthetic construct
  REGION 1..978: note = engineered CasX variant
QEIKRINKIRRRLVKDSNTKKAGKTGPMKTLLVRVMTPDLRERLENLRKKPENIPQPISNTSRANLNKLLTDYTEMKKAILHVYWEEFQKDPVGLMSRVAQPASKKIDQNKLKPEMDEKGNLTTAGFACSQCGQPLFVYKLEQVSEKGKAYTNYFGRCNVAEHEKLILLAQLKPEKDSDEAVTYSLGKFGQRALDFYSIHVTKESTHPVKPLAQIAGNRYASAPVGKALSDACMGTIASFLSKYQDIIIEHQKVVKGNQKRLESLRELAGKENLEYPSVTLPPQPHTKEGVDAYNEVIARVRMWVNLNLWQKLKLSRDDAKPLLRLKKFPSFPLVERQANEVDWWDMVCNVKKLINEKKEDGKVFWQNLAGYKRQEALRPYLSSEEDRQKGKKFARYQLGDLLLHLEKKHGEDWGKVYDEAWERIDKKVEGLSKHIKLEEERRSEDAQSKAALTDWLRAKASFVIEGLKEADKDEFCRCELKLQKWYGDLRGKPFAIEAENSILDISGFSKQYNCAFIWQKDGVKKLNLYLIINYFKGGKLRFKKIKPEAFEANRFYTVINKKSGEIVPMEVNFNFDDPNLIILPLAFGKRQGREFIWNDLLSLETGSLKLANGRVIEKTLYNRRTRQDEPALFVALTFERREVLDSSNIKPMNLIGVDRGENIPAVIALTDPEGCPLSRFKDSLGNPTHILRIGESYKEKQRTIQAKKEVEQRRAGGYSRKYASKAKNLADDMVRNTARDLLYYAVTQDAMLIFENLSRGFGRQGKRTFMAERQYTRMEDWLTAKLAYEGLPSKTYLSKTLAQYTSKTCSNCGFTITSADYDRVLEKLKKTATGWMTTINGKELKVEGQITYYNRYKRQNVVKDLSVELDRLSEESVNNDISSWTKGRSGEALSLLKKRFSHRPVQEKFVCLNCGFETHADEQAALNIARSWLFLRSQEYKKYQTNKTTGNTDKRAFVETWQSFYRKKLKEVWKPAV

SEQ ID NO: 48213 - protein, 978 aa, synthetic construct
  REGION 1..978: note = engineered CasX variant
QEIKRINKIRRRLVKDSNTKKAGKTGPMKTLLVRVMTPDLRERLENLRKKPENIPQPISNTSRANLNKLLTDYTEMKKAILHVYWEEFQKDPVGLMSRVAQPASKKIDQNKLKPEMDEKGNLTTAGFACSQCGQPLFVYKLEQVSEKGKAYTNYFGRCNVAEHEKLILLAQLKPEKDSDEAVTYSLGKFGQRALDFYSIHVTKESTHPVKPLAQIAGNRYASVPVGKALSDACMGTIASFLSKYQDIIIEHQKVVKGNQKRLESLRELAGKENLEYPSVTLPPQPHTKEGVDAYNEVIARVRMWVNLNLWQKLKLSRDDAKPLLRLKKFPSFPLVERQANEVDWWDMVCNVKKLINEKKEDGKVFWQNLAGYKRQEALRPYLSSEEDRQKGKKFARYQLGDLLLHLEKKHGEDWGKVYDEAWERIDKKVEGLSKHIKLEEERRSEDAQSKAALTDWLRAKASFVIEGLKEADKDEFCRCELKLQKWYGDLRGKPFAIEAENSILDISGFSKQYNCAFIWQKDGVKKLNLYLIINYFKGGKLRFKKIKPEAFEANRFYTVINKKSGEIVPMEVNFNFDDPNLIILPLAFGKRQGREFIWNDLLSLETGSLKLANGRVIEKTLYNRRTRQDEPALFVALTFERREVLDSSNIKPMNLIGVDRGENIPAVIALTDPEGCPLSRFKDSLGNPTHILRIGESYKEKQRTIQAKKEVEQRRAGGYSRKYASKAKNLADDMVRNTARDLLYYAVTQDAMLIFENLSRGFGRQGKRTFMAERQYTRMEDWLTAKLAYEGLPSKTYLSKTLAQYTSKTCSNCGFTITSADYDRVLEKLKKTATGWMTTINGKELKVEGQITYYNRYKRQNVVKDLSVELDRLSEESVNNDISSWTKGRSGEALSLLKKRFSHRPVQEKFVCLNCGFETHADEQAALNIARSWLFLRSQEYKKYQTNKTTGNTDKRAFVETWQSFYRKKLKEVWKPAV

SEQ ID NO: 48214 - protein, 978 aa, synthetic construct
  REGION 1..978: note = engineered CasX variant
QEIKRINKIRRRLVKDSNTKKAGKTGPMKTLLVRVMTPDLRERLENLRKKPENIPQPISNTSRANLNKLLTDYTEMKKAILHVYWEEFQKDPVGLMSRVAQPASKKIDQNKLKPEMDEKGNLTTAGFACSQCGQPLFVYKLEQVSEKGKAYTNYFGRCNVAEHEKLIKLAQLKPEKDSDEAVTYSLGKFGQRALDFYSIHVTKESTHPVKPLAQIAGNRYASGPVGKALSDACMGTIASFLSKYQDIIIEHQKVVKGNQKRLESLRELAGKENLEYPSVTLPPQPHTKEGVDAYNEVIARVRMWVNLNLWQKLKLSRDDAKPLLRLKKFPSFPLVERQANEVDWWDMVCNVKKLINEKKEDGKVFWQNLAGYKRQEALRPYLSSEEDRQKGKKFARYQLGDLLLHLEKKHGEDWGKVYDEAWERIDKKVEGLSKHIKLEEERRSEDAQSKAALTDWLRAKASFVIEGLKEADKDEFCRCELKLQKWYGDLRGKPFAIEAENSILDISGFSKQYNCAFIWQKDGVKKLNLYLIINYFKGGKLRFKKIKPEAFEANRFYTVINKKSGEIVPMEVNFNFDDPNLIILPLAFGKRQGREFIWNDLLSLETGSLKLANGRVIEKTLYNRRTRQDEPALFVALTFERREVLDSSNIKPMNLIGVDRGENIPAVIALTDPEGCPLSRFKDSLGNPTHILRIGESYKEKQRTIQAKKEVEQRRAGGYSRKYASKAKNLADDMVRNTARDLLYYAVTQDAMLIFENLSRGFGRQGKRTFMAERQYTRMEDWLTAKLAYEGLPSKTYLSKTLAQYTSKTCSNCGFTITSADYDRVLEKLKKTATGWMTTINGKELKVEGQITYYNRYKRQNVVKDLSVELDRLSEESVNNDISSWTKGRSGEALSLLKKRFSHRPVQEKFVCLNCGFETHADEQAALNIARSWLFLRSQEYKKYQTNKTTGNTDKRAFVETWQSFYRKKLKEVWKPAV

SEQ ID NO: 48215 - protein, 977 aa, synthetic construct
  REGION 1..977: note = engineered CasX variant
QEIKRINKIRRRLVKDSNTKKAGKTGPMKTLLVRVMTPDLRERLENLRKKPENIPQPISNTSRANLNKLLTDYTEMKKAILHVYWEEFQKDPVGLMSRVAQPASKKIDQNKLKPEMDEKGNLTTAGFACSQCGQPLFVYKLEQVSEKGKAYTNYFGRCNVAEHEKLILLAQLKPEKDSDEAVTYSLGKFGQRALDFYSIHVTKESTHPVKPLAQIAGNRYASPVGKALSDACMGTIASFLSKYQDIIIEHQKVVKGNQKRLESLRELAGKENLEYPSVTLPPQPHTKEGVDAYNEVIARVRMWVNLNLWQKLKLSRDDAKPLLRLKKFPSFPLVERQANEVDWWDMVCNVKKLINEKKEDGKVFWQNLAGYKRQEALRPYLSSEEDRQKGKKFARYQLGDLLLHLEKKHGEDWGKVYDEAWERIDKKVEGLSKHIKLEEERRSEDAQSKAALTDWLRAKASFVIEGLKEADKDEFCRCELKLQKWYGDLRGKPFAIEAENSILDISGFSKQYNCAFIWQKDGVKKLNLYLIINYFKGGKLRFKKIKPEAFEANRFYTVINKKSGEIVPMEVNFNFDDPNLIILPLAFGKRQGREFIWNDLLSLETGSLKLANGRVIEKTLYNRRTRQDEPALFVALTFERREVLDSSNIKPMNLIGVDRGENIPAVIALTDPEGCPLSRFKDSLGNPTHILRIGESYKEKQRTIQAKKEVEQRRAGGYSRKYASKAKNLADDMVRNTARDLLYYAVTQDAMLIFENLSRGFGRQGKRTFMAERQYTRMEDWLTAKLAYEGLPSKTYLSKTLAQYTSKTCSNCGFTITSADYDRVLEKLKKTATGWMTTINGKELKVEGQITYYNRYKRQNVVKDLSVELDRLSEESVNNDISSWTKGRSGEALSLLKKRFSHRPVQEKFVCLNCGFETHADEQAALNIARSWLFLRSQEYKKYQTNKTTGNTDKRAFVETWQSFYRKKLKEVWKPAV

SEQ ID NO: 48216 - protein, 978 aa, synthetic construct
  REGION 1..978: note = engineered CasX variant
QEIKRINKIRRRLVKDSNTKKAGKTGPMKTLLVRVMTPDLRERLENLRKKPENIPQPISNTSRANLNKLLTDYTEMKKAILHVYWEEFQKDPVGLMSRVAQPASKKIDQNKLKPEMDEKGNLTTAGFACSQCGQPLFVYKLEQVSEKGKAYTNYFGRCNVAEHEKLILLAQLKPEKDSDEAVTYSLGKFGQRALDFYSIHVTKESTHPVKPLAQIAGNRYASYPVGKALSDACMGTIASFLSKYQDIIIEHQKVVKGNQKRLESLRELAGKENLEYPSVTLPPQPHTKEGVDAYNEVIARVRMWVNLNLWQKLKLSRDDAKPLLRLKKFPSFPLVERQANEVDWWDMVCNVKKLINEKKEDGKVFWQNLAGYKRQEALRPYLSSEEDRKKGKKFARYQLGDLLLHLEKKHGEDWGKVYDEAWERIDKKVEGLSKHIKLEEERRSEDAQSKAALTDWLRAKASFVIEGLKEADKDEFCRCELKLQKWYGDLRGKPFAIEAENSILDISGFSKQYNCAFIWQKDGVKKLNLYLIINYFKGGKLRFKKIKPEAFEANRFYTVINKKSGEIVPMEVNFNFDDPNLIILPLAFGKRQGREFIWNDLLSLETGSLKLANGRVIEKTLYNRRTRQDEPALFVALTFERREVLDSSNIKPMNLIGVDRGENIPAVIALTDPEGCPLSRFKDSLGNPTHILRIGESYKEKQRTIQAKKEVEQRRAGGYSRKYASKAKNLADDMVRNTARDLLYYAVTQDAMLIFENLSRGFGRQGKRTFMAERQYTRMEDWLTAKLAYEGLPSQTYLSKTLAQYTSKTCSNCGFTITSADYDRVLEKLKKTATGWMTTINGKELKVEGQITYYNRYKRQNVVKDLSVELDRLSEESVNNDISSWTKGRSGEALSLLKKRFSHRPVQEKFVCLNCGFETHADEQAALNIARSWLFLRSQEYKKYQTNKTTGNTDKRAFVETWQSFYRKKLKEVWKPAV

SEQ ID NO: 48217 - protein, 978 aa, synthetic construct
  REGION 1..978: note = engineered CasX variant
QEIKRINKIRRRLVKDSNTKKAGKTGPMKTLLVRVMTPDLRERLENLRKKPENIPQPISNTSRANLNKLLTDYTEMKKAILHVYWEEFQKDPVGLMSRVAQPASKKIDQNKLKPEMDEKGNLTTAGFACSQCGQPLFVYKLEQVSEKGKAYTNYFGRCNVAEHEKLILLAQLKPEKDSDEAVTYSLGKFGQRALDFYSIHVTKESTHPVKPLAQIAGNRYASHPVGKALSDACMGTIASFLSKYQDIIIEHQKVVKGNQKRLESLRELAGKENLEYPSVTLPPQPHTKEGVDAYNEVIARVRMWVNLNLWQKLKLSRDDAKPLLRLKKFPSFPLVERQANEVDWWDMVCNVKKLINEKKEDGKVFWQNLAGYKRQEALRPYLSSEEDRKKGKKFARYQLGDLLLHLEKKHGEDWGKVYDEAWERIDKKVEGLSKHIKLEEERRSEDAQSKAALTDWLRAKASFVIEGLKEADKDEFCRCELKLQKWYGDLRGKPFAIEAENSILDISGFSKQYNCAFIWQKDGVKKLNLYLIINYFKGGKLRFKKIKPEAFEANRFYTVINKKSGEIVPMEVNFNFDDPNLIILPLAFGKRQGREFIWNDLLSLETGSLKLANGRVIEKTLYNRRTRQDEPALFVALTFERREVLDSSNIKPMNLIGVDRGENIPAVIALTDPEGCPLSRFKDSLGNPTHILRIGESYKEKQRTIQAKKEVEQRRAGGYSRKYASKAKNLADDMVRNTARDLLYYAVTQDAMLIFENLSRGFGRQGKRTFMAERQYTRMEDWLTAKLAYEGLPSQTYLSKTLAQYTSKTCSNCGFTITSADYDRVLEKLKKTATGWMTTINGKELKVEGQITYYNRYKRQNVVKDLSVELDRLSEESVNNDISSWTKGRSGEALSLLKKRFSHRPVQEKFVCLNCGFETHADEQAALNIARSWLFLRSQEYKKYQTNKTTGNTDKRAFVETWQSFYRKKLKEVWKPAV

SEQ ID NO: 48218 - protein, 978 aa, synthetic construct
  REGION 1..978: note = engineered CasX variant
QEIKRINKIRRRLVKDSNTKKAGKTGPMKTLLVRVMTPDLRERLENLRKKPENIPQPISNTSRANLNKLLTDYTEMKKAILHVYWEEFQKDPVGLMSRVAQPASKKIDQNKLKPEMDEKGNLTTAGFACSQCGQPLFVYKLEQVSEKGKAYTNYFGRCNVAEHEKLILLAQLKPEKDSDEAVTYSLGKFGQRALDFYSIHVTKESTHPVKPLAQIAGNRYASSPVGKALSDACMGTIASFLSKYQDIIIEHQKVVKGNQKRLESLRELAGKENLEYPSVTLPPQPHTKEGVDAYNEVIARVRMWVNLNLWQKLKLSRDDAKPLLRLKKFPSFPLVERQANEVDWWDMVCNVKKLINEKKEDGKVFWQNLAGYKRQEALRPYLSSEEDRKKGKKFARYQLGDLLLHLEKKHGEDWGKVYDEAWERIDKKVEGLSKHIKLEEERRSEDAQSKAALTDWLRAKASFVIEGLKEADKDEFCRCELKLQKWYGDLRGKPFAIEAENSILDISGFSKQYNCAFIWQKDGVKKLNLYLIINYFKGGKLRFKKIKPEAFEANRFYTVINKKSGEIVPMEVNFNFDDPNLIILPLAFGKRQGREFIWNDLLSLETGSLKLANGRVIEKTLYNRRTRQDEPALFVALTFERREVLDSSNIKPMNLIGVDRGENIPAVIALTDPEGCPLSRFKDSLGNPTHILRIGESYKEKQRTIQAKKEVEQRRAGGYSRKYASKAKNLADDMVRNTARDLLYYAVTQDAMLIFENLSRGFGRQGKRTFMAERQYTRMEDWLTAKLAYEGLPSQTYLSKTLAQYTSKTCSNCGFTITSADYDRVLEKLKKTATGWMTTINGKELKVEGQITYYNRYKRQNVVKDLSVELDRLSEESVNNDISSWTKGRSGEALSLLKKRFSHRPVQEKFVCLNCGFETHADEQAALNIARSWLFLRSQEYKKYQTNKTTGNTDKRAFVETWQSFYRKKLKEVWKPAV

SEQ ID NO: 48219 - protein, 978 aa, synthetic construct
  REGION 1..978: note = engineered CasX variant
QEIKRINKIRRRLVKDSNTKKAGKTGPMKTLLVRVMTPDLRERLENLRKKPENIPQPISNTSRANLNKLLTDYTEMKKAILHVYWEEFQKDPVGLMSRVAQPASKKIDQNKLKPEMDEKGNLTTAGFACSQCGQPLFVYKLEQVSEKGKAYTNYFGRCNVAEHEKLILLAQLKPEKDSDEAVTYSLGKFGQRALDFYSIHVTKESTHPVKPLAQIAGNRYASTPVGKALSDACMGTIASFLSKYQDIIIEHQKVVKGNQKRLESLRELAGKENLEYPSVTLPPQPHTKEGVDAYNEVIARVRMWVNLNLWQKLKLSRDDAKPLLRLKKFPSFPLVERQANEVDWWDMVCNVKKLINEKKEDGKVFWQNLAGYKRQEALRPYLSSEEDRKKGKKFARYQLGDLLLHLEKKHGEDWGKVYDEAWERIDKKVEGLSKHIKLEEERRSEDAQSKAALTDWLRAKASFVIEGLKEADKDEFCRCELKLQKWYGDLRGKPFAIEAENSILDISGFSKQYNCAFIWQKDGVKKLNLYLIINYFKGGKLRFKKIKPEAFEANRFYTVINKKSGEIVPMEVNFNFDDPNLIILPLAFGKRQGREFIWNDLLSLETGSLKLANGRVIEKTLYNRRTRQDEPALFVALTFERREVLDSSNIKPMNLIGVDRGENIPAVIALTDPEGCPLSRFKDSLGNPTHILRIGESYKEKQRTIQAKKEVEQRRAGGYSRKYASKAKNLADDMVRNTARDLLYYAVTQDAMLIFENLSRGFGRQGKRTFMAERQYTRMEDWLTAKLAYEGLPSQTYLSKTLAQYTSKTCSNCGFTITSADYDRVLEKLKKTATGWMTTINGKELKVEGQITYYNRYKRQNVVKDLSVELDRLSEESVNNDISSWTKGRSGEALSLLKKRFSHRPVQEKFVCLNCGFETHADEQAALNIARSWLFLRSQEYKKYQTNKTTGNTDKRAFVETWQSFYRKKLKEVWKPAV

SEQ ID NO: 48220 - protein, 978 aa, synthetic construct
  REGION 1..978: note = engineered CasX variant
QEIKRINKIRRRLVKDSNTKKAGKTGPMKTLLVRVMTPDLRERLENLRKKPENIPQPISNTSRANLNKLLTDYTEMKKAILHVYWEEFQKDPVGLMSRVAQPASKKIDQNKLKPEMDEKGNLTTAGFACSQCGQPLFVYKLEQVSEKGKAYTNYFGRCNVAEHEKLILLAQLKPEKDSDEAVTYSLGKFGQRALDFYSIHVTKESTHPVKPLAQIAGNRYASAPVGKALSDACMGTIASFLSKYQDIIIEHQKVVKGNQKRLESLRELAGKENLEYPSVTLPPQPHTKEGVDAYNEVIARVRMWVNLNLWQKLKLSRDDAKPLLRLKKFPSFPLVERQANEVDWWDMVCNVKKLINEKKEDGKVFWQNLAGYKRQEALRPYLSSEEDRKKGKKFARYQLGDLLLHLEKKHGEDWGKVYDEAWERIDKKVEGLSKHIKLEEERRSEDAQSKAALTDWLRAKASFVIEGLKEADKDEFCRCELKLQKWYGDLRGKPFAIEAENSILDISGFSKQYNCAFIWQKDGVKKLNLYLIINYFKGGKLRFKKIKPEAFEANRFYTVINKKSGEIVPMEVNFNFDDPNLIILPLAFGKRQGREFIWNDLLSLETGSLKLANGRVIEKTLYNRRTRQDEPALFVALTFERREVLDSSNIKPMNLIGVDRGENIPAVIALTDPEGCPLSRFKDSLGNPTHILRIGESYKEKQRTIQAKKEVEQRRAGGYSRKYASKAKNLADDMVRNTARDLLYYAVTQDAMLIFENLSRGFGRQGKRTFMAERQYTRMEDWLTAKLAYEGLPSQTYLSKTLAQYTSKTCSNCGFTITSADYDRVLEKLKKTATGWMTTINGKELKVEGQITYYNRYKRQNVVKDLSVELDRLSEESVNNDISSWTKGRSGEALSLLKKRFSHRPVQEKFVCLNCGFETHADEQAALNIARSWLFLRSQEYKKYQTNKTTGNTDKRAFVETWQSFYRKKLKEVWKPAV

SEQ ID NO: 48221 - protein, 978 aa, synthetic construct
  REGION 1..978: note = engineered CasX variant
QEIKRINKIRRRLVKDSNTKKAGKTGPMKTLLVRVMTPDLRERLENLRKKPENIPQPISNTSRANLNKLLTDYTEMKKAILHVYWEEFQKDPVGLMSRVAQPASKKIDQNKLKPEMDEKGNLTTAGFACSQCGQPLFVYKLEQVSEKGKAYTNYFGRCNVAEHEKLILLAQLKPEKDSDEAVTYSLGKFGQRALDFYSIHVTKESTHPVKPLAQIAGNRYASVPVGKALSDACMGTIASFLSKYQDIIIEHQKVVKGNQKRLESLRELAGKENLEYPSVTLPPQPHTKEGVDAYNEVIARVRMWVNLNLWQKLKLSRDDAKPLLRLKKFPSFPLVERQANEVDWWDMVCNVKKLINEKKEDGKVFWQNLAGYKRQEALRPYLSSEEDRKKGKKFARYQLGDLLLHLEKKHGEDWGKVYDEAWERIDKKVEGLSKHIKLEEERRSEDAQSKAALTDWLRAKASFVIEGLKEADKDEFCRCELKLQKWYGDLRGKPFAIEAENSILDISGFSKQYNCAFIWQKDGVKKLNLYLIINYFKGGKLRFKKIKPEAFEANRFYTVINKKSGEIVPMEVNFNFDDPNLIILPLAFGKRQGREFIWNDLLSLETGSLKLANGRVIEKTLYNRRTRQDEPALFVALTFERREVLDSSNIKPMNLIGVDRGENIPAVIALTDPEGCPLSRFKDSLGNPTHILRIGESYKEKQRTIQAKKEVEQRRAGGYSRKYASKAKNLADDMVRNTARDLLYYAVTQDAMLIFENLSRGFGRQGKRTFMAERQYTRMEDWLTAKLAYEGLPSQTYLSKTLAQYTSKTCSNCGFTITSADYDRVLEKLKKTATGWMTTINGKELKVEGQITYYNRYKRQNVVKDLSVELDRLSEESVNNDISSWTKGRSGEALSLLKKRFSHRPVQEKFVCLNCGFETHADEQAALNIARSWLFLRSQEYKKYQTNKTTGNTDKRAFVETWQSFYRKKLKEVWKPAV

SEQ ID NO: 48222 - protein, 978 aa, synthetic construct
  REGION 1..978: note = engineered CasX variant
QEIKRINKIRRRLVKDSNTKKAGKTGPMKTLLVRVMTPDLRERLENLRKKPENIPQPISNTSRANLNKLLTDYTEMKKAILHVYWEEFQKDPVGLMSRVAQPASKKIDQNKLKPEMDEKGNLTTAGFACSQCGQPLFVYKLEQVSEKGKAYTNYFGRCNVAEHEKLIKLAQLKPEKDSDEAVTYSLGKFGQRALDFYSIHVTKESTHPVKPLAQIAGNRYASGPVGKALSDACMGTIASFLSKYQDIIIEHQKVVKGNQKRLESLRELAGKENLEYPSVTLPPQPHTKEGVDAYNEVIARVRMWVNLNLWQKLKLSRDDAKPLLRLKKFPSFPLVERQANEVDWWDMVCNVKKLINEKKEDGKVFWQNLAGYKRQEALRPYLSSEEDRKKGKKFARYQLGDLLLHLEKKHGEDWGKVYDEAWERIDKKVEGLSKHIKLEEERRSEDAQSKAALTDWLRAKASFVIEGLKEADKDEFCRCELKLQKWYGDLRGKPFAIEAENSILDISGFSKQYNCAFIWQKDGVKKLNLYLIINYFKGGKLRFKKIKPEAFEANRFYTVINKKSGEIVPMEVNFNFDDPNLIILPLAFGKRQGREFIWNDLLSLETGSLKLANGRVIEKTLYNRRTRQDEPALFVALTFERREVLDSSNIKPMNLIGVDRGENIPAVIALTDPEGCPLSRFKDSLGNPTHILRIGESYKEKQRTIQAKKEVEQRRAGGYSRKYASKAKNLADDMVRNTARDLLYYAVTQDAMLIFENLSRGFGRQGKRTFMAERQYTRMEDWLTAKLAYEGLPSQTYLSKTLAQYTSKTCSNCGFTITSADYDRVLEKLKKTATGWMTTINGKELKVEGQITYYNRYKRQNVVKDLSVELDRLSEESVNNDISSWTKGRSGEALSLLKKRFSHRPVQEKFVCLNCGFETHADEQAALNIARSWLFLRSQEYKKYQTNKTTGNTDKRAFVETWQSFYRKKLKEVWKPAV

SEQ ID NO: 48223 - protein, 977 aa, synthetic construct
  REGION 1..977: note = engineered CasX variant
QEIKRINKIRRRLVKDSNTKKAGKTGPMKTLLVRVMTPDLRERLENLRKKPENIPQPISNTSRANLNKLLTDYTEMKKAILHVYWEEFQKDPVGLMSRVAQPASKKIDQNKLKPEMDEKGNLTTAGFACSQCGQPLFVYKLEQVSEKGKAYTNYFGRCNVAEHEKLILLAQLKPEKDSDEAVTYSLGKFGQRALDFYSIHVTKESTHPVKPLAQIAGNRYASPVGKALSDACMGTIASFLSKYQDIIIEHQKVVKGNQKRLESLRELAGKENLEYPSVTLPPQPHTKEGVDAYNEVIARVRMWVNLNLWQKLKLSRDDAKPLLRLKKFPSFPLVERQANEVDWWDMVCNVKKLINEKKEDGKVFWQNLAGYKRQEALRPYLSSEEDRKKGKKFARYQLGDLLLHLEKKHGEDWGKVYDEAWERIDKKVEGLSKHIKLEEERRSEDAQSKAALTDWLRAKASFVIEGLKEADKDEFCRCELKLQKWYGDLRGKPFAIEAENSILDISGFSKQYNCAFIWQKDGVKKLNLYLIINYFKGGKLRFKKIKPEAFEANRFYTVINKKSGEIVPMEVNFNFDDPNLIILPLAFGKRQGREFIWNDLLSLETGSLKLANGRVIEKTLYNRRTRQDEPALFVALTFERREVLDSSNIKPMNLIGVDRGENIPAVIALTDPEGCPLSRFKDSLGNPTHILRIGESYKEKQRTIQAKKEVEQRRAGGYSRKYASKAKNLADDMVRNTARDLLYYAVTQDAMLIFENLSRGFGRQGKRTFMAERQYTRMEDWLTAKLAYEGLPSQTYLSKTLAQYTSKTCSNCGFTITSADYDRVLEKLKKTATGWMTTINGKELKVEGQITYYNRYKRQNVVKDLSVELDRLSEESVNNDISSWTKGRSGEALSLLKKRFSHRPVQEKFVCLNCGFETHADEQAALNIARSWLFLRSQEYKKYQTNKTTGNTDKRAFVETWQSFYRKKLKEVWKPAV

SEQ ID NO: 48224 - protein, 978 aa, synthetic construct
  REGION 1..978: note = engineered CasX variant
QEIKRINKIRRRLVKDSNTKKAGKTGPMKTLLVRVMTPDLRERLENLRKKPENIPQPISNTSRANLNKLLTDYTEMKKAILHVYWEEFQKDPVGLMSRVAQPASKKIDQNKLKPEMDEKGNLTTAGFACSQCGQPLFVYKLEQVSEKGKAYTNYFGRCNVAEHEKLILLAQLKPEKDSDEAVTYSLGKFGQRALDFYSIHVTKESTHPVKPLAQIAGNRYASYPVGKALSDACMGTIASFLSKYQDIIIEHQKVVKGNQKRLESLRELAGKENLEYPSVTLPPQPHTKEGVDAYNEVIARVRMWVNLNLWQKLKLSRDDAKPLLRLKKFPSFPLVERQANEVDWWDMVCNVKKLINEKKEDGKVFWQNLAGYKRQEALRPYLSSEEDRKKGKKFARYQLGDLLLHLEKKHGEDWGKVYDEAWERIDKKVEGLSKHIKLEEERRSEDAQSKAALTDWLRAKASFVIEGLKEADKDEFCRCELKLQKWYGDLRGKPFAIEAENSILDISGFSKQYNCAFIWQKDGVKKLNLYLIINYFKGGKLRFKKIKPEAFEANRFYTVINKKSGEIVPMEVNFNFDDPNLIILPLAFGKRQGREFIWNDLLSLETGSLKLANGRVIEKTLYNRRTRQDEPALFVALTFERREVLDSSNIKPMNLIGVDRGENIPAVIALTDPEGCPLSRFKDSLGNPTHILRIGESYKEKQRTIQAKKEVEQRRAGGYSRKYASKAKNLADDMVRNTARDLLYYAVTQDAMLIFENLSRGFGRQGKRTFMAERQYTRMEDWLTAKLAYNGLPSKTYLSKTLAQYTSKTCSNCGFTITSADYDRVLEKLKKTATGWMTTINGKELKVEGQITYYNRYKRQNVVKDLSVELDRLSEESVNNDISSWTKGRSGEALSLLKKRFSHRPVQEKFVCLNCGFETHADEQAALNIARSWLFLRSQEYKKYQTNKTTGNTDKRAFVETWQSFYRKKLKEVWKPAV

SEQ ID NO: 48225 - protein, 978 aa, synthetic construct
  REGION 1..978: note = engineered CasX variant
QEIKRINKIRRRLVKDSNTKKAGKTGPMKTLLVRVMTPDLRERLENLRKKPENIPQPISNTSRANLNKLLTDYTEMKKAILHVYWEEFQKDPVGLMSRVAQPASKKIDQNKLKPEMDEKGNLTTAGFACSQCGQPLFVYKLEQVSEKGKAYTNYFGRCNVAEHEKLILLAQLKPEKDSDEAVTYSLGKFGQRALDFYSIHVTKESTHPVKPLAQIAGNRYASHPVGKALSDACMGTIASFLSKYQDIIIEHQKVVKGNQKRLESLRELAGKENLEYPSVTLPPQPHTKEGVDAYNEVIARVRMWVNLNLWQKLKLSRDDAKPLLRLKKFPSFPLVERQANEVDWWDMVCNVKKLINEKKEDGKVFWQNLAGYKRQEALRPYLSSEEDRKKGKKFARYQLGDLLLHLEKKHGEDWGKVYDEAWERIDKKVEGLSKHIKLEEERRSEDAQSKAALTDWLRAKASFVIEGLKEADKDEFCRCELKLQKWYGDLRGKPFAIEAENSILDISGFSKQYNCAFIWQKDGVKKLNLYLIINYFKGGKLRFKKIKPEAFEANRFYTVINKKSGEIVPMEVNFNFDDPNLIILPLAFGKRQGREFIWNDLLSLETGSLKLANGRVIEKTLYNRRTRQDEPALFVALTFERREVLDSSNIKPMNLIGVDRGENIPAVIALTDPEGCPLSRFKDSLGNPTHILRIGESYKEKQRTIQAKKEVEQRRAGGYSRKYASKAKNLADDMVRNTARDLLYYAVTQDAMLIFENLSRGFGRQGKRTFMAERQYTRMEDWLTAKLAYNGLPSKTYLSKTLAQYTSKTCSNCGFTITSADYDRVLEKLKKTATGWMTTINGKELKVEGQITYYNRYKRQNVVKDLSVELDRLSEESVNNDISSWTKGRSGEALSLLKKRFSHRPVQEKFVCLNCGFETHADEQAALNIARSWLFLRSQEYKKYQTNKTTGNTDKRAFVETWQSFYRKKLKEVWKPAV

SEQ ID NO: 48226 - protein, 978 aa, synthetic construct
  REGION 1..978: note = engineered CasX variant
QEIKRINKIRRRLVKDSNTKKAGKTGPMKTLLVRVMTPDLRERLENLRKKPENIPQPISNTSRANLNKLLTDYTEMKKAILHVYWEEFQKDPVGLMSRVAQPASKKIDQNKLKPEMDEKGNLTTAGFACSQCGQPLFVYKLEQVSEKGKAYTNYFGRCNVAEHEKLILLAQLKPEKDSDEAVTYSLGKFGQRALDFYSIHVTKESTHPVKPLAQIAGNRYASSPVGKALSDACMGTIASFLSKYQDIIIEHQKVVKGNQKRLESLRELAGKENLEYPSVTLPPQPHTKEGVDAYNEVIARVRMWVNLNLWQKLKLSRDDAKPLLRLKKFPSFPLVERQANEVDWWDMVCNVKKLINEKKEDGKVFWQNLAGYKRQEALRPYLSSEEDRKKGKKFARYQLGDLLLHLEKKHGEDWGKVYDEAWERIDKKVEGLSKHIKLEEERRSEDAQSKAALTDWLRAKASFVIEGLKEADKDEFCRCELKLQKWYGDLRGKPFAIEAENSILDISGFSKQYNCAFIWQKDGVKKLNLYLIINYFKGGKLRFKKIKPEAFEANRFYTVINKKSGEIVPMEVNFNFDDPNLIILPLAFGKRQGREFIWNDLLSLETGSLKLANGRVIEKTLYNRRTRQDEPALFVALTFERREVLDSSNIKPMNLIGVDRGENIPAVIALTDPEGCPLSRFKDSLGNPTHILRIGESYKEKQRTIQAKKEVEQRRAGGYSRKYASKAKNLADDMVRNTARDLLYYAVTQDAMLIFENLSRGFGRQGKRTFMAERQYTRMEDWLTAKLAYNGLPSKTYLSKTLAQYTSKTCSNCGFTITSADYDRVLEKLKKTATGWMTTINGKELKVEGQITYYNRYKRQNVVKDLSVELDRLSEESVNNDISSWTKGRSGEALSLLKKRFSHRPVQEKFVCLNCGFETHADEQAALNIARSWLFLRSQEYKKYQTNKTTGNTDKRAFVETWQSFYRKKLKEVWKPAV

SEQ ID NO: 48227 - protein, 978 aa, synthetic construct
  REGION 1..978: note = engineered CasX variant
QEIKRINKIRRRLVKDSNTKKAGKTGPMKTLLVRVMTPDLRERLENLRKKPENIPQPISNTSRANLNKLLTDYTEMKKAILHVYWEEFQKDPVGLMSRVAQPASKKIDQNKLKPEMDEKGNLTTAGFACSQCGQPLFVYKLEQVSEKGKAYTNYFGRCNVAEHEKLILLAQLKPEKDSDEAVTYSLGKFGQRALDFYSIHVTKESTHPVKPLAQIAGNRYASTPVGKALSDACMGTIASFLSKYQDIIIEHQKVVKGNQKRLESLRELAGKENLEYPSVTLPPQPHTKEGVDAYNEVIARVRMWVNLNLWQKLKLSRDDAKPLLRLKKFPSFPLVERQANEVDWWDMVCNVKKLINEKKEDGKVFWQNLAGYKRQEALRPYLSSEEDRKKGKKFARYQLGDLLLHLEKKHGEDWGKVYDEAWERIDKKVEGLSKHIKLEEERRSEDAQSKAALTDWLRAKASFVIEGLKEADKDEFCRCELKLQKWYGDLRGKPFAIEAENSILDISGFSKQYNCAFIWQKDGVKKLNLYLIINYFKGGKLRFKKIKPEAFEANRFYTVINKKSGEIVPMEVNFNFDDPNLIILPLAFGKRQGREFIWNDLLSLETGSLKLANGRVIEKTLYNRRTRQDEPALFVALTFERREVLDSSNIKPMNLIGVDRGENIPAVIALTDPEGCPLSRFKDSLGNPTHILRIGESYKEKQRTIQAKKEVEQRRAGGYSRKYASKAKNLADDMVRNTARDLLYYAVTQDAMLIFENLSRGFGRQGKRTFMAERQYTRMEDWLTAKLAYNGLPSKTYLSKTLAQYTSKTCSNCGFTITSADYDRVLEKLKKTATGWMTTINGKELKVEGQITYYNRYKRQNVVKDLSVELDRLSEESVNNDISSWTKGRSGEALSLLKKRFSHRPVQEKFVCLNCGFETHADEQAALNIARSWLFLRSQEYKKYQTNKTTGNTDKRAFVETWQSFYRKKLKEVWKPAV

SEQ ID NO: 48228 - protein, 978 aa, synthetic construct
  REGION 1..978: note = engineered CasX variant
QEIKRINKIRRRLVKDSNTKKAGKTGPMKTLLVRVMTPDLRERLENLRKKPENIPQPISNTSRANLNKLLTDYTEMKKAILHVYWEEFQKDPVGLMSRVAQPASKKIDQNKLKPEMDEKGNLTTAGFACSQCGQPLFVYKLEQVSEKGKAYTNYFGRCNVAEHEKLILLAQLKPEKDSDEAVTYSLGKFGQRALDFYSIHVTKESTHPVKPLAQIAGNRYASAPVGKALSDACMGTIASFLSKYQDIIIEHQKVVKGNQKRLESLRELAGKENLEYPSVTLPPQPHTKEGVDAYNEVIARVRMWVNLNLWQKLKLSRDDAKPLLRLKKFPSFPLVERQANEVDWWDMVCNVKKLINEKKEDGKVFWQNLAGYKRQEALRPYLSSEEDRKKGKKFARYQLGDLLLHLEKKHGEDWGKVYDEAWERIDKKVEGLSKHIKLEEERRSEDAQSKAALTDWLRAKASFVIEGLKEADKDEFCRCELKLQKWYGDLRGKPFAIEAENSILDISGFSKQYNCAFIWQKDGVKKLNLYLIINYFKGGKLRFKKIKPEAFEANRFYTVINKKSGEIVPMEVNFNFDDPNLIILPLAFGKRQGREFIWNDLLSLETGSLKLANGRVIEKTLYNRRTRQDEPALFVALTFERREVLDSSNIKPMNLIGVDRGENIPAVIALTDPEGCPLSRFKDSLGNPTHILRIGESYKEKQRTIQAKKEVEQRRAGGYSRKYASKAKNLADDMVRNTARDLLYYAVTQDAMLIFENLSRGFGRQGKRTFMAERQYTRMEDWLTAKLAYNGLPSKTYLSKTLAQYTSKTCSNCGFTITSADYDRVLEKLKKTATGWMTTINGKELKVEGQITYYNRYKRQNVVKDLSVELDRLSEESVNNDISSWTKGRSGEALSLLKKRFSHRPVQEKFVCLNCGFETHADEQAALNIARSWLFLRSQEYKKYQTNKTTGNTDKRAFVETWQSFYRKKLKEVWKPAV

SEQ ID NO: 48229 - protein, 978 aa, synthetic construct
  REGION 1..978: note = engineered CasX variant
QEIKRINKIRRRLVKDSNTKKAGKTGPMKTLLVRVMTPDLRERLENLRKKPENIPQPISNTSRANLNKLLTDYTEMKKAILHVYWEEFQKDPVGLMSRVAQPASKKIDQNKLKPEMDEKGNLTTAGFACSQCGQPLFVYKLEQVSEKGKAYTNYFGRCNVAEHEKLILLAQLKPEKDSDEAVTYSLGKFGQRALDFYSIHVTKESTHPVKPLAQIAGNRYASVPVGKALSDACMGTIASFLSKYQDIIIEHQKVVKGNQKRLESLRELAGKENLEYPSVTLPPQPHTKEGVDAYNEVIARVRMWVNLNLWQKLKLSRDDAKPLLRLKKFPSFPLVERQANEVDWWDMVCNVKKLINEKKEDGKVFWQNLAGYKRQEALRPYLSSEEDRKKGKKFARYQLGDLLLHLEKKHGEDWGKVYDEAWERIDKKVEGLSKHIKLEEERRSEDAQSKAALTDWLRAKASFVIEGLKEADKDEFCRCELKLQKWYGDLRGKPFAIEAENSILDISGFSKQYNCAFIWQKDGVKKLNLYLIINYFKGGKLRFKKIKPEAFEANRFYTVINKKSGEIVPMEVNFNFDDPNLIILPLAFGKRQGREFIWNDLLSLETGSLKLANGRVIEKTLYNRRTRQDEPALFVALTFERREVLDSSNIKPMNLIGVDRGENIPAVIALTDPEGCPLSRFKDSLGNPTHILRIGESYKEKQRTIQAKKEVEQRRAGGYSRKYASKAKNLADDMVRNTARDLLYYAVTQDAMLIFENLSRGFGRQGKRTFMAERQYTRMEDWLTAKLAYNGLPSKTYLSKTLAQYTSKTCSNCGFTITSADYDRVLEKLKKTATGWMTTINGKELKVEGQITYYNRYKRQNVVKDLSVELDRLSEESVNNDISSWTKGRSGEALSLLKKRFSHRPVQEKFVCLNCGFETHADEQAALNIARSWLFLRSQEYKKYQTNKTTGNTDKRAFVETWQSFYRKKLKEVWKPAV

SEQ ID NO: 48230 - protein, 978 aa, synthetic construct
  REGION 1..978: note = engineered CasX variant
QEIKRINKIRRRLVKDSNTKKAGKTGPMKTLLVRVMTPDLRERLENLRKKPENIPQPISNTSRANLNKLLTDYTEMKKAILHVYWEEFQKDPVGLMSRVAQPASKKIDQNKLKPEMDEKGNLTTAGFACSQCGQPLFVYKLEQVSEKGKAYTNYFGRCNVAEHEKLIKLAQLKPEKDSDEAVTYSLGKFGQRALDFYSIHVTKESTHPVKPLAQIAGNRYASGPVGKALSDACMGTIASFLSKYQDIIIEHQKVVKGNQKRLESLRELAGKENLEYPSVTLPPQPHTKEGVDAYNEVIARVRMWVNLNLWQKLKLSRDDAKPLLRLKKFPSFPLVERQANEVDWWDMVCNVKKLINEKKEDGKVFWQNLAGYKRQEALRPYLSSEEDRKKGKKFARYQLGDLLLHLEKKHGEDWGKVYDEAWERIDKKVEGLSKHIKLEEERRSEDAQSKAALTDWLRAKASFVIEGLKEADKDEFCRCELKLQKWYGDLRGKPFAIEAENSILDISGFSKQYNCAFIWQKDGVKKLNLYLIINYFKGGKLRFKKIKPEAFEANRFYTVINKKSGEIVPMEVNFNFDDPNLIILPLAFGKRQGREFIWNDLLSLETGSLKLANGRVIEKTLYNRRTRQDEPALFVALTFERREVLDSSNIKPMNLIGVDRGENIPAVIALTDPEGCPLSRFKDSLGNPTHILRIGESYKEKQRTIQAKKEVEQRRAGGYSRKYASKAKNLADDMVRNTARDLLYYAVTQDAMLIFENLSRGFGRQGKRTFMAERQYTRMEDWLTAKLAYNGLPSKTYLSKTLAQYTSKTCSNCGFTITSADYDRVLEKLKKTATGWMTTINGKELKVEGQITYYNRYKRQNVVKDLSVELDRLSEESVNNDISSWTKGRSGEALSLLKKRFSHRPVQEKFVCLNCGFETHADEQAALNIARSWLFLRSQEYKKYQTNKTTGNTDKRAFVETWQSFYRKKLKEVWKPAV

SEQ ID NO: 48231 - protein, 977 aa, synthetic construct
  REGION 1..977: note = engineered CasX variant
QEIKRINKIRRRLVKDSNTKKAGKTGPMKTLLVRVMTPDLRERLENLRKKPENIPQPISNTSRANLNKLLTDYTEMKKAILHVYWEEFQKDPVGLMSRVAQPASKKIDQNKLKPEMDEKGNLTTAGFACSQCGQPLFVYKLEQVSEKGKAYTNYFGRCNVAEHEKLILLAQLKPEKDSDEAVTYSLGKFGQRALDFYSIHVTKESTHPVKPLAQIAGNRYASPVGKALSDACMGTIASFLSKYQDIIIEHQKVVKGNQKRLESLRELAGKENLEYPSVTLPPQPHTKEGVDAYNEVIARVRMWVNLNLWQKLKLSRDDAKPLLRLKKFPSFPLVERQANEVDWWDMVCNVKKLINEKKEDGKVFWQNLAGYKRQEALRPYLSSEEDRKKGKKFARYQLGDLLLHLEKKHGEDWGKVYDEAWERIDKKVEGLSKHIKLEEERRSEDAQSKAALTDWLRAKASFVIEGLKEADKDEFCRCELKLQKWYGDLRGKPFAIEAENSILDISGFSKQYNCAFIWQKDGVKKLNLYLIINYFKGGKLRFKKIKPEAFEANRFYTVINKKSGEIVPMEVNFNFDDPNLIILPLAFGKRQGREFIWNDLLSLETGSLKLANGRVIEKTLYNRRTRQDEPALFVALTFERREVLDSSNIKPMNLIGVDRGENIPAVIALTDPEGCPLSRFKDSLGNPTHILRIGESYKEKQRTIQAKKEVEQRRAGGYSRKYASKAKNLADDMVRNTARDLLYYAVTQDAMLIFENLSRGFGRQGKRTFMAERQYTRMEDWLTAKLAYNGLPSKTYLSKTLAQYTSKTCSNCGFTITSADYDRVLEKLKKTATGWMTTINGKELKVEGQITYYNRYKRQNVVKDLSVELDRLSEESVNNDISSWTKGRSGEALSLLKKRFSHRPVQEKFVCLNCGFETHADEQAALNIARSWLFLRSQEYKKYQTNKTTGNTDKRAFVETWQSFYRKKLKEVWKPAV

SEQ ID NO: 48232 - protein, 978 aa, synthetic construct
  REGION 1..978: note = engineered CasX variant
QEIKRINKIRRRLVKDSNTKKAGKTGPMKTLLVRVMTPDLRERLENLRKKPENIPQPISNTSRANLNKLLTDYTEMKKAILHVYWEEFQKDPVGLMSRVAQPASKKIDQNKLKPEMDEKGNLTTAGFACSQCGQPLFVYKLEQVSEKGKAYTNYFGRCNVAEHEKLIQLAQLKPEKDSDEAVTYSLGKFGQRALDFYSIHVTKESTHPVKPLAQIAGNRYASYPVGKALSDACMGTIASFLSKYQDIIIEHQKVVKGNQKRLESLRELAGKENLEYPSVTLPPQPHTKEGVDAYNEVIARVRMWVNLNLWQKLKLSRDDAKPLLRLKKFPSFPLVERQANEVDWWDMVCNVKKLINEKKEDGKVFWQNLAGYKRQEALRPYLSSEEDRKKGKKFARYQLGDLLLHLEKKHGEDWGKVYDEAWERIDKKVEGLSKHIKLEEERRSEDAQSKAALTDWLRAKASFVIEGLKEADKDEFCRCELKLQKWYGDLRGKPFAIEAENSILDISGFSKQYNCAFIWQKDGVKKLNLYLIINYFKGGKLRFKKIKPEAFEANRFYTVINKKSGEIVPMEVNFNFDDPNLIILPLAFGKRQGREFIWNDLLSLETGSLKLANGRVIEKTLYNRRTRQDEPALFVALTFERREVLDSSNIKPMNLIGVDRGENIPAVIALTDPEGCPLSRFKDSLGNPTHILRIGESYKEKQRTIQAKKEVEQRRAGGYSRKYASKAKNLADDMVRNTARDLLYYAVTQDAMLIFENLSRGFGRQGKRTFMAERQYTRMEDWLTAKLAYEGLPSKTYLSKTLAQYTSKTCSNCGFTITSADYDRVLEKLKKTATGWMTTINGKELKVEGQITYYNRYKRQNVVKDLSVELDRLSEESVNNDISSWTKGRSGEALSLLKKRFSHRPVQEKFVCLNCGFETHADEQAALNIARSWLFLRSQEYKKYQTNKTTGNTDKRAFVETWQSFYRKKLKEVWKPAV

SEQ ID NO: 48233 - protein, 978 aa, synthetic construct
  REGION 1..978: note = engineered CasX variant
QEIKRINKIRRRLVKDSNTKKAGKTGPMKTLLVRVMTPDLRERLENLRKKPENIPQPISNTSRANLNKLLTDYTEMKKAILHVYWEEFQKDPVGLMSRVAQPASKKIDQNKLKPEMDEKGNLTTAGFACSQCGQPLFVYKLEQVSEKGKAYTNYFGRCNVAEHEKLIQLAQLKPEKDSDEAVTYSLGKFGQRALDFYSIHVTKESTHPVKPLAQIAGNRYASHPVGKALSDACMGTIASFLSKYQDIIIEHQKVVKGNQKRLESLRELAGKENLEYPSVTLPPQPHTKEGVDAYNEVIARVRMWVNLNLWQKLKLSRDDAKPLLRLKKFPSFPLVERQANEVDWWDMVCNVKKLINEKKEDGKVFWQNLAGYKRQEALRPYLSSEEDRKKGKKFARYQLGDLLLHLEKKHGEDWGKVYDEAWERIDKKVEGLSKHIKLEEERRSEDAQSKAALTDWLRAKASFVIEGLKEADKDEFCRCELKLQKWYGDLRGKPFAIEAENSILDISGFSKQYNCAFIWQKDGVKKLNLYLIINYFKGGKLRFKKIKPEAFEANRFYTVINKKSGEIVPMEVNFNFDDPNLIILPLAFGKRQGREFIWNDLLSLETGSLKLANGRVIEKTLYNRRTRQDEPALFVALTFERREVLDSSNIKPMNLIGVDRGENIPAVIALTDPEGCPLSRFKDSLGNPTHILRIGESYKEKQRTIQAKKEVEQRRAGGYSRKYASKAKNLADDMVRNTARDLLYYAVTQDAMLIFENLSRGFGRQGKRTFMAERQYTRMEDWLTAKLAYEGLPSKTYLSKTLAQYTSKTCSNCGFTITSADYDRVLEKLKKTATGWMTTINGKELKVEGQITYYNRYKRQNVVKDLSVELDRLSEESVNNDISSWTKGRSGEALSLLKKRFSHRPVQEKFVCLNCGFETHADEQAALNIARSWLFLRSQEYKKYQTNKTTGNTDKRAFVETWQSFYRKKLKEVWKPAV

SEQ ID NO: 48234 - protein, 978 aa, synthetic construct
  REGION 1..978: note = engineered CasX variant
QEIKRINKIRRRLVKDSNTKKAGKTGPMKTLLVRVMTPDLRERLENLRKKPENIPQPISNTSRANLNKLLTDYTEMKKAILHVYWEEFQKDPVGLMSRVAQPASKKIDQNKLKPEMDEKGNLTTAGFACSQCGQPLFVYKLEQVSEKGKAYTNYFGRCNVAEHEKLIQLAQLKPEKDSDEAVTYSLGKFGQRALDFYSIHVTKESTHPVKPLAQIAGNRYASSPVGKALSDACMGTIASFLSKYQDIIIEHQKVVKGNQKRLESLRELAGKENLEYPSVTLPPQPHTKEGVDAYNEVIARVRMWVNLNLWQKLKLSRDDAKPLLRLKKFPSFPLVERQANEVDWWDMVCNVKKLINEKKEDGKVFWQNLAGYKRQEALRPYLSSEEDRKKGKKFARYQLGDLLLHLEKKHGEDWGKVYDEAWERIDKKVEGLSKHIKLEEERRSEDAQSKAALTDWLRAKASFVIEGLKEADKDEFCRCELKLQKWYGDLRGKPFAIEAENSILDISGFSKQYNCAFIWQKDGVKKLNLYLIINYFKGGKLRFKKIKPEAFEANRFYTVINKKSGEIVPMEVNFNFDDPNLIILPLAFGKRQGREFIWNDLLSLETGSLKLANGRVIEKTLYNRRTRQDEPALFVALTFERREVLDSSNIKPMNLIGVDRGENIPAVIALTDPEGCPLSRFKDSLGNPTHILRIGESYKEKQRTIQAKKEVEQRRAGGYSRKYASKAKNLADDMVRNTARDLLYYAVTQDAMLIFENLSRGFGRQGKRTFMAERQYTRMEDWLTAKLAYEGLPSKTYLSKTLAQYTSKTCSNCGFTITSADYDRVLEKLKKTATGWMTTINGKELKVEGQITYYNRYKRQNVVKDLSVELDRLSEESVNNDISSWTKGRSGEALSLLKKRFSHRPVQEKFVCLNCGFETHADEQAALNIARSWLFLRSQEYKKYQTNKTTGNTDKRAFVETWQSFYRKKLKEVWKPAV

SEQ ID NO: 48235 - protein, 978 aa, synthetic construct
  REGION 1..978: note = engineered CasX variant
QEIKRINKIRRRLVKDSNTKKAGKTGPMKTLLVRVMTPDLRERLENLRKKPENIPQPISNTSRANLNKLLTDYTEMKKAILHVYWEEFQKDPVGLMSRVAQPASKKIDQNKLKPEMDEKGNLTTAGFACSQCGQPLFVYKLEQVSEKGKAYTNYFGRCNVAEHEKLIQLAQLKPEKDSDEAVTYSLGKFGQRALDFYSIHVTKESTHPVKPLAQIAGNRYASTPVGKALSDACMGTIASFLSKYQDIIIEHQKVVKGNQKRLESLRELAGKENLEYPSVTLPPQPHTKEGVDAYNEVIARVRMWVNLNLWQKLKLSRDDAKPLLRLKKFPSFPLVERQANEVDWWDMVCNVKKLINEKKEDGKVFWQNLAGYKRQEALRPYLSSEEDRKKGKKFARYQLGDLLLHLEKKHGEDWGKVYDEAWERIDKKVEGLSKHIKLEEERRSEDAQSKAALTDWLRAKASFVIEGLKEADKDEFCRCELKLQKWYGDLRGKPFAIEAENSILDISGFSKQYNCAFIWQKDGVKKLNLYLIINYFKGGKLRFKKIKPEAFEANRFYTVINKKSGEIVPMEVNFNFDDPNLIILPLAFGKRQGREFIWNDLLSLETGSLKLANGRVIEKTLYNRRTRQDEPALFVALTFERREVLDSSNIKPMNLIGVDRGENIPAVIALTDPEGCPLSRFKDSLGNPTHILRIGESYKEKQRTIQAKKEVEQRRAGGYSRKYASKAKNLADDMVRNTARDLLYYAVTQDAMLIFENLSRGFGRQGKRTFMAERQYTRMEDWLTAKLAYEGLPSKTYLSKTLAQYTSKTCSNCGFTITSADYDRVLEKLKKTATGWMTTINGKELKVEGQITYYNRYKRQNVVKDLSVELDRLSEESVNNDISSWTKGRSGEALSLLKKRFSHRPVQEKFVCLNCGFETHADEQAALNIARSWLFLRSQEYKKYQTNKTTGNTDKRAFVETWQSFYRKKLKEVWKPAV

SEQ ID NO: 48236 - protein, 978 aa, synthetic construct
  REGION 1..978: note = engineered CasX variant
QEIKRINKIRRRLVKDSNTKKAGKTGPMKTLLVRVMTPDLRERLENLRKKPENIPQPISNTSRANLNKLLTDYTEMKKAILHVYWEEFQKDPVGLMSRVAQPASKKIDQNKLKPEMDEKGNLTTAGFACSQCGQPLFVYKLEQVSEKGKAYTNYFGRCNVAEHEKLIQLAQLKPEKDSDEAVTYSLGKFGQRALDFYSIHVTKESTHPVKPLAQIAGNRYASAPVGKALSDACMGTIASFLSKYQDIIIEHQKVVKGNQKRLESLRELAGKENLEYPSVTLPPQPHTKEGVDAYNEVIARVRMWVNLNLWQKLKLSRDDAKPLLRLKKFPSFPLVERQANEVDWWDMVCNVKKLINEKKEDGKVFWQNLAGYKRQEALRPYLSSEEDRKKGKKFARYQLGDLLLHLEKKHGEDWGKVYDEAWERIDKKVEGLSKHIKLEEERRSEDAQSKAALTDWLRAKASFVIEGLKEADKDEFCRCELKLQKWYGDLRGKPFAIEAENSILDISGFSKQYNCAFIWQKDGVKKLNLYLIINYFKGGKLRFKKIKPEAFEANRFYTVINKKSGEIVPMEVNFNFDDPNLIILPLAFGKRQGREFIWNDLLSLETGSLKLANGRVIEKTLYNRRTRQDEPALFVALTFERREVLDSSNIKPMNLIGVDRGENIPAVIALTDPEGCPLSRFKDSLGNPTHILRIGESYKEKQRTIQAKKEVEQRRAGGYSRKYASKAKNLADDMVRNTARDLLYYAVTQDAMLIFENLSRGFGRQGKRTFMAERQYTRMEDWLTAKLAYEGLPSKTYLSKTLAQYTSKTCSNCGFTITSADYDRVLEKLKKTATGWMTTINGKELKVEGQITYYNRYKRQNVVKDLSVELDRLSEESVNNDISSWTKGRSGEALSLLKKRFSHRPVQEKFVCLNCGFETHADEQAALNIARSWLFLRSQEYKKYQTNKTTGNTDKRAFVETWQSFYRKKLKEVWKPAV

SEQ ID NO: 48237 - protein, 978 aa, synthetic construct
  REGION 1..978: note = engineered CasX variant
QEIKRINKIRRRLVKDSNTKKAGKTGPMKTLLVRVMTPDLRERLENLRKKPENIPQPISNTSRANLNKLLTDYTEMKKAILHVYWEEFQKDPVGLMSRVAQPASKKIDQNKLKPEMDEKGNLTTAGFACSQCGQPLFVYKLEQVSEKGKAYTNYFGRCNVAEHEKLIQLAQLKPEKDSDEAVTYSLGKFGQRALDFYSIHVTKESTHPVKPLAQIAGNRYASVPVGKALSDACMGTIASFLSKYQDIIIEHQKVVKGNQKRLESLRELAGKENLEYPSVTLPPQPHTKEGVDAYNEVIARVRMWVNLNLWQKLKLSRDDAKPLLRLKKFPSFPLVERQANEVDWWDMVCNVKKLINEKKEDGKVFWQNLAGYKRQEALRPYLSSEEDRKKGKKFARYQLGDLLLHLEKKHGEDWGKVYDEAWERIDKKVEGLSKHIKLEEERRSEDAQSKAALTDWLRAKASFVIEGLKEADKDEFCRCELKLQKWYGDLRGKPFAIEAENSILDISGFSKQYNCAFIWQKDGVKKLNLYLIINYFKGGKLRFKKIKPEAFEANRFYTVINKKSGEIVPMEVNFNFDDPNLIILPLAFGKRQGREFIWNDLLSLETGSLKLANGRVIEKTLYNRRTRQDEPALFVALTFERREVLDSSNIKPMNLIGVDRGENIPAVIALTDPEGCPLSRFKDSLGNPTHILRIGESYKEKQRTIQAKKEVEQRRAGGYSRKYASKAKNLADDMVRNTARDLLYYAVTQDAMLIFENLSRGFGRQGKRTFMAERQYTRMEDWLTAKLAYEGLPSKTYLSKTLAQYTSKTCSNCGFTITSADYDRVLEKLKKTATGWMTTINGKELKVEGQITYYNRYKRQNVVKDLSVELDRLSEESVNNDISSWTKGRSGEALSLLKKRFSHRPVQEKFVCLNCGFETHADEQAALNIARSWLFLRSQEYKKYQTNKTTGNTDKRAFVETWQSFYRKKLKEVWKPAV

SEQ ID NO: 48238 - protein, 979 aa, synthetic construct
  REGION 1..979: note = engineered CasX variant
QEIKRINKIRRRLVKDSNTKKAGKTGPMKTLLVRVMTPDLRERLENLRKKPENIPQPISNTSRANLNKLLTDYTEMKKAILHVYWEEFQKDPVGLMSRVAQPASKKIDQNKLKPEMDEKGNLTTAGFACSQCGQPLFVYKLEQVSEKGKAYTNYFGRCNVAEHEKLIQKLAQLKPEKDSDEAVTYSLGKFGQRALDFYSIHVTKESTHPVKPLAQIAGNRYASGPVGKALSDACMGTIASFLSKYQDIIIEHQKVVKGNQKRLESLRELAGKENLEYPSVTLPPQPHTKEGVDAYNEVIARVRMWVNLNLWQKLKLSRDDAKPLLRLKKFPSFPLVERQANEVDWWDMVCNVKKLINEKKEDGKVFWQNLAGYKRQEALRPYLSSEEDRKKGKKFARYQLGDLLLHLEKKHGEDWGKVYDEAWERIDKKVEGLSKHIKLEEERRSEDAQSKAALTDWLRAKASFVIEGLKEADKDEFCRCELKLQKWYGDLRGKPFAIEAENSILDISGFSKQYNCAFIWQKDGVKKLNLYLIINYFKGGKLRFKKIKPEAFEANRFYTVINKKSGEIVPMEVNFNFDDPNLIILPLAFGKRQGREFIWNDLLSLETGSLKLANGRVIEKTLYNRRTRQDEPALFVALTFERREVLDSSNIKPMNLIGVDRGENIPAVIALTDPEGCPLSRFKDSLGNPTHILRIGESYKEKQRTIQAKKEVEQRRAGGYSRKYASKAKNLADDMVRNTARDLLYYAVTQDAMLIFENLSRGFGRQGKRTFMAERQYTRMEDWLTAKLAYEGLPSKTYLSKTLAQYTSKTCSNCGFTITSADYDRVLEKLKKTATGWMTTINGKELKVEGQITYYNRYKRQNVVKDLSVELDRLSEESVNNDISSWTKGRSGEALSLLKKRFSHRPVQEKFVCLNCGFETHADEQAALNIARSWLFLRSQEYKKYQTNKTTGNTDKRAFVETWQSFYRKKLKEVWKPAV

SEQ ID NO: 48239 - protein, 977 aa, synthetic construct
  REGION 1..977: note = engineered CasX variant
QEIKRINKIRRRLVKDSNTKKAGKTGPMKTLLVRVMTPDLRERLENLRKKPENIPQPISNTSRANLNKLLTDYTEMKKAILHVYWEEFQKDPVGLMSRVAQPASKKIDQNKLKPEMDEKGNLTTAGFACSQCGQPLFVYKLEQVSEKGKAYTNYFGRCNVAEHEKLIQLAQLKPEKDSDEAVTYSLGKFGQRALDFYSIHVTKESTHPVKPLAQIAGNRYASPVGKALSDACMGTIASFLSKYQDIIIEHQKVVKGNQKRLESLRELAGKENLEYPSVTLPPQPHTKEGVDAYNEVIARVRMWVNLNLWQKLKLSRDDAKPLLRLKKFPSFPLVERQANEVDWWDMVCNVKKLINEKKEDGKVFWQNLAGYKRQEALRPYLSSEEDRKKGKKFARYQLGDLLLHLEKKHGEDWGKVYDEAWERIDKKVEGLSKHIKLEEERRSEDAQSKAALTDWLRAKASFVIEGLKEADKDEFCRCELKLQKWYGDLRGKPFAIEAENSILDISGFSKQYNCAFIWQKDGVKKLNLYLIINYFKGGKLRFKKIKPEAFEANRFYTVINKKSGEIVPMEVNFNFDDPNLIILPLAFGKRQGREFIWNDLLSLETGSLKLANGRVIEKTLYNRRTRQDEPALFVALTFERREVLDSSNIKPMNLIGVDRGENIPAVIALTDPEGCPLSRFKDSLGNPTHILRIGESYKEKQRTIQAKKEVEQRRAGGYSRKYASKAKNLADDMVRNTARDLLYYAVTQDAMLIFENLSRGFGRQGKRTFMAERQYTRMEDWLTAKLAYEGLPSKTYLSKTLAQYTSKTCSNCGFTITSADYDRVLEKLKKTATGWMTTINGKELKVEGQITYYNRYKRQNVVKDLSVELDRLSEESVNNDISSWTKGRSGEALSLLKKRFSHRPVQEKFVCLNCGFETHADEQAALNIARSWLFLRSQEYKKYQTNKTTGNTDKRAFVETWQSFYRKKLKEVWKPAV

SEQ ID NO: 48240 - protein, 978 aa, synthetic construct
  REGION 1..978: note = engineered CasX variant
QEIKRINKIRRRLVKDSNTKKAGKTGPMKTLLVRVMTPDLRERLENLRKKPENIPQPISNTSRANLNKLLTDYTEMKKAILHVYWEEFQKDPVGLMSRVAQPASKKIDQNKLKPEMDEKGNLTTAGFACSQCGQPLFVYKLEQVSEKGKAYTNYFGRCNVAEHEKLILLAQLKPEKDSDEAVTYSLGKFGQRALDFYSIHVTKESTHPVKPLAQIAGNRYASYPVGKALSDACMGTIASFLSKYQDIIIEHQKVVKGNQKRLESLRELAGKENLEYPSVTLPPQPHTKEGVDAYNEVIARVRMWVNLNLWQKLKLSRDDAKPLLRLKKFPSFPLVERQANEVDWWDMVCNVKKLINEKKEDGKVFWQNLAIYKRQEALRPYLSSEEDRKKGKKFARYQLGDLLLHLEKKHGEDWGKVYDEAWERIDKKVEGLSKHIKLEEERRSEDAQSKAALTDWLRAKASFVIEGLKEADKDEFCRCELKLQKWYGDLRGKPFAIEAENSILDISGFSKQYNCAFIWQKDGVKKLNLYLIINYFKGGKLRFKKIKPEAFEANRFYTVINKKSGEIVPMEVNFNFDDPNLIILPLAFGKRQGREFIWNDLLSLETGSLKLANGRVIEKTLYNRRTRQDEPALFVALTFERREVLDSSNIKPMNLIGVDRGENIPAVIALTDPEGCPLSRFKDSLGNPTHILRIGESYKEKQRTIQAKKEVEQRRAGGYSRKYASKAKNLADDMVRNTARDLLYYAVTQDAMLIFENLSRGFGRQGKRTFMAERQYTRMEDWLTAKLAYEGLPSKTYLSKTLAQYTSKTCSNCGFTITSADYDRVLEKLKKTATGWMTTINGKELKVEGQITYYNRYKRQNVVKDLSVELDRLSEESVNNDISSWTKGRSGEALSLLKKRFSHRPVQEKFVCLNCGFETHADEQAALNIARSWLFLRSQEYKKYQTNKTTGNTDKRAFVETWQSFYRKKLKEVWKPAV

SEQ ID NO: 48241 - protein, 978 aa, synthetic construct
  REGION 1..978: note = engineered CasX variant
QEIKRINKIRRRLVKDSNTKKAGKTGPMKTLLVRVMTPDLRERLENLRKKPENIPQPISNTSRANLNKLLTDYTEMKKAILHVYWEEFQKDPVGLMSRVAQPASKKIDQNKLKPEMDEKGNLTTAGFACSQCGQPLFVYKLEQVSEKGKAYTNYFGRCNVAEHEKLILLAQLKPEKDSDEAVTYSLGKFGQRALDFYSIHVTKESTHPVKPLAQIAGNRYASHPVGKALSDACMGTIASFLSKYQDIIIEHQKVVKGNQKRLESLRELAGKENLEYPSVTLPPQPHTKEGVDAYNEVIARVRMWVNLNLWQKLKLSRDDAKPLLRLKKFPSFPLVERQANEVDWWDMVCNVKKLINEKKEDGKVFWQNLAIYKRQEALRPYLSSEEDRKKGKKFARYQLGDLLLHLEKKHGEDWGKVYDEAWERIDKKVEGLSKHIKLEEERRSEDAQSKAALTDWLRAKASFVIEGLKEADKDEFCRCELKLQKWYGDLRGKPFAIEAENSILDISGFSKQYNCAFIWQKDGVKKLNLYLIINYFKGGKLRFKKIKPEAFEANRFYTVINKKSGEIVPMEVNFNFDDPNLIILPLAFGKRQGREFIWNDLLSLETGSLKLANGRVIEKTLYNRRTRQDEPALFVALTFERREVLDSSNIKPMNLIGVDRGENIPAVIALTDPEGCPLSRFKDSLGNPTHILRIGESYKEKQRTIQAKKEVEQRRAGGYSRKYASKAKNLADDMVRNTARDLLYYAVTQDAMLIFENLSRGFGRQGKRTFMAERQYTRMEDWLTAKLAYEGLPSKTYLSKTLAQYTSKTCSNCGFTITSADYDRVLEKLKKTATGWMTTINGKELKVEGQITYYNRYKRQNVVKDLSVELDRLSEESVNNDISSWTKGRSGEALSLLKKRFSHRPVQEKFVCLNCGFETHADEQAALNIARSWLFLRSQEYKKYQTNKTTGNTDKRAFVETWQSFYRKKLKEVWKPAV

SEQ ID NO: 48242 - protein, 978 aa, synthetic construct
  REGION 1..978: note = engineered CasX variant
QEIKRINKIRRRLVKDSNTKKAGKTGPMKTLLVRVMTPDLRERLENLRKKPENIPQPISNTSRANLNKLLTDYTEMKKAILHVYWEEFQKDPVGLMSRVAQPASKKIDQNKLKPEMDEKGNLTTAGFACSQCGQPLFVYKLEQVSEKGKAYTNYFGRCNVAEHEKLILLAQLKPEKDSDEAVTYSLGKFGQRALDFYSIHVTKESTHPVKPLAQIAGNRYASSPVGKALSDACMGTIASFLSKYQDIIIEHQKVVKGNQKRLESLRELAGKENLEYPSVTLPPQPHTKEGVDAYNEVIARVRMWVNLNLWQKLKLSRDDAKPLLRLKKFPSFPLVERQANEVDWWDMVCNVKKLINEKKEDGKVFWQNLAIYKRQEALRPYLSSEEDRKKGKKFARYQLGDLLLHLEKKHGEDWGKVYDEAWERIDKKVEGLSKHIKLEEERRSEDAQSKAALTDWLRAKASFVIEGLKEADKDEFCRCELKLQKWYGDLRGKPFAIEAENSILDISGFSKQYNCAFIWQKDGVKKLNLYLIINYFKGGKLRFKKIKPEAFEANRFYTVINKKSGEIVPMEVNFNFDDPNLIILPLAFGKRQGREFIWNDLLSLETGSLKLANGRVIEKTLYNRRTRQDEPALFVALTFERREVLDSSNIKPMNLIGVDRGENIPAVIALTDPEGCPLSRFKDSLGNPTHILRIGESYKEKQRTIQAKKEVEQRRAGGYSRKYASKAKNLADDMVRNTARDLLYYAVTQDAMLIFENLSRGFGRQGKRTFMAERQYTRMEDWLTAKLAYEGLPSKTYLSKTLAQYTSKTCSNCGFTITSADYDRVLEKLKKTATGWMTTINGKELKVEGQITYYNRYKRQNVVKDLSVELDRLSEESVNNDISSWTKGRSGEALSLLKKRFSHRPVQEKFVCLNCGFETHADEQAALNIARSWLFLRSQEYKKYQTNKTTGNTDKRAFVETWQSFYRKKLKEVWKPAV

SEQ ID NO: 48243 - protein, 978 aa, synthetic construct
  REGION 1..978: note = engineered CasX variant
QEIKRINKIRRRLVKDSNTKKAGKTGPMKTLLVRVMTPDLRERLENLRKKPENIPQPISNTSRANLNKLLTDYTEMKKAILHVYWEEFQKDPVGLMSRVAQPASKKIDQNKLKPEMDEKGNLTTAGFACSQCGQPLFVYKLEQVSEKGKAYTNYFGRCNVAEHEKLILLAQLKPEKDSDEAVTYSLGKFGQRALDFYSIHVTKESTHPVKPLAQIAGNRYASTPVGKALSDACMGTIASFLSKYQDIIIEHQKVVKGNQKRLESLRELAGKENLEYPSVTLPPQPHTKEGVDAYNEVIARVRMWVNLNLWQKLKLSRDDAKPLLRLKKFPSFPLVERQANEVDWWDMVCNVKKLINEKKEDGKVFWQNLAIYKRQEALRPYLSSEEDRKKGKKFARYQLGDLLLHLEKKHGEDWGKVYDEAWERIDKKVEGLSKHIKLEEERRSEDAQSKAALTDWLRAKASFVIEGLKEADKDEFCRCELKLQKWYGDLRGKPFAIEAENSILDISGFSKQYNCAFIWQKDGVKKLNLYLIINYFKGGKLRFKKIKPEAFEANRFYTVINKKSGEIVPMEVNFNFDDPNLIILPLAFGKRQGREFIWNDLLSLETGSLKLANGRVIEKTLYNRRTRQDEPALFVALTFERREVLDSSNIKPMNLIGVDRGENIPAVIALTDPEGCPLSRFKDSLGNPTHILRIGESYKEKQRTIQAKKEVEQRRAGGYSRKYASKAKNLADDMVRNTARDLLYYAVTQDAMLIFENLSRGFGRQGKRTFMAERQYTRMEDWLTAKLAYEGLPSKTYLSKTLAQYTSKTCSNCGFTITSADYDRVLEKLKKTATGWMTTINGKELKVEGQITYYNRYKRQNVVKDLSVELDRLSEESVNNDISSWTKGRSGEALSLLKKRFSHRPVQEKFVCLNCGFETHADEQAALNIARSWLFLRSQEYKKYQTNKTTGNTDKRAFVETWQSFYRKKLKEVWKPAV

SEQ ID NO: 48244 - protein, 978 aa, synthetic construct
  REGION 1..978: note = engineered CasX variant
QEIKRINKIRRRLVKDSNTKKAGKTGPMKTLLVRVMTPDLRERLENLRKKPENIPQPISNTSRANLNKLLTDYTEMKKAILHVYWEEFQKDPVGLMSRVAQPASKKIDQNKLKPEMDEKGNLTTAGFACSQCGQPLFVYKLEQVSEKGKAYTNYFGRCNVAEHEKLILLAQLKPEKDSDEAVTYSLGKFGQRALDFYSIHVTKESTHPVKPLAQIAGNRYASAPVGKALSDACMGTIASFLSKYQDIIIEHQKVVKGNQKRLESLRELAGKENLEYPSVTLPPQPHTKEGVDAYNEVIARVRMWVNLNLWQKLKLSRDDAKPLLRLKKFPSFPLVERQANEVDWWDMVCNVKKLINEKKEDGKVFWQNLAIYKRQEALRPYLSSEEDRKKGKKFARYQLGDLLLHLEKKHGEDWGKVYDEAWERIDKKVEGLSKHIKLEEERRSEDAQSKAALTDWLRAKASFVIEGLKEADKDEFCRCELKLQKWYGDLRGKPFAIEAENSILDISGFSKQYNCAFIWQKDGVKKLNLYLIINYFKGGKLRFKKIKPEAFEANRFYTVINKKSGEIVPMEVNFNFDDPNLIILPLAFGKRQGREFIWNDLLSLETGSLKLANGRVIEKTLYNRRTRQDEPALFVALTFERREVLDSSNIKPMNLIGVDRGENIPAVIALTDPEGCPLSRFKDSLGNPTHILRIGESYKEKQRTIQAKKEVEQRRAGGYSRKYASKAKNLADDMVRNTARDLLYYAVTQDAMLIFENLSRGFGRQGKRTFMAERQYTRMEDWLTAKLAYEGLPSKTYLSKTLAQYTSKTCSNCGFTITSADYDRVLEKLKKTATGWMTTINGKELKVEGQITYYNRYKRQNVVKDLSVELDRLSEESVNNDISSWTKGRSGEALSLLKKRFSHRPVQEKFVCLNCGFETHADEQAALNIARSWLFLRSQEYKKYQTNKTTGNTDKRAFVETWQSFYRKKLKEVWKPAV

SEQ ID NO: 48245 - protein, 978 aa, synthetic construct
  REGION 1..978: note = engineered CasX variant
QEIKRINKIRRRLVKDSNTKKAGKTGPMKTLLVRVMTPDLRERLENLRKKPENIPQPISNTSRANLNKLLTDYTEMKKAILHVYWEEFQKDPVGLMSRVAQPASKKIDQNKLKPEMDEKGNLTTAGFACSQCGQPLFVYKLEQVSEKGKAYTNYFGRCNVAEHEKLILLAQLKPEKDSDEAVTYSLGKFGQRALDFYSIHVTKESTHPVKPLAQIAGNRYASVPVGKALSDACMGTIASFLSKYQDIIIEHQKVVKGNQKRLESLRELAGKENLEYPSVTLPPQPHTKEGVDAYNEVIARVRMWVNLNLWQKLKLSRDDAKPLLRLKKFPSFPLVERQANEVDWWDMVCNVKKLINEKKEDGKVFWQNLAIYKRQEALRPYLSSEEDRKKGKKFARYQLGDLLLHLEKKHGEDWGKVYDEAWERIDKKVEGLSKHIKLEEERRSEDAQSKAALTDWLRAKASFVIEGLKEADKDEFCRCELKLQKWYGDLRGKPFAIEAENSILDISGFSKQYNCAFIWQKDGVKKLNLYLIINYFKGGKLRFKKIKPEAFEANRFYTVINKKSGEIVPMEVNFNFDDPNLIILPLAFGKRQGREFIWNDLLSLETGSLKLANGRVIEKTLYNRRTRQDEPALFVALTFERREVLDSSNIKPMNLIGVDRGENIPAVIALTDPEGCPLSRFKDSLGNPTHILRIGESYKEKQRTIQAKKEVEQRRAGGYSRKYASKAKNLADDMVRNTARDLLYYAVTQDAMLIFENLSRGFGRQGKRTFMAERQYTRMEDWLTAKLAYEGLPSKTYLSKTLAQYTSKTCSNCGFTITSADYDRVLEKLKKTATGWMTTINGKELKVEGQITYYNRYKRQNVVKDLSVELDRLSEESVNNDISSWTKGRSGEALSLLKKRFSHRPVQEKFVCLNCGFETHADEQAALNIARSWLFLRSQEYKKYQTNKTTGNTDKRAFVETWQSFYRKKLKEVWKPAV

SEQ ID NO: 48246 - protein, 978 aa, synthetic construct
  REGION 1..978: note = engineered CasX variant
QEIKRINKIRRRLVKDSNTKKAGKTGPMKTLLVRVMTPDLRERLENLRKKPENIPQPISNTSRANLNKLLTDYTEMKKAILHVYWEEFQKDPVGLMSRVAQPASKKIDQNKLKPEMDEKGNLTTAGFACSQCGQPLFVYKLEQVSEKGKAYTNYFGRCNVAEHEKLIKLAQLKPEKDSDEAVTYSLGKFGQRALDFYSIHVTKESTHPVKPLAQIAGNRYASGPVGKALSDACMGTIASFLSKYQDIIIEHQKVVKGNQKRLESLRELAGKENLEYPSVTLPPQPHTKEGVDAYNEVIARVRMWVNLNLWQKLKLSRDDAKPLLRLKKFPSFPLVERQANEVDWWDMVCNVKKLINEKKEDGKVFWQNLAIYKRQEALRPYLSSEEDRKKGKKFARYQLGDLLLHLEKKHGEDWGKVYDEAWERIDKKVEGLSKHIKLEEERRSEDAQSKAALTDWLRAKASFVIEGLKEADKDEFCRCELKLQKWYGDLRGKPFAIEAENSILDISGFSKQYNCAFIWQKDGVKKLNLYLIINYFKGGKLRFKKIKPEAFEANRFYTVINKKSGEIVPMEVNFNFDDPNLIILPLAFGKRQGREFIWNDLLSLETGSLKLANGRVIEKTLYNRRTRQDEPALFVALTFERREVLDSSNIKPMNLIGVDRGENIPAVIALTDPEGCPLSRFKDSLGNPTHILRIGESYKEKQRTIQAKKEVEQRRAGGYSRKYASKAKNLADDMVRNTARDLLYYAVTQDAMLIFENLSRGFGRQGKRTFMAERQYTRMEDWLTAKLAYEGLPSKTYLSKTLAQYTSKTCSNCGFTITSADYDRVLEKLKKTATGWMTTINGKELKVEGQITYYNRYKRQNVVKDLSVELDRLSEESVNNDISSWTKGRSGEALSLLKKRFSHRPVQEKFVCLNCGFETHADEQAALNIARSWLFLRSQEYKKYQTNKTTGNTDKRAFVETWQSFYRKKLKEVWKPAV

SEQ ID NO: 48247 - protein, 977 aa, synthetic construct
  REGION 1..977: note = engineered CasX variant
QEIKRINKIRRRLVKDSNTKKAGKTGPMKTLLVRVMTPDLRERLENLRKKPENIPQPISNTSRANLNKLLTDYTEMKKAILHVYWEEFQKDPVGLMSRVAQPASKKIDQNKLKPEMDEKGNLTTAGFACSQCGQPLFVYKLEQVSEKGKAYTNYFGRCNVAEHEKLILLAQLKPEKDSDEAVTYSLGKFGQRALDFYSIHVTKESTHPVKPLAQIAGNRYASPVGKALSDACMGTIASFLSKYQDIIIEHQKVVKGNQKRLESLRELAGKENLEYPSVTLPPQPHTKEGVDAYNEVIARVRMWVNLNLWQKLKLSRDDAKPLLRLKKFPSFPLVERQANEVDWWDMVCNVKKLINEKKEDGKVFWQNLAIYKRQEALRPYLSSEEDRKKGKKFARYQLGDLLLHLEKKHGEDWGKVYDEAWERIDKKVEGLSKHIKLEEERRSEDAQSKAALTDWLRAKASFVIEGLKEADKDEFCRCELKLQKWYGDLRGKPFAIEAENSILDISGFSKQYNCAFIWQKDGVKKLNLYLIINYFKGGKLRFKKIKPEAFEANRFYTVINKKSGEIVPMEVNFNFDDPNLIILPLAFGKRQGREFIWNDLLSLETGSLKLANGRVIEKTLYNRRTRQDEPALFVALTFERREVLDSSNIKPMNLIGVDRGENIPAVIALTDPEGCPLSRFKDSLGNPTHILRIGESYKEKQRTIQAKKEVEQRRAGGYSRKYASKAKNLADDMVRNTARDLLYYAVTQDAMLIFENLSRGFGRQGKRTFMAERQYTRMEDWLTAKLAYEGLPSKTYLSKTLAQYTSKTCSNCGFTITSADYDRVLEKLKKTATGWMTTINGKELKVEGQITYYNRYKRQNVVKDLSVELDRLSEESVNNDISSWTKGRSGEALSLLKKRFSHRPVQEKFVCLNCGFETHADEQAALNIARSWLFLRSQEYKKYQTNKTTGNTDKRAFVETWQSFYRKKLKEVWKPAV

SEQ ID NO: 48248 - protein, 978 aa, synthetic construct
  REGION 1..978: note = engineered CasX variant
QEIKRINKIRRRLVKDSNTKKAGKTGPMKTLLVRVMTPDLRERLENLRKKPENIPQPISNTSRANLNKLLTDYTEMKKAILHVYWEEFQKDPVGLMSRVAQPASKKIDQNKLKPEMDEKGNLTTAGFACSQCGQPLFVYKLEQVSEKGKAYTNYFGRCNVAEHEKLILLAQLKPEKDSDEAVTYSLGKFGQRALDFYSIHVTKESTHPVKPLAQIAGNRYASYPVGKALSDACMGTIASFLSKYQDIIIEHQKVVKGNQKRLESLRELAGKENLEYPSVTLPPQPHTKEGVDAYNEVIARVRMWVNLNLWQKLKLSRDDAKPLLRLKKFPSFPLVERQANEVDWWDMVCNVKKLINEKKEDGKVFWQNLAGYKRQEALRPYLSSEEDREKGKKFARYQLGDLLLHLEKKHGEDWGKVYDEAWERIDKKVEGLSKHIKLEEERRSEDAQSKAALTDWLRAKASFVIEGLKEADKDEFCRCELKLQKWYGDLRGKPFAIEAENSILDISGFSKQYNCAFIWQKDGVKKLNLYLIINYFKGGKLRFKKIKPEAFEANRFYTVINKKSGEIVPMEVNFNFDDPNLIILPLAFGKRQGREFIWNDLLSLETGSLKLANGRVIEKTLYNRRTRQDEPALFVALTFERREVLDSSNIKPMNLIGVDRGENIPAVIALTDPEGCPLSRFKDSLGNPTHILRIGESYKEKQRTIQAKKEVEQRRAGGYSRKYASKAKNLADDMVRNTARDLLYYAVTQDAMLIFENLSRGFGRQGKRTFMAERQYTRMEDWLTAKLAYEGLPSKTYLSKTLAQYTSKTCSNCGFTITSADYDRVLEKLKKTATGWMTTINGKELKVEGQITYYNRYKRQNVVKDLSVELDRLSEESVNNDISSWTKGRSGEALSLLKKRFSHRPVQEKFVCLNCGFETHADEQAALNIARSWLFLRSQEYKKYQTNKTTGNTDKRAFVETWQSFYRKKLKEVWKPAV

SEQ ID NO: 48249 - protein, 978 aa, synthetic construct
  REGION 1..978: note = engineered CasX variant
QEIKRINKIRRRLVKDSNTKKAGKTGPMKTLLVRVMTPDLRERLENLRKKPENIPQPISNTSRANLNKLLTDYTEMKKAILHVYWEEFQKDPVGLMSRVAQPASKKIDQNKLKPEMDEKGNLTTAGFACSQCGQPLFVYKLEQVSEKGKAYTNYFGRCNVAEHEKLILLAQLKPEKDSDEAVTYSLGKFGQRALDFYSIHVTKESTHPVKPLAQIAGNRYASHPVGKALSDACMGTIASFLSKYQDIIIEHQKVVKGNQKRLESLRELAGKENLEYPSVTLPPQPHTKEGVDAYNEVIARVRMWVNLNLWQKLKLSRDDAKPLLRLKKFPSFPLVERQANEVDWWDMVCNVKKLINEKKEDGKVFWQNLAGYKRQEALRPYLSSEEDREKGKKFARYQLGDLLLHLEKKHGEDWGKVYDEAWERIDKKVEGLSKHIKLEEERRSEDAQSKAALTDWLRAKASFVIEGLKEADKDEFCRCELKLQKWYGDLRGKPFAIEAENSILDISGFSKQYNCAFIWQKDGVKKLNLYLIINYFKGGKLRFKKIKPEAFEANRFYTVINKKSGEIVPMEVNFNFDDPNLIILPLAFGKRQGREFIWNDLLSLETGSLKLANGRVIEKTLYNRRTRQDEPALFVALTFERREVLDSSNIKPMNLIGVDRGENIPAVIALTDPEGCPLSRFKDSLGNPTHILRIGESYKEKQRTIQAKKEVEQRRAGGYSRKYASKAKNLADDMVRNTARDLLYYAVTQDAMLIFENLSRGFGRQGKRTFMAERQYTRMEDWLTAKLAYEGLPSKTYLSKTLAQYTSKTCSNCGFTITSADYDRVLEKLKKTATGWMTTINGKELKVEGQITYYNRYKRQNVVKDLSVELDRLSEESVNNDISSWTKGRSGEALSLLKKRFSHRPVQEKFVCLNCGFETHADEQAALNIARSWLFLRSQEYKKYQTNKTTGNTDKRAFVETWQSFYRKKLKEVWKPAV

SEQ ID NO: 48250 - protein, 978 aa, synthetic construct
  REGION 1..978: note = engineered CasX variant
QEIKRINKIRRRLVKDSNTKKAGKTGPMKTLLVRVMTPDLRERLENLRKKPENIPQPISNTSRANLNKLLTDYTEMKKAILHVYWEEFQKDPVGLMSRVAQPASKKIDQNKLKPEMDEKGNLTTAGFACSQCGQPLFVYKLEQVSEKGKAYTNYFGRCNVAEHEKLILLAQLKPEKDSDEAVTYSLGKFGQRALDFYSIHVTKESTHPVKPLAQIAGNRYASSPVGKALSDACMGTIASFLSKYQDIIIEHQKVVKGNQKRLESLRELAGKENLEYPSVTLPPQPHTKEGVDAYNEVIARVRMWVNLNLWQKLKLSRDDAKPLLRLKKFPSFPLVERQANEVDWWDMVCNVKKLINEKKEDGKVFWQNLAGYKRQEALRPYLSSEEDREKGKKFARYQLGDLLLHLEKKHGEDWGKVYDEAWERIDKKVEGLSKHIKLEEERRSEDAQSKAALTDWLRAKASFVIEGLKEADKDEFCRCELKLQKWYGDLRGKPFAIEAENSILDISGFSKQYNCAFIWQKDGVKKLNLYLIINYFKGGKLRFKKIKPEAFEANRFYTVINKKSGEIVPMEVNFNFDDPNLIILPLAFGKRQGREFIWNDLLSLETGSLKLANGRVIEKTLYNRRTRQDEPALFVALTFERREVLDSSNIKPMNLIGVDRGENIPAVIALTDPEGCPLSRFKDSLGNPTHILRIGESYKEKQRTIQAKKEVEQRRAGGYSRKYASKAKNLADDMVRNTARDLLYYAVTQDAMLIFENLSRGFGRQGKRTFMAERQYTRMEDWLTAKLAYEGLPSKTYLSKTLAQYTSKTCSNCGFTITSADYDRVLEKLKKTATGWMTTINGKELKVEGQITYYNRYKRQNVVKDLSVELDRLSEESVNNDISSWTKGRSGEALSLLKKRFSHRPVQEKFVCLNCGFETHADEQAALNIARSWLFLRSQEYKKYQTNKTTGNTDKRAFVETWQSFYRKKLKEVWKPAV

SEQ ID NO: 48251 - protein, 978 aa, synthetic construct
  REGION 1..978: note = engineered CasX variant
QEIKRINKIRRRLVKDSNTKKAGKTGPMKTLLVRVMTPDLRERLENLRKKPENIPQPISNTSRANLNKLLTDYTEMKKAILHVYWEEFQKDPVGLMSRVAQPASKKIDQNKLKPEMDEKGNLTTAGFACSQCGQPLFVYKLEQVSEKGKAYTNYFGRCNVAEHEKLILLAQLKPEKDSDEAVTYSLGKFGQRALDFYSIHVTKESTHPVKPLAQIAGNRYASTPVGKALSDACMGTIASFLSKYQDIIIEHQKVVKGNQKRLESLRELAGKENLEYPSVTLPPQPHTKEGVDAYNEVIARVRMWVNLNLWQKLKLSRDDAKPLLRLKKFPSFPLVERQANEVDWWDMVCNVKKLINEKKEDGKVFWQNLAGYKRQEALRPYLSSEEDREKGKKFARYQLGDLLLHLEKKHGEDWGKVYDEAWERIDKKVEGLSKHIKLEEERRSEDAQSKAALTDWLRAKASFVIEGLKEADKDEFCRCELKLQKWYGDLRGKPFAIEAENSILDISGFSKQYNCAFIWQKDGVKKLNLYLIINYFKGGKLRFKKIKPEAFEANRFYTVINKKSGEIVPMEVNFNFDDPNLIILPLAFGKRQGREFIWNDLLSLETGSLKLANGRVIEKTLYNRRTRQDEPALFVALTFERREVLDSSNIKPMNLIGVDRGENIPAVIALTDPEGCPLSRFKDSLGNPTHILRIGESYKEKQRTIQAKKEVEQRRAGGYSRKYASKAKNLADDMVRNTARDLLYYAVTQDAMLIFENLSRGFGRQGKRTFMAERQYTRMEDWLTAKLAYEGLPSKTYLSKTLAQYTSKTCSNCGFTITSADYDRVLEKLKKTATGWMTTINGKELKVEGQITYYNRYKRQNVVKDLSVELDRLSEESVNNDISSWTKGRSGEALSLLKKRFSHRPVQEKFVCLNCGFETHADEQAALNIARSWLFLRSQEYKKYQTNKTTGNTDKRAFVETWQSFYRKKLKEVWKPAV

SEQ ID NO: 48252 - protein, 978 aa, synthetic construct
  REGION 1..978: note = engineered CasX variant
QEIKRINKIRRRLVKDSNTKKAGKTGPMKTLLVRVMTPDLRERLENLRKKPENIPQPISNTSRANLNKLLTDYTEMKKAILHVYWEEFQKDPVGLMSRVAQPASKKIDQNKLKPEMDEKGNLTTAGFACSQCGQPLFVYKLEQVSEKGKAYTNYFGRCNVAEHEKLILLAQLKPEKDSDEAVTYSLGKFGQRALDFYSIHVTKESTHPVKPLAQIAGNRYASAPVGKALSDACMGTIASFLSKYQDIIIEHQKVVKGNQKRLESLRELAGKENLEYPSVTLPPQPHTKEGVDAYNEVIARVRMWVNLNLWQKLKLSRDDAKPLLRLKKFPSFPLVERQANEVDWWDMVCNVKKLINEKKEDGKVFWQNLAGYKRQEALRPYLSSEEDREKGKKFARYQLGDLLLHLEKKHGEDWGKVYDEAWERIDKKVEGLSKHIKLEEERRSEDAQSKAALTDWLRAKASFVIEGLKEADKDEFCRCELKLQKWYGDLRGKPFAIEAENSILDISGFSKQYNCAFIWQKDGVKKLNLYLIINYFKGGKLRFKKIKPEAFEANRFYTVINKKSGEIVPMEVNFNFDDPNLIILPLAFGKRQGREFIWNDLLSLETGSLKLANGRVIEKTLYNRRTRQDEPALFVALTFERREVLDSSNIKPMNLIGVDRGENIPAVIALTDPEGCPLSRFKDSLGNPTHILRIGESYKEKQRTIQAKKEVEQRRAGGYSRKYASKAKNLADDMVRNTARDLLYYAVTQDAMLIFENLSRGFGRQGKRTFMAERQYTRMEDWLTAKLAYEGLPSKTYLSKTLAQYTSKTCSNCGFTITSADYDRVLEKLKKTATGWMTTINGKELKVEGQITYYNRYKRQNVVKDLSVELDRLSEESVNNDISSWTKGRSGEALSLLKKRFSHRPVQEKFVCLNCGFETHADEQAALNIARSWLFLRSQEYKKYQTNKTTGNTDKRAFVETWQSFYRKKLKEVWKPAV

SEQ ID NO: 48253 - protein, 978 aa, synthetic construct
  REGION 1..978: note = engineered CasX variant
QEIKRINKIRRRLVKDSNTKKAGKTGPMKTLLVRVMTPDLRERLENLRKKPENIPQPISNTSRANLNKLLTDYTEMKKAILHVYWEEFQKDPVGLMSRVAQPASKKIDQNKLKPEMDEKGNLTTAGFACSQCGQPLFVYKLEQVSEKGKAYTNYFGRCNVAEHEKLILLAQLKPEKDSDEAVTYSLGKFGQRALDFYSIHVTKESTHPVKPLAQIAGNRYASVPVGKALSDACMGTIASFLSKYQDIIIEHQKVVKGNQKRLESLRELAGKENLEYPSVTLPPQPHTKEGVDAYNEVIARVRMWVNLNLWQKLKLSRDDAKPLLRLKKFPSFPLVERQANEVDWWDMVCNVKKLINEKKEDGKVFWQNLAGYKRQEALRPYLSSEEDREKGKKFARYQLGDLLLHLEKKHGEDWGKVYDEAWERIDKKVEGLSKHIKLEEERRSEDAQSKAALTDWLRAKASFVIEGLKEADKDEFCRCELKLQKWYGDLRGKPFAIEAENSILDISGFSKQYNCAFIWQKDGVKKLNLYLIINYFKGGKLRFKKIKPEAFEANRFYTVINKKSGEIVPMEVNFNFDDPNLIILPLAFGKRQGREFIWNDLLSLETGSLKLANGRVIEKTLYNRRTRQDEPALFVALTFERREVLDSSNIKPMNLIGVDRGENIPAVIALTDPEGCPLSRFKDSLGNPTHILRIGESYKEKQRTIQAKKEVEQRRAGGYSRKYASKAKNLADDMVRNTARDLLYYAVTQDAMLIFENLSRGFGRQGKRTFMAERQYTRMEDWLTAKLAYEGLPSKTYLSKTLAQYTSKTCSNCGFTITSADYDRVLEKLKKTATGWMTTINGKELKVEGQITYYNRYKRQNVVKDLSVELDRLSEESVNNDISSWTKGRSGEALSLLKKRFSHRPVQEKFVCLNCGFETHADEQAALNIARSWLFLRSQEYKKYQTNKTTGNTDKRAFVETWQSFYRKKLKEVWKPAV

SEQ ID NO: 48254 - protein, 978 aa, synthetic construct
  REGION 1..978: note = engineered CasX variant
QEIKRINKIRRRLVKDSNTKKAGKTGPMKTLLVRVMTPDLRERLENLRKKPENIPQPISNTSRANLNKLLTDYTEMKKAILHVYWEEFQKDPVGLMSRVAQPASKKIDQNKLKPEMDEKGNLTTAGFACSQCGQPLFVYKLEQVSEKGKAYTNYFGRCNVAEHEKLIKLAQLKPEKDSDEAVTYSLGKFGQRALDFYSIHVTKESTHPVKPLAQIAGNRYASGPVGKALSDACMGTIASFLSKYQDIIIEHQKVVKGNQKRLESLRELAGKENLEYPSVTLPPQPHTKEGVDAYNEVIARVRMWVNLNLWQKLKLSRDDAKPLLRLKKFPSFPLVERQANEVDWWDMVCNVKKLINEKKEDGKVFWQNLAGYKRQEALRPYLSSEEDREKGKKFARYQLGDLLLHLEKKHGEDWGKVYDEAWERIDKKVEGLSKHIKLEEERRSEDAQSKAALTDWLRAKASFVIEGLKEADKDEFCRCELKLQKWYGDLRGKPFAIEAENSILDISGFSKQYNCAFIWQKDGVKKLNLYLIINYFKGGKLRFKKIKPEAFEANRFYTVINKKSGEIVPMEVNFNFDDPNLIILPLAFGKRQGREFIWNDLLSLETGSLKLANGRVIEKTLYNRRTRQDEPALFVALTFERREVLDSSNIKPMNLIGVDRGENIPAVIALTDPEGCPLSRFKDSLGNPTHILRIGESYKEKQRTIQAKKEVEQRRAGGYSRKYASKAKNLADDMVRNTARDLLYYAVTQDAMLIFENLSRGFGRQGKRTFMAERQYTRMEDWLTAKLAYEGLPSKTYLSKTLAQYTSKTCSNCGFTITSADYDRVLEKLKKTATGWMTTINGKELKVEGQITYYNRYKRQNVVKDLSVELDRLSEESVNNDISSWTKGRSGEALSLLKKRFSHRPVQEKFVCLNCGFETHADEQAALNIARSWLFLRSQEYKKYQTNKTTGNTDKRAFVETWQSFYRKKLKEVWKPAV

SEQ ID NO: 48255 - protein, 977 aa, synthetic construct
  REGION 1..977: note = engineered CasX variant
QEIKRINKIRRRLVKDSNTKKAGKTGPMKTLLVRVMTPDLRERLENLRKKPENIPQPISNTSRANLNKLLTDYTEMKKAILHVYWEEFQKDPVGLMSRVAQPASKKIDQNKLKPEMDEKGNLTTAGFACSQCGQPLFVYKLEQVSEKGKAYTNYFGRCNVAEHEKLILLAQLKPEKDSDEAVTYSLGKFGQRALDFYSIHVTKESTHPVKPLAQIAGNRYASPVGKALSDACMGTIASFLSKYQDIIIEHQKVVKGNQKRLESLRELAGKENLEYPSVTLPPQPHTKEGVDAYNEVIARVRMWVNLNLWQKLKLSRDDAKPLLRLKKFPSFPLVERQANEVDWWDMVCNVKKLINEKKEDGKVFWQNLAGYKRQEALRPYLSSEEDREKGKKFARYQLGDLLLHLEKKHGEDWGKVYDEAWERIDKKVEGLSKHIKLEEERRSEDAQSKAALTDWLRAKASFVIEGLKEADKDEFCRCELKLQKWYGDLRGKPFAIEAENSILDISGFSKQYNCAFIWQKDGVKKLNLYLIINYFKGGKLRFKKIKPEAFEANRFYTVINKKSGEIVPMEVNFNFDDPNLIILPLAFGKRQGREFIWNDLLSLETGSLKLANGRVIEKTLYNRRTRQDEPALFVALTFERREVLDSSNIKPMNLIGVDRGENIPAVIALTDPEGCPLSRFKDSLGNPTHILRIGESYKEKQRTIQAKKEVEQRRAGGYSRKYASKAKNLADDMVRNTARDLLYYAVTQDAMLIFENLSRGFGRQGKRTFMAERQYTRMEDWLTAKLAYEGLPSKTYLSKTLAQYTSKTCSNCGFTITSADYDRVLEKLKKTATGWMTTINGKELKVEGQITYYNRYKRQNVVKDLSVELDRLSEESVNNDISSWTKGRSGEALSLLKKRFSHRPVQEKFVCLNCGFETHADEQAALNIARSWLFLRSQEYKKYQTNKTTGNTDKRAFVETWQSFYRKKLKEVWKPAV

SEQ ID NO: 48256 - protein, 978 aa, synthetic construct
  REGION 1..978: note = engineered CasX variant
QEIKRINKIRRRLVKDSNTKKAGKTGPMKTLLVRVMTPDLRERLENLRKKPENIPQPISNTSRANLNKLLTDYTEMKKAILHVYWEEFQKDPVGLMSRVAQPASKKIDQNKLKPEMDEKGNLTTAGFACSQCGQPLFVYKLEQVSEKGKAYTNYFGRCNVAEHEKLILLAQLKPEKDSDEAVTYSLGKFGQRALDFYSIHVTKESTHPVKPLAQIAGNRYASYPVGKALSDACMGTIASFLSKYQDIIIEHQKVVKGNQKRLESLRELAGKENLEYPSVTLPPQPHTKEGVDAYNEVIARVRMWVNLNLWQKLKLSRDDAKPLLRLKKFPSFPLVERQANEVDWWDMVCNVKKLINEKKEDGKVFWQNLAGYKRQEALRPYLSSEEDRKKGKKFARYQLGDLLLHLEKKHGEDWGKVYDEAWERIDKKVEGLSKHIKLEEERRSEDAQSKAALTDWLRAKASFVIEGLKEADKDEFCRCELKLQKWYGDLRGKPFAIEAENSILDISGFSKQYNCAFIWQKDGVKKLNLYLIINYFKGGKLRFKKIKPEAFEANRFYTVINKKSGEIVIMEVNFNFDDPNLIILPLAFGKRQGREFIWNDLLSLETGSLKLANGRVIEKTLYNRRTRQDEPALFVALTFERREVLDSSNIKPMNLIGVDRGENIPAVIALTDPEGCPLSRFKDSLGNPTHILRIGESYKEKQRTIQAKKEVEQRRAGGYSRKYASKAKNLADDMVRNTARDLLYYAVTQDAMLIFENLSRGFGRQGKRTFMAERQYTRMEDWLTAKLAYEGLPSKTYLSKTLAQYTSKTCSNCGFTITSADYDRVLEKLKKTATGWMTTINGKELKVEGQITYYNRYKRQNVVKDLSVELDRLSEESVNNDISSWTKGRSGEALSLLKKRFSHRPVQEKFVCLNCGFETHADEQAALNIARSWLFLRSQEYKKYQTNKTTGNTDKRAFVETWQSFYRKKLKEVWKPAV

SEQ ID NO: 48257 - protein, 978 aa, synthetic construct
  REGION 1..978: note = engineered CasX variant
QEIKRINKIRRRLVKDSNTKKAGKTGPMKTLLVRVMTPDLRERLENLRKKPENIPQPISNTSRANLNKLLTDYTEMKKAILHVYWEEFQKDPVGLMSRVAQPASKKIDQNKLKPEMDEKGNLTTAGFACSQCGQPLFVYKLEQVSEKGKAYTNYFGRCNVAEHEKLILLAQLKPEKDSDEAVTYSLGKFGQRALDFYSIHVTKESTHPVKPLAQIAGNRYASHPVGKALSDACMGTIASFLSKYQDIIIEHQKVVKGNQKRLESLRELAGKENLEYPSVTLPPQPHTKEGVDAYNEVIARVRMWVNLNLWQKLKLSRDDAKPLLRLKKFPSFPLVERQANEVDWWDMVCNVKKLINEKKEDGKVFWQNLAGYKRQEALRPYLSSEEDRKKGKKFARYQLGDLLLHLEKKHGEDWGKVYDEAWERIDKKVEGLSKHIKLEEERRSEDAQSKAALTDWLRAKASFVIEGLKEADKDEFCRCELKLQKWYGDLRGKPFAIEAENSILDISGFSKQYNCAFIWQKDGVKKLNLYLIINYFKGGKLRFKKIKPEAFEANRFYTVINKKSGEIVIMEVNFNFDDPNLIILPLAFGKRQGREFIWNDLLSLETGSLKLANGRVIEKTLYNRRTRQDEPALFVALTFERREVLDSSNIKPMNLIGVDRGENIPAVIALTDPEGCPLSRFKDSLGNPTHILRIGESYKEKQRTIQAKKEVEQRRAGGYSRKYASKAKNLADDMVRNTARDLLYYAVTQDAMLIFENLSRGFGRQGKRTFMAERQYTRMEDWLTAKLAYEGLPSKTYLSKTLAQYTSKTCSNCGFTITSADYDRVLEKLKKTATGWMTTINGKELKVEGQITYYNRYKRQNVVKDLSVELDRLSEESVNNDISSWTKGRSGEALSLLKKRFSHRPVQEKFVCLNCGFETHADEQAALNIARSWLFLRSQEYKKYQTNKTTGNTDKRAFVETWQSFYRKKLKEVWKPAV

SEQ ID NO: 48258 - protein, 978 aa, synthetic construct
  REGION 1..978: note = engineered CasX variant
QEIKRINKIRRRLVKDSNTKKAGKTGPMKTLLVRVMTPDLRERLENLRKKPENIPQPISNTSRANLNKLLTDYTEMKKAILHVYWEEFQKDPVGLMSRVAQPASKKIDQNKLKPEMDEKGNLTTAGFACSQCGQPLFVYKLEQVSEKGKAYTNYFGRCNVAEHEKLILLAQLKPEKDSDEAVTYSLGKFGQRALDFYSIHVTKESTHPVKPLAQIAGNRYASSPVGKALSDACMGTIASFLSKYQDIIIEHQKVVKGNQKRLESLRELAGKENLEYPSVTLPPQPHTKEGVDAYNEVIARVRMWVNLNLWQKLKLSRDDAKPLLRLKKFPSFPLVERQANEVDWWDMVCNVKKLINEKKEDGKVFWQNLAGYKRQEALRPYLSSEEDRKKGKKFARYQLGDLLLHLEKKHGEDWGKVYDEAWERIDKKVEGLSKHIKLEEERRSEDAQSKAALTDWLRAKASFVIEGLKEADKDEFCRCELKLQKWYGDLRGKPFAIEAENSILDISGFSKQYNCAFIWQKDGVKKLNLYLIINYFKGGKLRFKKIKPEAFEANRFYTVINKKSGEIVIMEVNFNFDDPNLIILPLAFGKRQGREFIWNDLLSLETGSLKLANGRVIEKTLYNRRTRQDEPALFVALTFERREVLDSSNIKPMNLIGVDRGENIPAVIALTDPEGCPLSRFKDSLGNPTHILRIGESYKEKQRTIQAKKEVEQRRAGGYSRKYASKAKNLADDMVRNTARDLLYYAVTQDAMLIFENLSRGFGRQGKRTFMAERQYTRMEDWLTAKLAYEGLPSKTYLSKTLAQYTSKTCSNCGFTITSADYDRVLEKLKKTATGWMTTINGKELKVEGQITYYNRYKRQNVVKDLSVELDRLSEESVNNDISSWTKGRSGEALSLLKKRFSHRPVQEKFVCLNCGFETHADEQAALNIARSWLFLRSQEYKKYQTNKTTGNTDKRAFVETWQSFYRKKLKEVWKPAV

SEQ ID NO: 48259 - protein, 978 aa, synthetic construct
  REGION 1..978: note = engineered CasX variant
QEIKRINKIRRRLVKDSNTKKAGKTGPMKTLLVRVMTPDLRERLENLRKKPENIPQPISNTSRANLNKLLTDYTEMKKAILHVYWEEFQKDPVGLMSRVAQPASKKIDQNKLKPEMDEKGNLTTAGFACSQCGQPLFVYKLEQVSEKGKAYTNYFGRCNVAEHEKLILLAQLKPEKDSDEAVTYSLGKFGQRALDFYSIHVTKESTHPVKPLAQIAGNRYASTPVGKALSDACMGTIASFLSKYQDIIIEHQKVVKGNQKRLESLRELAGKENLEYPSVTLPPQPHTKEGVDAYNEVIARVRMWVNLNLWQKLKLSRDDAKPLLRLKKFPSFPLVERQANEVDWWDMVCNVKKLINEKKEDGKVFWQNLAGYKRQEALRPYLSSEEDRKKGKKFARYQLGDLLLHLEKKHGEDWGKVYDEAWERIDKKVEGLSKHIKLEEERRSEDAQSKAALTDWLRAKASFVIEGLKEADKDEFCRCELKLQKWYGDLRGKPFAIEAENSILDISGFSKQYNCAFIWQKDGVKKLNLYLIINYFKGGKLRFKKIKPEAFEANRFYTVINKKSGEIVIMEVNFNFDDPNLIILPLAFGKRQGREFIWNDLLSLETGSLKLANGRVIEKTLYNRRTRQDEPALFVALTFERREVLDSSNIKPMNLIGVDRGENIPAVIALTDPEGCPLSRFKDSLGNPTHILRIGESYKEKQRTIQAKKEVEQRRAGGYSRKYASKAKNLADDMVRNTARDLLYYAVTQDAMLIFENLSRGFGRQGKRTFMAERQYTRMEDWLTAKLAYEGLPSKTYLSKTLAQYTSKTCSNCGFTITSADYDRVLEKLKKTATGWMTTINGKELKVEGQITYYNRYKRQNVVKDLSVELDRLSEESVNNDISSWTKGRSGEALSLLKKRFSHRPVQEKFVCLNCGFETHADEQAALNIARSWLFLRSQEYKKYQTNKTTGNTDKRAFVETWQSFYRKKLKEVWKPAV

SEQ ID NO: 48260 - protein, 978 aa, synthetic construct
  REGION 1..978: note = engineered CasX variant
QEIKRINKIRRRLVKDSNTKKAGKTGPMKTLLVRVMTPDLRERLENLRKKPENIPQPISNTSRANLNKLLTDYTEMKKAILHVYWEEFQKDPVGLMSRVAQPASKKIDQNKLKPEMDEKGNLTTAGFACSQCGQPLFVYKLEQVSEKGKAYTNYFGRCNVAEHEKLILLAQLKPEKDSDEAVTYSLGKFGQRALDFYSIHVTKESTHPVKPLAQIAGNRYASAPVGKALSDACMGTIASFLSKYQDIIIEHQKVVKGNQKRLESLRELAGKENLEYPSVTLPPQPHTKEGVDAYNEVIARVRMWVNLNLWQKLKLSRDDAKPLLRLKKFPSFPLVERQANEVDWWDMVCNVKKLINEKKEDGKVFWQNLAGYKRQEALRPYLSSEEDRKKGKKFARYQLGDLLLHLEKKHGEDWGKVYDEAWERIDKKVEGLSKHIKLEEERRSEDAQSKAALTDWLRAKASFVIEGLKEADKDEFCRCELKLQKWYGDLRGKPFAIEAENSILDISGFSKQYNCAFIWQKDGVKKLNLYLIINYFKGGKLRFKKIKPEAFEANRFYTVINKKSGEIVIMEVNFNFDDPNLIILPLAFGKRQGREFIWNDLLSLETGSLKLANGRVIEKTLYNRRTRQDEPALFVALTFERREVLDSSNIKPMNLIGVDRGENIPAVIALTDPEGCPLSRFKDSLGNPTHILRIGESYKEKQRTIQAKKEVEQRRAGGYSRKYASKAKNLADDMVRNTARDLLYYAVTQDAMLIFENLSRGFGRQGKRTFMAERQYTRMEDWLTAKLAYEGLPSKTYLSKTLAQYTSKTCSNCGFTITSADYDRVLEKLKKTATGWMTTINGKELKVEGQITYYNRYKRQNVVKDLSVELDRLSEESVNNDISSWTKGRSGEALSLLKKRFSHRPVQEKFVCLNCGFETHADEQAALNIARSWLFLRSQEYKKYQTNKTTGNTDKRAFVETWQSFYRKKLKEVWKPAV

SEQ ID NO: 48261 - protein, 978 aa, synthetic construct
  REGION 1..978: note = engineered CasX variant
QEIKRINKIRRRLVKDSNTKKAGKTGPMKTLLVRVMTPDLRERLENLRKKPENIPQPISNTSRANLNKLLTDYTEMKKAILHVYWEEFQKDPVGLMSRVAQPASKKIDQNKLKPEMDEKGNLTTAGFACSQCGQPLFVYKLEQVSEKGKAYTNYFGRCNVAEHEKLILLAQLKPEKDSDEAVTYSLGKFGQRALDFYSIHVTKESTHPVKPLAQIAGNRYASVPVGKALSDACMGTIASFLSKYQDIIIEHQKVVKGNQKRLESLRELAGKENLEYPSVTLPPQPHTKEGVDAYNEVIARVRMWVNLNLWQKLKLSRDDAKPLLRLKKFPSFPLVERQANEVDWWDMVCNVKKLINEKKEDGKVFWQNLAGYKRQEALRPYLSSEEDRKKGKKFARYQLGDLLLHLEKKHGEDWGKVYDEAWERIDKKVEGLSKHIKLEEERRSEDAQSKAALTDWLRAKASFVIEGLKEADKDEFCRCELKLQKWYGDLRGKPFAIEAENSILDISGFSKQYNCAFIWQKDGVKKLNLYLIINYFKGGKLRFKKIKPEAFEANRFYTVINKKSGEIVIMEVNFNFDDPNLIILPLAFGKRQGREFIWNDLLSLETGSLKLANGRVIEKTLYNRRTRQDEPALFVALTFERREVLDSSNIKPMNLIGVDRGENIPAVIALTDPEGCPLSRFKDSLGNPTHILRIGESYKEKQRTIQAKKEVEQRRAGGYSRKYASKAKNLADDMVRNTARDLLYYAVTQDAMLIFENLSRGFGRQGKRTFMAERQYTRMEDWLTAKLAYEGLPSKTYLSKTLAQYTSKTCSNCGFTITSADYDRVLEKLKKTATGWMTTINGKELKVEGQITYYNRYKRQNVVKDLSVELDRLSEESVNNDISSWTKGRSGEALSLLKKRFSHRPVQEKFVCLNCGFETHADEQAALNIARSWLFLRSQEYKKYQTNKTTGNTDKRAFVETWQSFYRKKLKEVWKPAV

SEQ ID NO: 48262 - protein, 978 aa, synthetic construct
  REGION 1..978: note = engineered CasX variant
QEIKRINKIRRRLVKDSNTKKAGKTGPMKTLLVRVMTPDLRERLENLRKKPENIPQPISNTSRANLNKLLTDYTEMKKAILHVYWEEFQKDPVGLMSRVAQPASKKIDQNKLKPEMDEKGNLTTAGFACSQCGQPLFVYKLEQVSEKGKAYTNYFGRCNVAEHEKLIKLAQLKPEKDSDEAVTYSLGKFGQRALDFYSIHVTKESTHPVKPLAQIAGNRYASGPVGKALSDACMGTIASFLSKYQDIIIEHQKVVKGNQKRLESLRELAGKENLEYPSVTLPPQPHTKEGVDAYNEVIARVRMWVNLNLWQKLKLSRDDAKPLLRLKKFPSFPLVERQANEVDWWDMVCNVKKLINEKKEDGKVFWQNLAGYKRQEALRPYLSSEEDRKKGKKFARYQLGDLLLHLEKKHGEDWGKVYDEAWERIDKKVEGLSKHIKLEEERRSEDAQSKAALTDWLRAKASFVIEGLKEADKDEFCRCELKLQKWYGDLRGKPFAIEAENSILDISGFSKQYNCAFIWQKDGVKKLNLYLIINYFKGGKLRFKKIKPEAFEANRFYTVINKKSGEIVIMEVNFNFDDPNLIILPLAFGKRQGREFIWNDLLSLETGSLKLANGRVIEKTLYNRRTRQDEPALFVALTFERREVLDSSNIKPMNLIGVDRGENIPAVIALTDPEGCPLSRFKDSLGNPTHILRIGESYKEKQRTIQAKKEVEQRRAGGYSRKYASKAKNLADDMVRNTARDLLYYAVTQDAMLIFENLSRGFGRQGKRTFMAERQYTRMEDWLTAKLAYEGLPSKTYLSKTLAQYTSKTCSNCGFTITSADYDRVLEKLKKTATGWMTTINGKELKVEGQITYYNRYKRQNVVKDLSVELDRLSEESVNNDISSWTKGRSGEALSLLKKRFSHRPVQEKFVCLNCGFETHADEQAALNIARSWLFLRSQEYKKYQTNKTTGNTDKRAFVETWQSFYRKKLKEVWKPAV

SEQ ID NO: 48263 - protein, 977 aa, synthetic construct
  REGION 1..977: note = engineered CasX variant
QEIKRINKIRRRLVKDSNTKKAGKTGPMKTLLVRVMTPDLRERLENLRKKPENIPQPISNTSRANLNKLLTDYTEMKKAILHVYWEEFQKDPVGLMSRVAQPASKKIDQNKLKPEMDEKGNLTTAGFACSQCGQPLFVYKLEQVSEKGKAYTNYFGRCNVAEHEKLILLAQLKPEKDSDEAVTYSLGKFGQRALDFYSIHVTKESTHPVKPLAQIAGNRYASPVGKALSDACMGTIASFLSKYQDIIIEHQKVVKGNQKRLESLRELAGKENLEYPSVTLPPQPHTKEGVDAYNEVIARVRMWVNLNLWQKLKLSRDDAKPLLRLKKFPSFPLVERQANEVDWWDMVCNVKKLINEKKEDGKVFWQNLAGYKRQEALRPYLSSEEDRKKGKKFARYQLGDLLLHLEKKHGEDWGKVYDEAWERIDKKVEGLSKHIKLEEERRSEDAQSKAALTDWLRAKASFVIEGLKEADKDEFCRCELKLQKWYGDLRGKPFAIEAENSILDISGFSKQYNCAFIWQKDGVKKLNLYLIINYFKGGKLRFKKIKPEAFEANRFYTVINKKSGEIVIMEVNFNFDDPNLIILPLAFGKRQGREFIWNDLLSLETGSLKLANGRVIEKTLYNRRTRQDEPALFVALTFERREVLDSSNIKPMNLIGVDRGENIPAVIALTDPEGCPLSRFKDSLGNPTHILRIGESYKEKQRTIQAKKEVEQRRAGGYSRKYASKAKNLADDMVRNTARDLLYYAVTQDAMLIFENLSRGFGRQGKRTFMAERQYTRMEDWLTAKLAYEGLPSKTYLSKTLAQYTSKTCSNCGFTITSADYDRVLEKLKKTATGWMTTINGKELKVEGQITYYNRYKRQNVVKDLSVELDRLSEESVNNDISSWTKGRSGEALSLLKKRFSHRPVQEKFVCLNCGFETHADEQAALNIARSWLFLRSQEYKKYQTNKTTGNTDKRAFVETWQSFYRKKLKEVWKPAV

SEQ ID NO: 48264 - protein, 978 aa, synthetic construct
  REGION 1..978: note = engineered CasX variant
QEIKRINKIRRRLVKDSNTKKAGKTGPMKTLLVRVMTPDLRERLENLRKKPENIPQPISNTSRANLNKLLTDYTEMKKAILHVYWEEFQKDPVGLMSRVAQPASKKIDQNKLKPEMDEKGNLTTAGFACSQCGQPLFVYKLEQVSEKGKAYTNYFGRCNVAEHEKLILLAQLKPEKDSDEAVTYSLGKFGQRALDFYSIHVTKESTHPVKPLAQIAGNRYASYPVGKALSGACMGTIASFLSKYQDIIIEHQKVVKGNQKRLESLRELAGKENLEYPSVTLPPQPHTKEGVDAYNEVIARVRMWVNLNLWQKLKLSRDDAKPLLRLKGFPSFPLVERQANEVDWWDMVCNVKKLINEKKEDGKVFWQNLAGYKRQEALRPYLSSEEDRKKGKKFARYQLGDLLLHLEKKHGEDWGKVYDEAWERIDKKVEGLSKHIKLEEERRSEDAQSKAALTDWLRAKASFVIEGLKEADKDEFCRCELKLQKWYGDLRGKPFAIEAENSILDISGFSKQYNCAFIWQKDGVKKLNLYLIINYFKGGKLRFKKIKPEAFEANRFYTVINKKSGEIVPMEVNFNFDDPNLIILPLAFGKRQGREFIWNDLLSLETGSLKLANGRVIEKTLYNRRTRQDEPALFVALTFERREVLDSSNIKPMNLIGVDRGENIPAVIALTDPEGCPLSRFKDSLGNPTHILRIGERYKEKQRTIQAKKEVEQRRAGGYSRKYASKAKNLADDMVRNTARDLLYYAVTQDAMLIFENLSRGFGRQGKRTFMAERQYTRMEDWLTAKLAYEGLPSKTYLSKTLAQYTSKTCSNCGFTITSADYDRVLEKLKKTATGWMTTINGKELKVEGQITYYNRYKRQNVVKDLSVELDRLSEESVNNDISSWTKGRSGEALSLLKKRFSHRPVQEKFVCLNCGFETHADEQAALNIARSWLFLRSQEYKKYQTNKTTGNTDKRAFVETWQSFYRKKLKEVWKPAV

SEQ ID NO: 48265 - protein, 978 aa, synthetic construct
  REGION 1..978: note = engineered CasX variant
QEIKRINKIRRRLVKDSNTKKAGKTGPMKTLLVRVMTPDLRERLENLRKKPENIPQPISNTSRANLNKLLTDYTEMKKAILHVYWEEFQKDPVGLMSRVAQPASKKIDQNKLKPEMDEKGNLTTAGFACSQCGQPLFVYKLEQVSEKGKAYTNYFGRCNVAEHEKLILLAQLKPEKDSDEAVTYSLGKFGQRALDFYSIHVTKESTHPVKPLAQIAGNRYASHPVGKALSGACMGTIASFLSKYQDIIIEHQKVVKGNQKRLESLRELAGKENLEYPSVTLPPQPHTKEGVDAYNEVIARVRMWVNLNLWQKLKLSRDDAKPLLRLKGFPSFPLVERQANEVDWWDMVCNVKKLINEKKEDGKVFWQNLAGYKRQEALRPYLSSEEDRKKGKKFARYQLGDLLLHLEKKHGEDWGKVYDEAWERIDKKVEGLSKHIKLEEERRSEDAQSKAALTDWLRAKASFVIEGLKEADKDEFCRCELKLQKWYGDLRGKPFAIEAENSILDISGFSKQYNCAFIWQKDGVKKLNLYLIINYFKGGKLRFKKIKPEAFEANRFYTVINKKSGEIVPMEVNFNFDDPNLIILPLAFGKRQGREFIWNDLLSLETGSLKLANGRVIEKTLYNRRTRQDEPALFVALTFERREVLDSSNIKPMNLIGVDRGENIPAVIALTDPEGCPLSRFKDSLGNPTHILRIGERYKEKQRTIQAKKEVEQRRAGGYSRKYASKAKNLADDMVRNTARDLLYYAVTQDAMLIFENLSRGFGRQGKRTFMAERQYTRMEDWLTAKLAYEGLPSKTYLSKTLAQYTSKTCSNCGFTITSADYDRVLEKLKKTATGWMTTINGKELKVEGQITYYNRYKRQNVVKDLSVELDRLSEESVNNDISSWTKGRSGEALSLLKKRFSHRPVQEKFVCLNCGFETHADEQAALNIARSWLFLRSQEYKKYQTNKTTGNTDKRAFVETWQSFYRKKLKEVWKPAV

SEQ ID NO: 48266 - protein, 978 aa, synthetic construct
  REGION 1..978: note = engineered CasX variant
QEIKRINKIRRRLVKDSNTKKAGKTGPMKTLLVRVMTPDLRERLENLRKKPENIPQPISNTSRANLNKLLTDYTEMKKAILHVYWEEFQKDPVGLMSRVAQPASKKIDQNKLKPEMDEKGNLTTAGFACSQCGQPLFVYKLEQVSEKGKAYTNYFGRCNVAEHEKLILLAQLKPEKDSDEAVTYSLGKFGQRALDFYSIHVTKESTHPVKPLAQIAGNRYASSPVGKALSGACMGTIASFLSKYQDIIIEHQKVVKGNQKRLESLRELAGKENLEYPSVTLPPQPHTKEGVDAYNEVIARVRMWVNLNLWQKLKLSRDDAKPLLRLKGFPSFPLVERQANEVDWWDMVCNVKKLINEKKEDGKVFWQNLAGYKRQEALRPYLSSEEDRKKGKKFARYQLGDLLLHLEKKHGEDWGKVYDEAWERIDKKVEGLSKHIKLEEERRSEDAQSKAALTDWLRAKASFVIEGLKEADKDEFCRCELKLQKWYGDLRGKPFAIEAENSILDISGFSKQYNCAFIWQKDGVKKLNLYLIINYFKGGKLRFKKIKPEAFEANRFYTVINKKSGEIVPMEVNFNFDDPNLIILPLAFGKRQGREFIWNDLLSLETGSLKLANGRVIEKTLYNRRTRQDEPALFVALTFERREVLDSSNIKPMNLIGVDRGENIPAVIALTDPEGCPLSRFKDSLGNPTHILRIGERYKEKQRTIQAKKEVEQRRAGGYSRKYASKAKNLADDMVRNTARDLLYYAVTQDAMLIFENLSRGFGRQGKRTFMAERQYTRMEDWLTAKLAYEGLPSKTYLSKTLAQYTSKTCSNCGFTITSADYDRVLEKLKKTATGWMTTINGKELKVEGQITYYNRYKRQNVVKDLSVELDRLSEESVNNDISSWTKGRSGEALSLLKKRFSHRPVQEKFVCLNCGFETHADEQAALNIARSWLFLRSQEYKKYQTNKTTGNTDKRAFVETWQSFYRKKLKEVWKPAV

SEQ ID NO: 48267 - protein, 978 aa, synthetic construct
  REGION 1..978: note = engineered CasX variant
QEIKRINKIRRRLVKDSNTKKAGKTGPMKTLLVRVMTPDLRERLENLRKKPENIPQPISNTSRANLNKLLTDYTEMKKAILHVYWEEFQKDPVGLMSRVAQPASKKIDQNKLKPEMDEKGNLTTAGFACSQCGQPLFVYKLEQVSEKGKAYTNYFGRCNVAEHEKLILLAQLKPEKDSDEAVTYSLGKFGQRALDFYSIHVTKESTHPVKPLAQIAGNRYASTPVGKALSGACMGTIASFLSKYQDIIIEHQKVVKGNQKRLESLRELAGKENLEYPSVTLPPQPHTKEGVDAYNEVIARVRMWVNLNLWQKLKLSRDDAKPLLRLKGFPSFPLVERQANEVDWWDMVCNVKKLINEKKEDGKVFWQNLAGYKRQEALRPYLSSEEDRKKGKKFARYQLGDLLLHLEKKHGEDWGKVYDEAWERIDKKVEGLSKHIKLEEERRSEDAQSKAALTDWLRAKASFVIEGLKEADKDEFCRCELKLQKWYGDLRGKPFAIEAENSILDISGFSKQYNCAFIWQKDGVKKLNLYLIINYFKGGKLRFKKIKPEAFEANRFYTVINKKSGEIVPMEVNFNFDDPNLIILPLAFGKRQGREFIWNDLLSLETGSLKLANGRVIEKTLYNRRTRQDEPALFVALTFERREVLDSSNIKPMNLIGVDRGENIPAVIALTDPEGCPLSRFKDSLGNPTHILRIGERYKEKQRTIQAKKEVEQRRAGGYSRKYASKAKNLADDMVRNTARDLLYYAVTQDAMLIFENLSRGFGRQGKRTFMAERQYTRMEDWLTAKLAYEGLPSKTYLSKTLAQYTSKTCSNCGFTITSADYDRVLEKLKKTATGWMTTINGKELKVEGQITYYNRYKRQNVVKDLSVELDRLSEESVNNDISSWTKGRSGEALSLLKKRFSHRPVQEKFVCLNCGFETHADEQAALNIARSWLFLRSQEYKKYQTNKTTGNTDKRAFVETWQSFYRKKLKEVWKPAV

SEQ ID NO: 48268 - protein, 978 aa, synthetic construct
  REGION 1..978: note = engineered CasX variant
QEIKRINKIRRRLVKDSNTKKAGKTGPMKTLLVRVMTPDLRERLENLRKKPENIPQPISNTSRANLNKLLTDYTEMKKAILHVYWEEFQKDPVGLMSRVAQPASKKIDQNKLKPEMDEKGNLTTAGFACSQCGQPLFVYKLEQVSEKGKAYTNYFGRCNVAEHEKLILLAQLKPEKDSDEAVTYSLGKFGQRALDFYSIHVTKESTHPVKPLAQIAGNRYASAPVGKALSGACMGTIASFLSKYQDIIIEHQKVVKGNQKRLESLRELAGKENLEYPSVTLPPQPHTKEGVDAYNEVIARVRMWVNLNLWQKLKLSRDDAKPLLRLKGFPSFPLVERQANEVDWWDMVCNVKKLINEKKEDGKVFWQNLAGYKRQEALRPYLSSEEDRKKGKKFARYQLGDLLLHLEKKHGEDWGKVYDEAWERIDKKVEGLSKHIKLEEERRSEDAQSKAALTDWLRAKASFVIEGLKEADKDEFCRCELKLQKWYGDLRGKPFAIEAENSILDISGFSKQYNCAFIWQKDGVKKLNLYLIINYFKGGKLRFKKIKPEAFEANRFYTVINKKSGEIVPMEVNFNFDDPNLIILPLAFGKRQGREFIWNDLLSLETGSLKLANGRVIEKTLYNRRTRQDEPALFVALTFERREVLDSSNIKPMNLIGVDRGENIPAVIALTDPEGCPLSRFKDSLGNPTHILRIGERYKEKQRTIQAKKEVEQRRAGGYSRKYASKAKNLADDMVRNTARDLLYYAVTQDAMLIFENLSRGFGRQGKRTFMAERQYTRMEDWLTAKLAYEGLPSKTYLSKTLAQYTSKTCSNCGFTITSADYDRVLEKLKKTATGWMTTINGKELKVEGQITYYNRYKRQNVVKDLSVELDRLSEESVNNDISSWTKGRSGEALSLLKKRFSHRPVQEKFVCLNCGFETHADEQAALNIARSWLFLRSQEYKKYQTNKTTGNTDKRAFVETWQSFYRKKLKEVWKPAV

SEQ ID NO: 48269 - protein, 978 aa, synthetic construct
  REGION 1..978: note = engineered CasX variant
QEIKRINKIRRRLVKDSNTKKAGKTGPMKTLLVRVMTPDLRERLENLRKKPENIPQPISNTSRANLNKLLTDYTEMKKAILHVYWEEFQKDPVGLMSRVAQPASKKIDQNKLKPEMDEKGNLTTAGFACSQCGQPLFVYKLEQVSEKGKAYTNYFGRCNVAEHEKLILLAQLKPEKDSDEAVTYSLGKFGQRALDFYSIHVTKESTHPVKPLAQIAGNRYASVPVGKALSGACMGTIASFLSKYQDIIIEHQKVVKGNQKRLESLRELAGKENLEYPSVTLPPQPHTKEGVDAYNEVIARVRMWVNLNLWQKLKLSRDDAKPLLRLKGFPSFPLVERQANEVDWWDMVCNVKKLINEKKEDGKVFWQNLAGYKRQEALRPYLSSEEDRKKGKKFARYQLGDLLLHLEKKHGEDWGKVYDEAWERIDKKVEGLSKHIKLEEERRSEDAQSKAALTDWLRAKASFVIEGLKEADKDEFCRCELKLQKWYGDLRGKPFAIEAENSILDISGFSKQYNCAFIWQKDGVKKLNLYLIINYFKGGKLRFKKIKPEAFEANRFYTVINKKSGEIVPMEVNFNFDDPNLIILPLAFGKRQGREFIWNDLLSLETGSLKLANGRVIEKTLYNRRTRQDEPALFVALTFERREVLDSSNIKPMNLIGVDRGENIPAVIALTDPEGCPLSRFKDSLGNPTHILRIGERYKEKQRTIQAKKEVEQRRAGGYSRKYASKAKNLADDMVRNTARDLLYYAVTQDAMLIFENLSRGFGRQGKRTFMAERQYTRMEDWLTAKLAYEGLPSKTYLSKTLAQYTSKTCSNCGFTITSADYDRVLEKLKKTATGWMTTINGKELKVEGQITYYNRYKRQNVVKDLSVELDRLSEESVNNDISSWTKGRSGEALSLLKKRFSHRPVQEKFVCLNCGFETHADEQAALNIARSWLFLRSQEYKKYQTNKTTGNTDKRAFVETWQSFYRKKLKEVWKPAV

SEQ ID NO: 48270 - protein, 978 aa, synthetic construct
  REGION 1..978: note = engineered CasX variant
QEIKRINKIRRRLVKDSNTKKAGKTGPMKTLLVRVMTPDLRERLENLRKKPENIPQPISNTSRANLNKLLTDYTEMKKAILHVYWEEFQKDPVGLMSRVAQPASKKIDQNKLKPEMDEKGNLTTAGFACSQCGQPLFVYKLEQVSEKGKAYTNYFGRCNVAEHEKLIKLAQLKPEKDSDEAVTYSLGKFGQRALDFYSIHVTKESTHPVKPLAQIAGNRYASGPVGKALSGACMGTIASFLSKYQDIIIEHQKVVKGNQKRLESLRELAGKENLEYPSVTLPPQPHTKEGVDAYNEVIARVRMWVNLNLWQKLKLSRDDAKPLLRLKGFPSFPLVERQANEVDWWDMVCNVKKLINEKKEDGKVFWQNLAGYKRQEALRPYLSSEEDRKKGKKFARYQLGDLLLHLEKKHGEDWGKVYDEAWERIDKKVEGLSKHIKLEEERRSEDAQSKAALTDWLRAKASFVIEGLKEADKDEFCRCELKLQKWYGDLRGKPFAIEAENSILDISGFSKQYNCAFIWQKDGVKKLNLYLIINYFKGGKLRFKKIKPEAFEANRFYTVINKKSGEIVPMEVNFNFDDPNLIILPLAFGKRQGREFIWNDLLSLETGSLKLANGRVIEKTLYNRRTRQDEPALFVALTFERREVLDSSNIKPMNLIGVDRGENIPAVIALTDPEGCPLSRFKDSLGNPTHILRIGERYKEKQRTIQAKKEVEQRRAGGYSRKYASKAKNLADDMVRNTARDLLYYAVTQDAMLIFENLSRGFGRQGKRTFMAERQYTRMEDWLTAKLAYEGLPSKTYLSKTLAQYTSKTCSNCGFTITSADYDRVLEKLKKTATGWMTTINGKELKVEGQITYYNRYKRQNVVKDLSVELDRLSEESVNNDISSWTKGRSGEALSLLKKRFSHRPVQEKFVCLNCGFETHADEQAALNIARSWLFLRSQEYKKYQTNKTTGNTDKRAFVETWQSFYRKKLKEVWKPAV

SEQ ID NO: 48271 - protein, 977 aa, synthetic construct
  REGION 1..977: note = engineered CasX variant
QEIKRINKIRRRLVKDSNTKKAGKTGPMKTLLVRVMTPDLRERLENLRKKPENIPQPISNTSRANLNKLLTDYTEMKKAILHVYWEEFQKDPVGLMSRVAQPASKKIDQNKLKPEMDEKGNLTTAGFACSQCGQPLFVYKLEQVSEKGKAYTNYFGRCNVAEHEKLILLAQLKPEKDSDEAVTYSLGKFGQRALDFYSIHVTKESTHPVKPLAQIAGNRYASPVGKALSGACMGTIASFLSKYQDIIIEHQKVVKGNQKRLESLRELAGKENLEYPSVTLPPQPHTKEGVDAYNEVIARVRMWVNLNLWQKLKLSRDDAKPLLRLKGFPSFPLVERQANEVDWWDMVCNVKKLINEKKEDGKVFWQNLAGYKRQEALRPYLSSEEDRKKGKKFARYQLGDLLLHLEKKHGEDWGKVYDEAWERIDKKVEGLSKHIKLEEERRSEDAQSKAALTDWLRAKASFVIEGLKEADKDEFCRCELKLQKWYGDLRGKPFAIEAENSILDISGFSKQYNCAFIWQKDGVKKLNLYLIINYFKGGKLRFKKIKPEAFEANRFYTVINKKSGEIVPMEVNFNFDDPNLIILPLAFGKRQGREFIWNDLLSLETGSLKLANGRVIEKTLYNRRTRQDEPALFVALTFERREVLDSSNIKPMNLIGVDRGENIPAVIALTDPEGCPLSRFKDSLGNPTHILRIGERYKEKQRTIQAKKEVEQRRAGGYSRKYASKAKNLADDMVRNTARDLLYYAVTQDAMLIFENLSRGFGRQGKRTFMAERQYTRMEDWLTAKLAYEGLPSKTYLSKTLAQYTSKTCSNCGFTITSADYDRVLEKLKKTATGWMTTINGKELKVEGQITYYNRYKRQNVVKDLSVELDRLSEESVNNDISSWTKGRSGEALSLLKKRFSHRPVQEKFVCLNCGFETHADEQAALNIARSWLFLRSQEYKKYQTNKTTGNTDKRAFVETWQSFYRKKLKEVWKPAV

SEQ ID NO: 48272 - protein, 978 aa, synthetic construct
  REGION 1..978: note = engineered CasX variant
QEIKRINKIRRRLVKDSNTKKAGKTGPMKTLLVRVMTPDLRERLENLRKKPENIPQPISNTSRANLNKLLTDYTEMKKAILHVYWEEFQKDPVGLMSRVAQPASKKIDQNKLKPEMDEKGNLTTAGFACSQCGQPLFVYKLEQVSEKGKAYTNYFGRCNVAEHEKLILLAQLKPEKDSDEAVTYSLGKFGQRALDFYSIHVTKESTHPVKPLAQIAGNRYASYPVGKALSDACMGTIASFLSKYQDIIIEHQKVVKGNQKRLESLRELAGKENLEYPSVTLPPQPHTKEGVDAYNEVIARVRMWVNLNLWQKLKLSRDDAKPLLRLKNFPSFPLVERQANEVDWWDMVCNVKKLINEKKEDGKVFWQNLAGYKRQEALRPYLSSEEDRKKGKKFARYQLGDLLLHLEKKHGEDWGKVYDEAWERIDKKVEGLSKHIKLEEERRSEDAQSKAALTDWLRAKASFVIEGLKEADKDEFCRCELKLQKWYGDLRGKPFAIEAENSILDISGFSKQYNCAFIWQKDGVKKLNLYLIINYFKGGKLRFKKIKPEAFEANRFYTVINKKSGEIVPMEVNFNFDDPNLIILPLAFGKRQGREFIWNDLLSLETGSLKLANGRVIEKTLYNRRTRQDEPALFVALTFERREVLDSSNIKPMNLIGVDRGENIPAVIALTDPEGCPLSRFKDSLGNPTHILRIGERYKEKQRTIQAKKEVEQRRAGGYSRKYASKAKNLADDMVRNTARDLLYYAVTQDAMLIFENLSRGFGRQGKRTFMAERQYTRMEDWLTAKLAYEGLPSKTYLSKTLAQYTSKTCSNCGFTITSADYDRVLEKLKKTATGWMTTINGKELKVEGQITYYNRYKRQNVVKDLSVELDRLSEESVNNDISSWTKGRSGEALSLLKKRFSHRPVQEKFVCLNCGFETHADEQAALNIARSWLFLRSQEYKKYQTNKTTGNTDKRAFVETWQSFYRKKLKEVWKPAV

SEQ ID NO: 48273 - protein, 978 aa, synthetic construct
  REGION 1..978: note = engineered CasX variant
QEIKRINKIRRRLVKDSNTKKAGKTGPMKTLLVRVMTPDLRERLENLRKKPENIPQPISNTSRANLNKLLTDYTEMKKAILHVYWEEFQKDPVGLMSRVAQPASKKIDQNKLKPEMDEKGNLTTAGFACSQCGQPLFVYKLEQVSEKGKAYTNYFGRCNVAEHEKLILLAQLKPEKDSDEAVTYSLGKFGQRALDFYSIHVTKESTHPVKPLAQIAGNRYASHPVGKALSDACMGTIASFLSKYQDIIIEHQKVVKGNQKRLESLRELAGKENLEYPSVTLPPQPHTKEGVDAYNEVIARVRMWVNLNLWQKLKLSRDDAKPLLRLKNFPSFPLVERQANEVDWWDMVCNVKKLINEKKEDGKVFWQNLAGYKRQEALRPYLSSEEDRKKGKKFARYQLGDLLLHLEKKHGEDWGKVYDEAWERIDKKVEGLSKHIKLEEERRSEDAQSKAALTDWLRAKASFVIEGLKEADKDEFCRCELKLQKWYGDLRGKPFAIEAENSILDISGFSKQYNCAFIWQKDGVKKLNLYLIINYFKGGKLRFKKIKPEAFEANRFYTVINKKSGEIVPMEVNFNFDDPNLIILPLAFGKRQGREFIWNDLLSLETGSLKLANGRVIEKTLYNRRTRQDEPALFVALTFERREVLDSSNIKPMNLIGVDRGENIPAVIALTDPEGCPLSRFKDSLGNPTHILRIGERYKEKQRTIQAKKEVEQRRAGGYSRKYASKAKNLADDMVRNTARDLLYYAVTQDAMLIFENLSRGFGRQGKRTFMAERQYTRMEDWLTAKLAYEGLPSKTYLSKTLAQYTSKTCSNCGFTITSADYDRVLEKLKKTATGWMTTINGKELKVEGQITYYNRYKRQNVVKDLSVELDRLSEESVNNDISSWTKGRSGEALSLLKKRFSHRPVQEKFVCLNCGFETHADEQAALNIARSWLFLRSQEYKKYQTNKTTGNTDKRAFVETWQSFYRKKLKEVWKPAV

SEQ ID NO: 48274 - protein, 978 aa, synthetic construct
  REGION 1..978: note = engineered CasX variant
QEIKRINKIRRRLVKDSNTKKAGKTGPMKTLLVRVMTPDLRERLENLRKKPENIPQPISNTSRANLNKLLTDYTEMKKAILHVYWEEFQKDPVGLMSRVAQPASKKIDQNKLKPEMDEKGNLTTAGFACSQCGQPLFVYKLEQVSEKGKAYTNYFGRCNVAEHEKLILLAQLKPEKDSDEAVTYSLGKFGQRALDFYSIHVTKESTHPVKPLAQIAGNRYASSPVGKALSDACMGTIASFLSKYQDIIIEHQKVVKGNQKRLESLRELAGKENLEYPSVTLPPQPHTKEGVDAYNEVIARVRMWVNLNLWQKLKLSRDDAKPLLRLKNFPSFPLVERQANEVDWWDMVCNVKKLINEKKEDGKVFWQNLAGYKRQEALRPYLSSEEDRKKGKKFARYQLGDLLLHLEKKHGEDWGKVYDEAWERIDKKVEGLSKHIKLEEERRSEDAQSKAALTDWLRAKASFVIEGLKEADKDEFCRCELKLQKWYGDLRGKPFAIEAENSILDISGFSKQYNCAFIWQKDGVKKLNLYLIINYFKGGKLRFKKIKPEAFEANRFYTVINKKSGEIVPMEVNFNFDDPNLIILPLAFGKRQGREFIWNDLLSLETGSLKLANGRVIEKTLYNRRTRQDEPALFVALTFERREVLDSSNIKPMNLIGVDRGENIPAVIALTDPEGCPLSRFKDSLGNPTHILRIGERYKEKQRTIQAKKEVEQRRAGGYSRKYASKAKNLADDMVRNTARDLLYYAVTQDAMLIFENLSRGFGRQGKRTFMAERQYTRMEDWLTAKLAYEGLPSKTYLSKTLAQYTSKTCSNCGFTITSADYDRVLEKLKKTATGWMTTINGKELKVEGQITYYNRYKRQNVVKDLSVELDRLSEESVNNDISSWTKGRSGEALSLLKKRFSHRPVQEKFVCLNCGFETHADEQAALNIARSWLFLRSQEYKKYQTNKTTGNTDKRAFVETWQSFYRKKLKEVWKPAV

SEQ ID NO: 48275 - protein, 978 aa, synthetic construct
  REGION 1..978: note = engineered CasX variant
QEIKRINKIRRRLVKDSNTKKAGKTGPMKTLLVRVMTPDLRERLENLRKKPENIPQPISNTSRANLNKLLTDYTEMKKAILHVYWEEFQKDPVGLMSRVAQPASKKIDQNKLKPEMDEKGNLTTAGFACSQCGQPLFVYKLEQVSEKGKAYTNYFGRCNVAEHEKLILLAQLKPEKDSDEAVTYSLGKFGQRALDFYSIHVTKESTHPVKPLAQIAGNRYASTPVGKALSDACMGTIASFLSKYQDIIIEHQKVVKGNQKRLESLRELAGKENLEYPSVTLPPQPHTKEGVDAYNEVIARVRMWVNLNLWQKLKLSRDDAKPLLRLKNFPSFPLVERQANEVDWWDMVCNVKKLINEKKEDGKVFWQNLAGYKRQEALRPYLSSEEDRKKGKKFARYQLGDLLLHLEKKHGEDWGKVYDEAWERIDKKVEGLSKHIKLEEERRSEDAQSKAALTDWLRAKASFVIEGLKEADKDEFCRCELKLQKWYGDLRGKPFAIEAENSILDISGFSKQYNCAFIWQKDGVKKLNLYLIINYFKGGKLRFKKIKPEAFEANRFYTVINKKSGEIVPMEVNFNFDDPNLIILPLAFGKRQGREFIWNDLLSLETGSLKLANGRVIEKTLYNRRTRQDEPALFVALTFERREVLDSSNIKPMNLIGVDRGENIPAVIALTDPEGCPLSRFKDSLGNPTHILRIGERYKEKQRTIQAKKEVEQRRAGGYSRKYASKAKNLADDMVRNTARDLLYYAVTQDAMLIFENLSRGFGRQGKRTFMAERQYTRMEDWLTAKLAYEGLPSKTYLSKTLAQYTSKTCSNCGFTITSADYDRVLEKLKKTATGWMTTINGKELKVEGQITYYNRYKRQNVVKDLSVELDRLSEESVNNDISSWTKGRSGEALSLLKKRFSHRPVQEKFVCLNCGFETHADEQAALNIARSWLFLRSQEYKKYQTNKTTGNTDKRAFVETWQSFYRKKLKEVWKPAV

SEQ ID NO: 48276 - protein, 978 aa, synthetic construct
  REGION 1..978: note = engineered CasX variant
QEIKRINKIRRRLVKDSNTKKAGKTGPMKTLLVRVMTPDLRERLENLRKKPENIPQPISNTSRANLNKLLTDYTEMKKAILHVYWEEFQKDPVGLMSRVAQPASKKIDQNKLKPEMDEKGNLTTAGFACSQCGQPLFVYKLEQVSEKGKAYTNYFGRCNVAEHEKLILLAQLKPEKDSDEAVTYSLGKFGQRALDFYSIHVTKESTHPVKPLAQIAGNRYASAPVGKALSDACMGTIASFLSKYQDIIIEHQKVVKGNQKRLESLRELAGKENLEYPSVTLPPQPHTKEGVDAYNEVIARVRMWVNLNLWQKLKLSRDDAKPLLRLKNFPSFPLVERQANEVDWWDMVCNVKKLINEKKEDGKVFWQNLAGYKRQEALRPYLSSEEDRKKGKKFARYQLGDLLLHLEKKHGEDWGKVYDEAWERIDKKVEGLSKHIKLEEERRSEDAQSKAALTDWLRAKASFVIEGLKEADKDEFCRCELKLQKWYGDLRGKPFAIEAENSILDISGFSKQYNCAFIWQKDGVKKLNLYLIINYFKGGKLRFKKIKPEAFEANRFYTVINKKSGEIVPMEVNFNFDDPNLIILPLAFGKRQGREFIWNDLLSLETGSLKLANGRVIEKTLYNRRTRQDEPALFVALTFERREVLDSSNIKPMNLIGVDRGENIPAVIALTDPEGCPLSRFKDSLGNPTHILRIGERYKEKQRTIQAKKEVEQRRAGGYSRKYASKAKNLADDMVRNTARDLLYYAVTQDAMLIFENLSRGFGRQGKRTFMAERQYTRMEDWLTAKLAYEGLPSKTYLSKTLAQYTSKTCSNCGFTITSADYDRVLEKLKKTATGWMTTINGKELKVEGQITYYNRYKRQNVVKDLSVELDRLSEESVNNDISSWTKGRSGEALSLLKKRFSHRPVQEKFVCLNCGFETHADEQAALNIARSWLFLRSQEYKKYQTNKTTGNTDKRAFVETWQSFYRKKLKEVWKPAV

SEQ ID NO: 48277 - protein, 978 aa, synthetic construct
  REGION 1..978: note = engineered CasX variant
QEIKRINKIRRRLVKDSNTKKAGKTGPMKTLLVRVMTPDLRERLENLRKKPENIPQPISNTSRANLNKLLTDYTEMKKAILHVYWEEFQKDPVGLMSRVAQPASKKIDQNKLKPEMDEKGNLTTAGFACSQCGQPLFVYKLEQVSEKGKAYTNYFGRCNVAEHEKLILLAQLKPEKDSDEAVTYSLGKFGQRALDFYSIHVTKESTHPVKPLAQIAGNRYASVPVGKALSDACMGTIASFLSKYQDIIIEHQKVVKGNQKRLESLRELAGKENLEYPSVTLPPQPHTKEGVDAYNEVIARVRMWVNLNLWQKLKLSRDDAKPLLRLKNFPSFPLVERQANEVDWWDMVCNVKKLINEKKEDGKVFWQNLAGYKRQEALRPYLSSEEDRKKGKKFARYQLGDLLLHLEKKHGEDWGKVYDEAWERIDKKVEGLSKHIKLEEERRSEDAQSKAALTDWLRAKASFVIEGLKEADKDEFCRCELKLQKWYGDLRGKPFAIEAENSILDISGFSKQYNCAFIWQKDGVKKLNLYLIINYFKGGKLRFKKIKPEAFEANRFYTVINKKSGEIVPMEVNFNFDDPNLIILPLAFGKRQGREFIWNDLLSLETGSLKLANGRVIEKTLYNRRTRQDEPALFVALTFERREVLDSSNIKPMNLIGVDRGENIPAVIALTDPEGCPLSRFKDSLGNPTHILRIGERYKEKQRTIQAKKEVEQRRAGGYSRKYASKAKNLADDMVRNTARDLLYYAVTQDAMLIFENLSRGFGRQGKRTFMAERQYTRMEDWLTAKLAYEGLPSKTYLSKTLAQYTSKTCSNCGFTITSADYDRVLEKLKKTATGWMTTINGKELKVEGQITYYNRYKRQNVVKDLSVELDRLSEESVNNDISSWTKGRSGEALSLLKKRFSHRPVQEKFVCLNCGFETHADEQAALNIARSWLFLRSQEYKKYQTNKTTGNTDKRAFVETWQSFYRKKLKEVWKPAV

SEQ ID NO: 48278 - protein, 978 aa, synthetic construct
  REGION 1..978: note = engineered CasX variant
QEIKRINKIRRRLVKDSNTKKAGKTGPMKTLLVRVMTPDLRERLENLRKKPENIPQPISNTSRANLNKLLTDYTEMKKAILHVYWEEFQKDPVGLMSRVAQPASKKIDQNKLKPEMDEKGNLTTAGFACSQCGQPLFVYKLEQVSEKGKAYTNYFGRCNVAEHEKLIKLAQLKPEKDSDEAVTYSLGKFGQRALDFYSIHVTKESTHPVKPLAQIAGNRYASGPVGKALSDACMGTIASFLSKYQDIIIEHQKVVKGNQKRLESLRELAGKENLEYPSVTLPPQPHTKEGVDAYNEVIARVRMWVNLNLWQKLKLSRDDAKPLLRLKNFPSFPLVERQANEVDWWDMVCNVKKLINEKKEDGKVFWQNLAGYKRQEALRPYLSSEEDRKKGKKFARYQLGDLLLHLEKKHGEDWGKVYDEAWERIDKKVEGLSKHIKLEEERRSEDAQSKAALTDWLRAKASFVIEGLKEADKDEFCRCELKLQKWYGDLRGKPFAIEAENSILDISGFSKQYNCAFIWQKDGVKKLNLYLIINYFKGGKLRFKKIKPEAFEANRFYTVINKKSGEIVPMEVNFNFDDPNLIILPLAFGKRQGREFIWNDLLSLETGSLKLANGRVIEKTLYNRRTRQDEPALFVALTFERREVLDSSNIKPMNLIGVDRGENIPAVIALTDPEGCPLSRFKDSLGNPTHILRIGERYKEKQRTIQAKKEVEQRRAGGYSRKYASKAKNLADDMVRNTARDLLYYAVTQDAMLIFENLSRGFGRQGKRTFMAERQYTRMEDWLTAKLAYEGLPSKTYLSKTLAQYTSKTCSNCGFTITSADYDRVLEKLKKTATGWMTTINGKELKVEGQITYYNRYKRQNVVKDLSVELDRLSEESVNNDISSWTKGRSGEALSLLKKRFSHRPVQEKFVCLNCGFETHADEQAALNIARSWLFLRSQEYKKYQTNKTTGNTDKRAFVETWQSFYRKKLKEVWKPAV

SEQ ID NO: 48279 - protein, 977 aa, synthetic construct
  REGION 1..977: note = engineered CasX variant
QEIKRINKIRRRLVKDSNTKKAGKTGPMKTLLVRVMTPDLRERLENLRKKPENIPQPISNTSRANLNKLLTDYTEMKKAILHVYWEEFQKDPVGLMSRVAQPASKKIDQNKLKPEMDEKGNLTTAGFACSQCGQPLFVYKLEQVSEKGKAYTNYFGRCNVAEHEKLILLAQLKPEKDSDEAVTYSLGKFGQRALDFYSIHVTKESTHPVKPLAQIAGNRYASPVGKALSDACMGTIASFLSKYQDIIIEHQKVVKGNQKRLESLRELAGKENLEYPSVTLPPQPHTKEGVDAYNEVIARVRMWVNLNLWQKLKLSRDDAKPLLRLKNFPSFPLVERQANEVDWWDMVCNVKKLINEKKEDGKVFWQNLAGYKRQEALRPYLSSEEDRKKGKKFARYQLGDLLLHLEKKHGEDWGKVYDEAWERIDKKVEGLSKHIKLEEERRSEDAQSKAALTDWLRAKASFVIEGLKEADKDEFCRCELKLQKWYGDLRGKPFAIEAENSILDISGFSKQYNCAFIWQKDGVKKLNLYLIINYFKGGKLRFKKIKPEAFEANRFYTVINKKSGEIVPMEVNFNFDDPNLIILPLAFGKRQGREFIWNDLLSLETGSLKLANGRVIEKTLYNRRTRQDEPALFVALTFERREVLDSSNIKPMNLIGVDRGENIPAVIALTDPEGCPLSRFKDSLGNPTHILRIGERYKEKQRTIQAKKEVEQRRAGGYSRKYASKAKNLADDMVRNTARDLLYYAVTQDAMLIFENLSRGFGRQGKRTFMAERQYTRMEDWLTAKLAYEGLPSKTYLSKTLAQYTSKTCSNCGFTITSADYDRVLEKLKKTATGWMTTINGKELKVEGQITYYNRYKRQNVVKDLSVELDRLSEESVNNDISSWTKGRSGEALSLLKKRFSHRPVQEKFVCLNCGFETHADEQAALNIARSWLFLRSQEYKKYQTNKTTGNTDKRAFVETWQSFYRKKLKEVWKPAV

SEQ ID NO: 48280 - protein, 978 aa, synthetic construct
  REGION 1..978: note = engineered CasX variant
QEIKRINKIRRRLVKDSNTKKAGKTGPMKTLLVRVMTPDLRERLENLRKKPENIPQPISNTSRANLNKLLTDYTEMKKAILHVYWEEFQKDPVGLMSRVAQPASKKIDQNKLKPEMDEKGNLTTAGFACSQCGQPLFVYKLEQVSEKGKAYTNYFGRCNVAEHEKLILLAQLKPEKDSDEAVTYSLGKFGQRALDFYSIHVTKESTHPVKPLAQIAGNRYASYPVGKALSDACMGTIASFLSKYQDIIIEHQKVVKGNQKRLESLRELAGKENLEYPSVTLPPQPHTKEGVDAYNEVIARVRMWVNLNLWQKLKLSRDDAKPLLRLKGFPSFPLVERQANEVDWWDMVCNVKKLINEKKEDGKVFWQNLAGYKRQEALRPYLSSEEDRKKGKKFARYQLGDLLNHLEKKHGEDWGKVYDEAWERIDKKVEGLSKHIKLEEERRSEDAQSKAALTDWLRAKASFVIEGLKEADKDEFCRCELKLQKWYGDLRGKPFAIEAENSILDISGFSKQYNCAFIWQKDGVKKLNLYLIINYFKGGKLRFKKIKPEAFEANRFYTVINKKSGEIVPMEVNFNFDDPNLIILPLAFGKRQGREFIWNDLLSLETGSLKLANGRVIEKTLYNRRTRQDEPALFVALTFERREVLDSSNIKPMNLIGVDRGENIPAVIALTDPEGCPLSRFKDSLGNPTHILRIGERYKEKQRTIQAKKEVEQRRAGGYSRKYASKAKNLADDMVRNTARDLLYYAVTQDAMLIFENLSRGFGRQGKRTFMAERQYTRMEDWLTAKLAYEGLPSKTYLSKTLAQYTSKTCSNCGFTITSADYDRVLEKLKKTATGWMTTINGKELKVEGQITYYNRYKRQNVVKDLSVELDRLSEESVNNDISSWTKGRSGEALSLLKKRFSHRPVQEKFVCLNCGFETHADEQAALNIARSWLFLRSQEYKKYQTNKTTGNTDKRAFVETWQSFYRKKLKEVWKPAV

SEQ ID NO: 48281 - protein, 978 aa, synthetic construct
  REGION 1..978: note = engineered CasX variant
QEIKRINKIRRRLVKDSNTKKAGKTGPMKTLLVRVMTPDLRERLENLRKKPENIPQPISNTSRANLNKLLTDYTEMKKAILHVYWEEFQKDPVGLMSRVAQPASKKIDQNKLKPEMDEKGNLTTAGFACSQCGQPLFVYKLEQVSEKGKAYTNYFGRCNVAEHEKLILLAQLKPEKDSDEAVTYSLGKFGQRALDFYSIHVTKESTHPVKPLAQIAGNRYASHPVGKALSDACMGTIASFLSKYQDIIIEHQKVVKGNQKRLESLRELAGKENLEYPSVTLPPQPHTKEGVDAYNEVIARVRMWVNLNLWQKLKLSRDDAKPLLRLKGFPSFPLVERQANEVDWWDMVCNVKKLINEKKEDGKVFWQNLAGYKRQEALRPYLSSEEDRKKGKKFARYQLGDLLNHLEKKHGEDWGKVYDEAWERIDKKVEGLSKHIKLEEERRSEDAQSKAALTDWLRAKASFVIEGLKEADKDEFCRCELKLQKWYGDLRGKPFAIEAENSILDISGFSKQYNCAFIWQKDGVKKLNLYLIINYFKGGKLRFKKIKPEAFEANRFYTVINKKSGEIVPMEVNFNFDDPNLIILPLAFGKRQGREFIWNDLLSLETGSLKLANGRVIEKTLYNRRTRQDEPALFVALTFERREVLDSSNIKPMNLIGVDRGENIPAVIALTDPEGCPLSRFKDSLGNPTHILRIGERYKEKQRTIQAKKEVEQRRAGGYSRKYASKAKNLADDMVRNTARDLLYYAVTQDAMLIFENLSRGFGRQGKRTFMAERQYTRMEDWLTAKLAYEGLPSKTYLSKTLAQYTSKTCSNCGFTITSADYDRVLEKLKKTATGWMTTINGKELKVEGQITYYNRYKRQNVVKDLSVELDRLSEESVNNDISSWTKGRSGEALSLLKKRFSHRPVQEKFVCLNCGFETHADEQAALNIARSWLFLRSQEYKKYQTNKTTGNTDKRAFVETWQSFYRKKLKEVWKPAV

SEQ ID NO: 48282 - protein, 978 aa, synthetic construct
  REGION 1..978: note = engineered CasX variant
QEIKRINKIRRRLVKDSNTKKAGKTGPMKTLLVRVMTPDLRERLENLRKKPENIPQPISNTSRANLNKLLTDYTEMKKAILHVYWEEFQKDPVGLMSRVAQPASKKIDQNKLKPEMDEKGNLTTAGFACSQCGQPLFVYKLEQVSEKGKAYTNYFGRCNVAEHEKLILLAQLKPEKDSDEAVTYSLGKFGQRALDFYSIHVTKESTHPVKPLAQIAGNRYASSPVGKALSDACMGTIASFLSKYQDIIIEHQKVVKGNQKRLESLRELAGKENLEYPSVTLPPQPHTKEGVDAYNEVIARVRMWVNLNLWQKLKLSRDDAKPLLRLKGFPSFPLVERQANEVDWWDMVCNVKKLINEKKEDGKVFWQNLAGYKRQEALRPYLSSEEDRKKGKKFARYQLGDLLNHLEKKHGEDWGKVYDEAWERIDKKVEGLSKHIKLEEERRSEDAQSKAALTDWLRAKASFVIEGLKEADKDEFCRCELKLQKWYGDLRGKPFAIEAENSILDISGFSKQYNCAFIWQKDGVKKLNLYLIINYFKGGKLRFKKIKPEAFEANRFYTVINKKSGEIVPMEVNFNFDDPNLIILPLAFGKRQGREFIWNDLLSLETGSLKLANGRVIEKTLYNRRTRQDEPALFVALTFERREVLDSSNIKPMNLIGVDRGENIPAVIALTDPEGCPLSRFKDSLGNPTHILRIGERYKEKQRTIQAKKEVEQRRAGGYSRKYASKAKNLADDMVRNTARDLLYYAVTQDAMLIFENLSRGFGRQGKRTFMAERQYTRMEDWLTAKLAYEGLPSKTYLSKTLAQYTSKTCSNCGFTITSADYDRVLEKLKKTATGWMTTINGKELKVEGQITYYNRYKRQNVVKDLSVELDRLSEESVNNDISSWTKGRSGEALSLLKKRFSHRPVQEKFVCLNCGFETHADEQAALNIARSWLFLRSQEYKKYQTNKTTGNTDKRAFVETWQSFYRKKLKEVWKPAV

SEQ ID NO: 48283 - protein, 978 aa, synthetic construct
  REGION 1..978: note = engineered CasX variant
QEIKRINKIRRRLVKDSNTKKAGKTGPMKTLLVRVMTPDLRERLENLRKKPENIPQPISNTSRANLNKLLTDYTEMKKAILHVYWEEFQKDPVGLMSRVAQPASKKIDQNKLKPEMDEKGNLTTAGFACSQCGQPLFVYKLEQVSEKGKAYTNYFGRCNVAEHEKLILLAQLKPEKDSDEAVTYSLGKFGQRALDFYSIHVTKESTHPVKPLAQIAGNRYASTPVGKALSDACMGTIASFLSKYQDIIIEHQKVVKGNQKRLESLRELAGKENLEYPSVTLPPQPHTKEGVDAYNEVIARVRMWVNLNLWQKLKLSRDDAKPLLRLKGFPSFPLVERQANEVDWWDMVCNVKKLINEKKEDGKVFWQNLAGYKRQEALRPYLSSEEDRKKGKKFARYQLGDLLNHLEKKHGEDWGKVYDEAWERIDKKVEGLSKHIKLEEERRSEDAQSKAALTDWLRAKASFVIEGLKEADKDEFCRCELKLQKWYGDLRGKPFAIEAENSILDISGFSKQYNCAFIWQKDGVKKLNLYLIINYFKGGKLRFKKIKPEAFEANRFYTVINKKSGEIVPMEVNFNFDDPNLIILPLAFGKRQGREFIWNDLLSLETGSLKLANGRVIEKTLYNRRTRQDEPALFVALTFERREVLDSSNIKPMNLIGVDRGENIPAVIALTDPEGCPLSRFKDSLGNPTHILRIGERYKEKQRTIQAKKEVEQRRAGGYSRKYASKAKNLADDMVRNTARDLLYYAVTQDAMLIFENLSRGFGRQGKRTFMAERQYTRMEDWLTAKLAYEGLPSKTYLSKTLAQYTSKTCSNCGFTITSADYDRVLEKLKKTATGWMTTINGKELKVEGQITYYNRYKRQNVVKDLSVELDRLSEESVNNDISSWTKGRSGEALSLLKKRFSHRPVQEKFVCLNCGFETHADEQAALNIARSWLFLRSQEYKKYQTNKTTGNTDKRAFVETWQSFYRKKLKEVWKPAV

SEQ ID NO: 48284 - protein, 978 aa, synthetic construct
  REGION 1..978: note = engineered CasX variant
QEIKRINKIRRRLVKDSNTKKAGKTGPMKTLLVRVMTPDLRERLENLRKKPENIPQPISNTSRANLNKLLTDYTEMKKAILHVYWEEFQKDPVGLMSRVAQPASKKIDQNKLKPEMDEKGNLTTAGFACSQCGQPLFVYKLEQVSEKGKAYTNYFGRCNVAEHEKLILLAQLKPEKDSDEAVTYSLGKFGQRALDFYSIHVTKESTHPVKPLAQIAGNRYASAPVGKALSDACMGTIASFLSKYQDIIIEHQKVVKGNQKRLESLRELAGKENLEYPSVTLPPQPHTKEGVDAYNEVIARVRMWVNLNLWQKLKLSRDDAKPLLRLKGFPSFPLVERQANEVDWWDMVCNVKKLINEKKEDGKVFWQNLAGYKRQEALRPYLSSEEDRKKGKKFARYQLGDLLNHLEKKHGEDWGKVYDEAWERIDKKVEGLSKHIKLEEERRSEDAQSKAALTDWLRAKASFVIEGLKEADKDEFCRCELKLQKWYGDLRGKPFAIEAENSILDISGFSKQYNCAFIWQKDGVKKLNLYLIINYFKGGKLRFKKIKPEAFEANRFYTVINKKSGEIVPMEVNFNFDDPNLIILPLAFGKRQGREFIWNDLLSLETGSLKLANGRVIEKTLYNRRTRQDEPALFVALTFERREVLDSSNIKPMNLIGVDRGENIPAVIALTDPEGCPLSRFKDSLGNPTHILRIGERYKEKQRTIQAKKEVEQRRAGGYSRKYASKAKNLADDMVRNTARDLLYYAVTQDAMLIFENLSRGFGRQGKRTFMAERQYTRMEDWLTAKLAYEGLPSKTYLSKTLAQYTSKTCSNCGFTITSADYDRVLEKLKKTATGWMTTINGKELKVEGQITYYNRYKRQNVVKDLSVELDRLSEESVNNDISSWTKGRSGEALSLLKKRFSHRPVQEKFVCLNCGFETHADEQAALNIARSWLFLRSQEYKKYQTNKTTGNTDKRAFVETWQSFYRKKLKEVWKPAV

SEQ ID NO: 48285 - protein, 978 aa, synthetic construct
  REGION 1..978: note = engineered CasX variant
QEIKRINKIRRRLVKDSNTKKAGKTGPMKTLLVRVMTPDLRERLENLRKKPENIPQPISNTSRANLNKLLTDYTEMKKAILHVYWEEFQKDPVGLMSRVAQPASKKIDQNKLKPEMDEKGNLTTAGFACSQCGQPLFVYKLEQVSEKGKAYTNYFGRCNVAEHEKLILLAQLKPEKDSDEAVTYSLGKFGQRALDFYSIHVTKESTHPVKPLAQIAGNRYASVPVGKALSDACMGTIASFLSKYQDIIIEHQKVVKGNQKRLESLRELAGKENLEYPSVTLPPQPHTKEGVDAYNEVIARVRMWVNLNLWQKLKLSRDDAKPLLRLKGFPSFPLVERQANEVDWWDMVCNVKKLINEKKEDGKVFWQNLAGYKRQEALRPYLSSEEDRKKGKKFARYQLGDLLNHLEKKHGEDWGKVYDEAWERIDKKVEGLSKHIKLEEERRSEDAQSKAALTDWLRAKASFVIEGLKEADKDEFCRCELKLQKWYGDLRGKPFAIEAENSILDISGFSKQYNCAFIWQKDGVKKLNLYLIINYFKGGKLRFKKIKPEAFEANRFYTVINKKSGEIVPMEVNFNFDDPNLIILPLAFGKRQGREFIWNDLLSLETGSLKLANGRVIEKTLYNRRTRQDEPALFVALTFERREVLDSSNIKPMNLIGVDRGENIPAVIALTDPEGCPLSRFKDSLGNPTHILRIGERYKEKQRTIQAKKEVEQRRAGGYSRKYASKAKNLADDMVRNTARDLLYYAVTQDAMLIFENLSRGFGRQGKRTFMAERQYTRMEDWLTAKLAYEGLPSKTYLSKTLAQYTSKTCSNCGFTITSADYDRVLEKLKKTATGWMTTINGKELKVEGQITYYNRYKRQNVVKDLSVELDRLSEESVNNDISSWTKGRSGEALSLLKKRFSHRPVQEKFVCLNCGFETHADEQAALNIARSWLFLRSQEYKKYQTNKTTGNTDKRAFVETWQSFYRKKLKEVWKPAV

SEQ ID NO: 48286 - protein, 978 aa, synthetic construct
  REGION 1..978: note = engineered CasX variant
QEIKRINKIRRRLVKDSNTKKAGKTGPMKTLLVRVMTPDLRERLENLRKKPENIPQPISNTSRANLNKLLTDYTEMKKAILHVYWEEFQKDPVGLMSRVAQPASKKIDQNKLKPEMDEKGNLTTAGFACSQCGQPLFVYKLEQVSEKGKAYTNYFGRCNVAEHEKLIKLAQLKPEKDSDEAVTYSLGKFGQRALDFYSIHVTKESTHPVKPLAQIAGNRYASGPVGKALSDACMGTIASFLSKYQDIIIEHQKVVKGNQKRLESLRELAGKENLEYPSVTLPPQPHTKEGVDAYNEVIARVRMWVNLNLWQKLKLSRDDAKPLLRLKGFPSFPLVERQANEVDWWDMVCNVKKLINEKKEDGKVFWQNLAGYKRQEALRPYLSSEEDRKKGKKFARYQLGDLLNHLEKKHGEDWGKVYDEAWERIDKKVEGLSKHIKLEEERRSEDAQSKAALTDWLRAKASFVIEGLKEADKDEFCRCELKLQKWYGDLRGKPFAIEAENSILDISGFSKQYNCAFIWQKDGVKKLNLYLIINYFKGGKLRFKKIKPEAFEANRFYTVINKKSGEIVPMEVNFNFDDPNLIILPLAFGKRQGREFIWNDLLSLETGSLKLANGRVIEKTLYNRRTRQDEPALFVALTFERREVLDSSNIKPMNLIGVDRGENIPAVIALTDPEGCPLSRFKDSLGNPTHILRIGERYKEKQRTIQAKKEVEQRRAGGYSRKYASKAKNLADDMVRNTARDLLYYAVTQDAMLIFENLSRGFGRQGKRTFMAERQYTRMEDWLTAKLAYEGLPSKTYLSKTLAQYTSKTCSNCGFTITSADYDRVLEKLKKTATGWMTTINGKELKVEGQITYYNRYKRQNVVKDLSVELDRLSEESVNNDISSWTKGRSGEALSLLKKRFSHRPVQEKFVCLNCGFETHADEQAALNIARSWLFLRSQEYKKYQTNKTTGNTDKRAFVETWQSFYRKKLKEVWKPAV

SEQ ID NO: 48287 - protein, 977 aa, synthetic construct
  REGION 1..977: note = engineered CasX variant
QEIKRINKIRRRLVKDSNTKKAGKTGPMKTLLVRVMTPDLRERLENLRKKPENIPQPISNTSRANLNKLLTDYTEMKKAILHVYWEEFQKDPVGLMSRVAQPASKKIDQNKLKPEMDEKGNLTTAGFACSQCGQPLFVYKLEQVSEKGKAYTNYFGRCNVAEHEKLILLAQLKPEKDSDEAVTYSLGKFGQRALDFYSIHVTKESTHPVKPLAQIAGNRYASPVGKALSDACMGTIASFLSKYQDIIIEHQKVVKGNQKRLESLRELAGKENLEYPSVTLPPQPHTKEGVDAYNEVIARVRMWVNLNLWQKLKLSRDDAKPLLRLKGFPSFPLVERQANEVDWWDMVCNVKKLINEKKEDGKVFWQNLAGYKRQEALRPYLSSEEDRKKGKKFARYQLGDLLNHLEKKHGEDWGKVYDEAWERIDKKVEGLSKHIKLEEERRSEDAQSKAALTDWLRAKASFVIEGLKEADKDEFCRCELKLQKWYGDLRGKPFAIEAENSILDISGFSKQYNCAFIWQKDGVKKLNLYLIINYFKGGKLRFKKIKPEAFEANRFYTVINKKSGEIVPMEVNFNFDDPNLIILPLAFGKRQGREFIWNDLLSLETGSLKLANGRVIEKTLYNRRTRQDEPALFVALTFERREVLDSSNIKPMNLIGVDRGENIPAVIALTDPEGCPLSRFKDSLGNPTHILRIGERYKEKQRTIQAKKEVEQRRAGGYSRKYASKAKNLADDMVRNTARDLLYYAVTQDAMLIFENLSRGFGRQGKRTFMAERQYTRMEDWLTAKLAYEGLPSKTYLSKTLAQYTSKTCSNCGFTITSADYDRVLEKLKKTATGWMTTINGKELKVEGQITYYNRYKRQNVVKDLSVELDRLSEESVNNDISSWTKGRSGEALSLLKKRFSHRPVQEKFVCLNCGFETHADEQAALNIARSWLFLRSQEYKKYQTNKTTGNTDKRAFVETWQSFYRKKLKEVWKPAV

SEQ ID NO: 48288 - protein, 978 aa, synthetic construct
  REGION 1..978: note = engineered CasX variant
QEIKRINKIRRRLVKDSNTKKAGKTGPMKTLLVRVMTPDLRERLENLRKKPENIPQPISNTSRANLNKLLTDYTEMKKAILHVYWEEFQKDPVGLMSRVAQPASKKIDQNKLKPEMDEKGNLTTAGFACSQCGQPLFVYKLEQVSEKGKAYTNYFGRCNVAEHEKLILLAQLKPEKDSDEAVTYSLGKFGQRALDFYSIHVTKESTHPVKPLAQIAGNRYASYPVGKALSDACMGTIASFLSKYQDIIIEHQKVVKGNQKRLESLRELAGKENLEYPSVTLPPQPHTKEGVDAYNEVIARVRMWVNLNLWQKLKLSRDDAKPLLRLKGFPSFPLVERQANEVDWWDMVCNVKKLINEKKEDGKVFWQNLAGYKRQEALRPYLSSEEDRKKGKKFARYQLGDLLWHLEKKHGEDWGKVYDEAWERIDKKVEGLSKHIKLEEERRSEDAQSKAALTDWLRAKASFVIEGLKEADKDEFCRCELKLQKWYGDLRGKPFAIEAENSILDISGFSKQYNCAFIWQKDGVKKLNLYLIINYFKGGKLRFKKIKPEAFEANRFYTVINKKSGEIVPMEVNFNFDDPNLIILPLAFGKRQGREFIWNDLLSLETGSLKLANGRVIEKTLYNRRTRQDEPALFVALTFERREVLDSSNIKPMNLIGVDRGENIPAVIALTDPEGCPLSRFKDSLGNPTHILRIGERYKEKQRTIQAKKEVEQRRAGGYSRKYASKAKNLADDMVRNTARDLLYYAVTQDAMLIFENLSRGFGRQGKRTFMAERQYTRMEDWLTAKLAYEGLPSKTYLSKTLAQYTSKTCSNCGFTITSADYDRVLEKLKKTATGWMTTINGKELKVEGQITYYNRYKRQNVVKDLSVELDRLSEESVNNDISSWTKGRSGEALSLLKKRFSHRPVQEKFVCLNCGFETHADEQAALNIARSWLFLRSQEYKKYQTNKTTGNTDKRAFVETWQSFYRKKLKEVWKPAV

SEQ ID NO: 48289 - protein, 978 aa, synthetic construct
  REGION 1..978: note = engineered CasX variant
QEIKRINKIRRRLVKDSNTKKAGKTGPMKTLLVRVMTPDLRERLENLRKKPENIPQPISNTSRANLNKLLTDYTEMKKAILHVYWEEFQKDPVGLMSRVAQPASKKIDQNKLKPEMDEKGNLTTAGFACSQCGQPLFVYKLEQVSEKGKAYTNYFGRCNVAEHEKLILLAQLKPEKDSDEAVTYSLGKFGQRALDFYSIHVTKESTHPVKPLAQIAGNRYASHPVGKALSDACMGTIASFLSKYQDIIIEHQKVVKGNQKRLESLRELAGKENLEYPSVTLPPQPHTKEGVDAYNEVIARVRMWVNLNLWQKLKLSRDDAKPLLRLKGFPSFPLVERQANEVDWWDMVCNVKKLINEKKEDGKVFWQNLAGYKRQEALRPYLSSEEDRKKGKKFARYQLGDLLWHLEKKHGEDWGKVYDEAWERIDKKVEGLSKHIKLEEERRSEDAQSKAALTDWLRAKASFVIEGLKEADKDEFCRCELKLQKWYGDLRGKPFAIEAENSILDISGFSKQYNCAFIWQKDGVKKLNLYLIINYFKGGKLRFKKIKPEAFEANRFYTVINKKSGEIVPMEVNFNFDDPNLIILPLAFGKRQGREFIWNDLLSLETGSLKLANGRVIEKTLYNRRTRQDEPALFVALTFERREVLDSSNIKPMNLIGVDRGENIPAVIALTDPEGCPLSRFKDSLGNPTHILRIGERYKEKQRTIQAKKEVEQRRAGGYSRKYASKAKNLADDMVRNTARDLLYYAVTQDAMLIFENLSRGFGRQGKRTFMAERQYTRMEDWLTAKLAYEGLPSKTYLSKTLAQYTSKTCSNCGFTITSADYDRVLEKLKKTATGWMTTINGKELKVEGQITYYNRYKRQNVVKDLSVELDRLSEESVNNDISSWTKGRSGEALSLLKKRFSHRPVQEKFVCLNCGFETHADEQAALNIARSWLFLRSQEYKKYQTNKTTGNTDKRAFVETWQSFYRKKLKEVWKPAV

SEQ ID NO: 48290 - protein, 978 aa, synthetic construct
  REGION 1..978: note = engineered CasX variant
QEIKRINKIRRRLVKDSNTKKAGKTGPMKTLLVRVMTPDLRERLENLRKKPENIPQPISNTSRANLNKLLTDYTEMKKAILHVYWEEFQKDPVGLMSRVAQPASKKIDQNKLKPEMDEKGNLTTAGFACSQCGQPLFVYKLEQVSEKGKAYTNYFGRCNVAEHEKLILLAQLKPEKDSDEAVTYSLGKFGQRALDFYSIHVTKESTHPVKPLAQIAGNRYASSPVGKALSDACMGTIASFLSKYQDIIIEHQKVVKGNQKRLESLRELAGKENLEYPSVTLPPQPHTKEGVDAYNEVIARVRMWVNLNLWQKLKLSRDDAKPLLRLKGFPSFPLVERQANEVDWWDMVCNVKKLINEKKEDGKVFWQNLAGYKRQEALRPYLSSEEDRKKGKKFARYQLGDLLWHLEKKHGEDWGKVYDEAWERIDKKVEGLSKHIKLEEERRSEDAQSKAALTDWLRAKASFVIEGLKEADKDEFCRCELKLQKWYGDLRGKPFAIEAENSILDISGFSKQYNCAFIWQKDGVKKLNLYLIINYFKGGKLRFKKIKPEAFEANRFYTVINKKSGEIVPMEVNFNFDDPNLIILPLAFGKRQGREFIWNDLLSLETGSLKLANGRVIEKTLYNRRTRQDEPALFVALTFERREVLDSSNIKPMNLIGVDRGENIPAVIALTDPEGCPLSRFKDSLGNPTHILRIGERYKEKQRTIQAKKEVEQRRAGGYSRKYASKAKNLADDMVRNTARDLLYYAVTQDAMLIFENLSRGFGRQGKRTFMAERQYTRMEDWLTAKLAYEGLPSKTYLSKTLAQYTSKTCSNCGFTITSADYDRVLEKLKKTATGWMTTINGKELKVEGQITYYNRYKRQNVVKDLSVELDRLSEESVNNDISSWTKGRSGEALSLLKKRFSHRPVQEKFVCLNCGFETHADEQAALNIARSWLFLRSQEYKKYQTNKTTGNTDKRAFVETWQSFYRKKLKEVWKPAV

SEQ ID NO: 48291 - protein, 978 aa, synthetic construct
  REGION 1..978: note = engineered CasX variant
QEIKRINKIRRRLVKDSNTKKAGKTGPMKTLLVRVMTPDLRERLENLRKKPENIPQPISNTSRANLNKLLTDYTEMKKAILHVYWEEFQKDPVGLMSRVAQPASKKIDQNKLKPEMDEKGNLTTAGFACSQCGQPLFVYKLEQVSEKGKAYTNYFGRCNVAEHEKLILLAQLKPEKDSDEAVTYSLGKFGQRALDFYSIHVTKESTHPVKPLAQIAGNRYASTPVGKALSDACMGTIASFLSKYQDIIIEHQKVVKGNQKRLESLRELAGKENLEYPSVTLPPQPHTKEGVDAYNEVIARVRMWVNLNLWQKLKLSRDDAKPLLRLKGFPSFPLVERQANEVDWWDMVCNVKKLINEKKEDGKVFWQNLAGYKRQEALRPYLSSEEDRKKGKKFARYQLGDLLWHLEKKHGEDWGKVYDEAWERIDKKVEGLSKHIKLEEERRSEDAQSKAALTDWLRAKASFVIEGLKEADKDEFCRCELKLQKWYGDLRGKPFAIEAENSILDISGFSKQYNCAFIWQKDGVKKLNLYLIINYFKGGKLRFKKIKPEAFEANRFYTVINKKSGEIVPMEVNFNFDDPNLIILPLAFGKRQGREFIWNDLLSLETGSLKLANGRVIEKTLYNRRTRQDEPALFVALTFERREVLDSSNIKPMNLIGVDRGENIPAVIALTDPEGCPLSRFKDSLGNPTHILRIGERYKEKQRTIQAKKEVEQRRAGGYSRKYASKAKNLADDMVRNTARDLLYYAVTQDAMLIFENLSRGFGRQGKRTFMAERQYTRMEDWLTAKLAYEGLPSKTYLSKTLAQYTSKTCSNCGFTITSADYDRVLEKLKKTATGWMTTINGKELKVEGQITYYNRYKRQNVVKDLSVELDRLSEESVNNDISSWTKGRSGEALSLLKKRFSHRPVQEKFVCLNCGFETHADEQAALNIARSWLFLRSQEYKKYQTNKTTGNTDKRAFVETWQSFYRKKLKEVWKPAV

SEQ ID NO: 48292 - protein, 978 aa, synthetic construct
  REGION 1..978: note = engineered CasX variant
QEIKRINKIRRRLVKDSNTKKAGKTGPMKTLLVRVMTPDLRERLENLRKKPENIPQPISNTSRANLNKLLTDYTEMKKAILHVYWEEFQKDPVGLMSRVAQPASKKIDQNKLKPEMDEKGNLTTAGFACSQCGQPLFVYKLEQVSEKGKAYTNYFGRCNVAEHEKLILLAQLKPEKDSDEAVTYSLGKFGQRALDFYSIHVTKESTHPVKPLAQIAGNRYASAPVGKALSDACMGTIASFLSKYQDIIIEHQKVVKGNQKRLESLRELAGKENLEYPSVTLPPQPHTKEGVDAYNEVIARVRMWVNLNLWQKLKLSRDDAKPLLRLKGFPSFPLVERQANEVDWWDMVCNVKKLINEKKEDGKVFWQNLAGYKRQEALRPYLSSEEDRKKGKKFARYQLGDLLWHLEKKHGEDWGKVYDEAWERIDKKVEGLSKHIKLEEERRSEDAQSKAALTDWLRAKASFVIEGLKEADKDEFCRCELKLQKWYGDLRGKPFAIEAENSILDISGFSKQYNCAFIWQKDGVKKLNLYLIINYFKGGKLRFKKIKPEAFEANRFYTVINKKSGEIVPMEVNFNFDDPNLIILPLAFGKRQGREFIWNDLLSLETGSLKLANGRVIEKTLYNRRTRQDEPALFVALTFERREVLDSSNIKPMNLIGVDRGENIPAVIALTDPEGCPLSRFKDSLGNPTHILRIGERYKEKQRTIQAKKEVEQRRAGGYSRKYASKAKNLADDMVRNTARDLLYYAVTQDAMLIFENLSRGFGRQGKRTFMAERQYTRMEDWLTAKLAYEGLPSKTYLSKTLAQYTSKTCSNCGFTITSADYDRVLEKLKKTATGWMTTINGKELKVEGQITYYNRYKRQNVVKDLSVELDRLSEESVNNDISSWTKGRSGEALSLLKKRFSHRPVQEKFVCLNCGFETHADEQAALNIARSWLFLRSQEYKKYQTNKTTGNTDKRAFVETWQSFYRKKLKEVWKPAV

SEQ ID NO: 48293 - protein, 978 aa, synthetic construct
  REGION 1..978: note = engineered CasX variant
QEIKRINKIRRRLVKDSNTKKAGKTGPMKTLLVRVMTPDLRERLENLRKKPENIPQPISNTSRANLNKLLTDYTEMKKAILHVYWEEFQKDPVGLMSRVAQPASKKIDQNKLKPEMDEKGNLTTAGFACSQCGQPLFVYKLEQVSEKGKAYTNYFGRCNVAEHEKLILLAQLKPEKDSDEAVTYSLGKFGQRALDFYSIHVTKESTHPVKPLAQIAGNRYASVPVGKALSDACMGTIASFLSKYQDIIIEHQKVVKGNQKRLESLRELAGKENLEYPSVTLPPQPHTKEGVDAYNEVIARVRMWVNLNLWQKLKLSRDDAKPLLRLKGFPSFPLVERQANEVDWWDMVCNVKKLINEKKEDGKVFWQNLAGYKRQEALRPYLSSEEDRKKGKKFARYQLGDLLWHLEKKHGEDWGKVYDEAWERIDKKVEGLSKHIKLEEERRSEDAQSKAALTDWLRAKASFVIEGLKEADKDEFCRCELKLQKWYGDLRGKPFAIEAENSILDISGFSKQYNCAFIWQKDGVKKLNLYLIINYFKGGKLRFKKIKPEAFEANRFYTVINKKSGEIVPMEVNFNFDDPNLIILPLAFGKRQGREFIWNDLLSLETGSLKLANGRVIEKTLYNRRTRQDEPALFVALTFERREVLDSSNIKPMNLIGVDRGENIPAVIALTDPEGCPLSRFKDSLGNPTHILRIGERYKEKQRTIQAKKEVEQRRAGGYSRKYASKAKNLADDMVRNTARDLLYYAVTQDAMLIFENLSRGFGRQGKRTFMAERQYTRMEDWLTAKLAYEGLPSKTYLSKTLAQYTSKTCSNCGFTITSADYDRVLEKLKKTATGWMTTINGKELKVEGQITYYNRYKRQNVVKDLSVELDRLSEESVNNDISSWTKGRSGEALSLLKKRFSHRPVQEKFVCLNCGFETHADEQAALNIARSWLFLRSQEYKKYQTNKTTGNTDKRAFVETWQSFYRKKLKEVWKPAV

SEQ ID NO: 48294 - protein, 978 aa, synthetic construct
  REGION 1..978: note = engineered CasX variant
QEIKRINKIRRRLVKDSNTKKAGKTGPMKTLLVRVMTPDLRERLENLRKKPENIPQPISNTSRANLNKLLTDYTEMKKAILHVYWEEFQKDPVGLMSRVAQPASKKIDQNKLKPEMDEKGNLTTAGFACSQCGQPLFVYKLEQVSEKGKAYTNYFGRCNVAEHEKLIKLAQLKPEKDSDEAVTYSLGKFGQRALDFYSIHVTKESTHPVKPLAQIAGNRYASGPVGKALSDACMGTIASFLSKYQDIIIEHQKVVKGNQKRLESLRELAGKENLEYPSVTLPPQPHTKEGVDAYNEVIARVRMWVNLNLWQKLKLSRDDAKPLLRLKGFPSFPLVERQANEVDWWDMVCNVKKLINEKKEDGKVFWQNLAGYKRQEALRPYLSSEEDRKKGKKFARYQLGDLLWHLEKKHGEDWGKVYDEAWERIDKKVEGLSKHIKLEEERRSEDAQSKAALTDWLRAKASFVIEGLKEADKDEFCRCELKLQKWYGDLRGKPFAIEAENSILDISGFSKQYNCAFIWQKDGVKKLNLYLIINYFKGGKLRFKKIKPEAFEANRFYTVINKKSGEIVPMEVNFNFDDPNLIILPLAFGKRQGREFIWNDLLSLETGSLKLANGRVIEKTLYNRRTRQDEPALFVALTFERREVLDSSNIKPMNLIGVDRGENIPAVIALTDPEGCPLSRFKDSLGNPTHILRIGERYKEKQRTIQAKKEVEQRRAGGYSRKYASKAKNLADDMVRNTARDLLYYAVTQDAMLIFENLSRGFGRQGKRTFMAERQYTRMEDWLTAKLAYEGLPSKTYLSKTLAQYTSKTCSNCGFTITSADYDRVLEKLKKTATGWMTTINGKELKVEGQITYYNRYKRQNVVKDLSVELDRLSEESVNNDISSWTKGRSGEALSLLKKRFSHRPVQEKFVCLNCGFETHADEQAALNIARSWLFLRSQEYKKYQTNKTTGNTDKRAFVETWQSFYRKKLKEVWKPAV

SEQ ID NO: 48295 - protein, 977 aa, synthetic construct
  REGION 1..977: note = engineered CasX variant
QEIKRINKIRRRLVKDSNTKKAGKTGPMKTLLVRVMTPDLRERLENLRKKPENIPQPISNTSRANLNKLLTDYTEMKKAILHVYWEEFQKDPVGLMSRVAQPASKKIDQNKLKPEMDEKGNLTTAGFACSQCGQPLFVYKLEQVSEKGKAYTNYFGRCNVAEHEKLILLAQLKPEKDSDEAVTYSLGKFGQRALDFYSIHVTKESTHPVKPLAQIAGNRYASPVGKALSDACMGTIASFLSKYQDIIIEHQKVVKGNQKRLESLRELAGKENLEYPSVTLPPQPHTKEGVDAYNEVIARVRMWVNLNLWQKLKLSRDDAKPLLRLKGFPSFPLVERQANEVDWWDMVCNVKKLINEKKEDGKVFWQNLAGYKRQEALRPYLSSEEDRKKGKKFARYQLGDLLWHLEKKHGEDWGKVYDEAWERIDKKVEGLSKHIKLEEERRSEDAQSKAALTDWLRAKASFVIEGLKEADKDEFCRCELKLQKWYGDLRGKPFAIEAENSILDISGFSKQYNCAFIWQKDGVKKLNLYLIINYFKGGKLRFKKIKPEAFEANRFYTVINKKSGEIVPMEVNFNFDDPNLIILPLAFGKRQGREFIWNDLLSLETGSLKLANGRVIEKTLYNRRTRQDEPALFVALTFERREVLDSSNIKPMNLIGVDRGENIPAVIALTDPEGCPLSRFKDSLGNPTHILRIGERYKEKQRTIQAKKEVEQRRAGGYSRKYASKAKNLADDMVRNTARDLLYYAVTQDAMLIFENLSRGFGRQGKRTFMAERQYTRMEDWLTAKLAYEGLPSKTYLSKTLAQYTSKTCSNCGFTITSADYDRVLEKLKKTATGWMTTINGKELKVEGQITYYNRYKRQNVVKDLSVELDRLSEESVNNDISSWTKGRSGEALSLLKKRFSHRPVQEKFVCLNCGFETHADEQAALNIARSWLFLRSQEYKKYQTNKTTGNTDKRAFVETWQSFYRKKLKEVWKPAV

SEQ ID NO: 48296 - protein, 978 aa, synthetic construct
  REGION 1..978: note = engineered CasX variant
QEIKRINKIRRRLVKDSNTKKAGKTGPMKTLLVRVMTPDLRERLENLRKKPENIPQPISNTSRANLNKLLTDYTEMKKAILHVYWEEFQKDPVGLMSRVAQPASKKIDQNKLKPEMDEKGNLTTAGFACSQCGQPLFVYKLEQVSEKGKAYTNYFGRCNVAEHEKLILLAQLKPEKDSDEAVTYSLGKFGQRALDFYSIHVTKESTHPVKPLAQIAGNRYASYPVGKALSDACMGTIASFLSKYQDIIIEHQKVVKGNQKRLESLRELAGKENLEYPSVTLPPQPHTKEGVDAYNEVIARVRMWVNLNLWQKLKLSRDDAKPLLRLKGFPSFPLVERQANEVDWWDMVCNVKKLINEKKEDGKVFWQNLAGYKRQEALRPYLSSEEDRKKGKKFARYQLGDLLLHLYKKHGEDWGKVYDEAWERIDKKVEGLSKHIKLEEERRSEDAQSKAALTDWLRAKASFVIEGLKEADKDEFCRCELKLQKWYGDLRGKPFAIEAENSILDISGFSKQYNCAFIWQKDGVKKLNLYLIINYFKGGKLRFKKIKPEAFEANRFYTVINKKSGEIVPMEVNFNFDDPNLIILPLAFGKRQGREFIWNDLLSLETGSLKLANGRVIEKTLYNRRTRQDEPALFVALTFERREVLDSSNIKPMNLIGVDRGENIPAVIALTDPEGCPLSRFKDSLGNPTHILRIGERYKEKQRTIQAKKEVEQRRAGGYSRKYASKAKNLADDMVRNTARDLLYYAVTQDAMLIFENLSRGFGRQGKRTFMAERQYTRMEDWLTAKLAYEGLPSKTYLSKTLAQYTSKTCSNCGFTITSADYDRVLEKLKKTATGWMTTINGKELKVEGQITYYNRYKRQNVVKDLSVELDRLSEESVNNDISSWTKGRSGEALSLLKKRFSHRPVQEKFVCLNCGFETHADEQAALNIARSWLFLRSQEYKKYQTNKTTGNTDKRAFVETWQSFYRKKLKEVWKPAV

SEQ ID NO: 48297 - protein, 978 aa, synthetic construct
  REGION 1..978: note = engineered CasX variant
QEIKRINKIRRRLVKDSNTKKAGKTGPMKTLLVRVMTPDLRERLENLRKKPENIPQPISNTSRANLNKLLTDYTEMKKAILHVYWEEFQKDPVGLMSRVAQPASKKIDQNKLKPEMDEKGNLTTAGFACSQCGQPLFVYKLEQVSEKGKAYTNYFGRCNVAEHEKLILLAQLKPEKDSDEAVTYSLGKFGQRALDFYSIHVTKESTHPVKPLAQIAGNRYASHPVGKALSDACMGTIASFLSKYQDIIIEHQKVVKGNQKRLESLRELAGKENLEYPSVTLPPQPHTKEGVDAYNEVIARVRMWVNLNLWQKLKLSRDDAKPLLRLKGFPSFPLVERQANEVDWWDMVCNVKKLINEKKEDGKVFWQNLAGYKRQEALRPYLSSEEDRKKGKKFARYQLGDLLLHLYKKHGEDWGKVYDEAWERIDKKVEGLSKHIKLEEERRSEDAQSKAALTDWLRAKASFVIEGLKEADKDEFCRCELKLQKWYGDLRGKPFAIEAENSILDISGFSKQYNCAFIWQKDGVKKLNLYLIINYFKGGKLRFKKIKPEAFEANRFYTVINKKSGEIVPMEVNFNFDDPNLIILPLAFGKRQGREFIWNDLLSLETGSLKLANGRVIEKTLYNRRTRQDEPALFVALTFERREVLDSSNIKPMNLIGVDRGENIPAVIALTDPEGCPLSRFKDSLGNPTHILRIGERYKEKQRTIQAKKEVEQRRAGGYSRKYASKAKNLADDMVRNTARDLLYYAVTQDAMLIFENLSRGFGRQGKRTFMAERQYTRMEDWLTAKLAYEGLPSKTYLSKTLAQYTSKTCSNCGFTITSADYDRVLEKLKKTATGWMTTINGKELKVEGQITYYNRYKRQNVVKDLSVELDRLSEESVNNDISSWTKGRSGEALSLLKKRFSHRPVQEKFVCLNCGFETHADEQAALNIARSWLFLRSQEYKKYQTNKTTGNTDKRAFVETWQSFYRKKLKEVWKPAV

SEQ ID NO: 48298 - protein, 978 aa, synthetic construct
  REGION 1..978: note = engineered CasX variant
QEIKRINKIRRRLVKDSNTKKAGKTGPMKTLLVRVMTPDLRERLENLRKKPENIPQPISNTSRANLNKLLTDYTEMKKAILHVYWEEFQKDPVGLMSRVAQPASKKIDQNKLKPEMDEKGNLTTAGFACSQCGQPLFVYKLEQVSEKGKAYTNYFGRCNVAEHEKLILLAQLKPEKDSDEAVTYSLGKFGQRALDFYSIHVTKESTHPVKPLAQIAGNRYASSPVGKALSDACMGTIASFLSKYQDIIIEHQKVVKGNQKRLESLRELAGKENLEYPSVTLPPQPHTKEGVDAYNEVIARVRMWVNLNLWQKLKLSRDDAKPLLRLKGFPSFPLVERQANEVDWWDMVCNVKKLINEKKEDGKVFWQNLAGYKRQEALRPYLSSEEDRKKGKKFARYQLGDLLLHLYKKHGEDWGKVYDEAWERIDKKVEGLSKHIKLEEERRSEDAQSKAALTDWLRAKASFVIEGLKEADKDEFCRCELKLQKWYGDLRGKPFAIEAENSILDISGFSKQYNCAFIWQKDGVKKLNLYLIINYFKGGKLRFKKIKPEAFEANRFYTVINKKSGEIVPMEVNFNFDDPNLIILPLAFGKRQGREFIWNDLLSLETGSLKLANGRVIEKTLYNRRTRQDEPALFVALTFERREVLDSSNIKPMNLIGVDRGENIPAVIALTDPEGCPLSRFKDSLGNPTHILRIGERYKEKQRTIQAKKEVEQRRAGGYSRKYASKAKNLADDMVRNTARDLLYYAVTQDAMLIFENLSRGFGRQGKRTFMAERQYTRMEDWLTAKLAYEGLPSKTYLSKTLAQYTSKTCSNCGFTITSADYDRVLEKLKKTATGWMTTINGKELKVEGQITYYNRYKRQNVVKDLSVELDRLSEESVNNDISSWTKGRSGEALSLLKKRFSHRPVQEKFVCLNCGFETHADEQAALNIARSWLFLRSQEYKKYQTNKTTGNTDKRAFVETWQSFYRKKLKEVWKPAV

SEQ ID NO: 48299 - protein, 978 aa, synthetic construct
  REGION 1..978: note = engineered CasX variant
QEIKRINKIRRRLVKDSNTKKAGKTGPMKTLLVRVMTPDLRERLENLRKKPENIPQPISNTSRANLNKLLTDYTEMKKAILHVYWEEFQKDPVGLMSRVAQPASKKIDQNKLKPEMDEKGNLTTAGFACSQCGQPLFVYKLEQVSEKGKAYTNYFGRCNVAEHEKLILLAQLKPEKDSDEAVTYSLGKFGQRALDFYSIHVTKESTHPVKPLAQIAGNRYASTPVGKALSDACMGTIASFLSKYQDIIIEHQKVVKGNQKRLESLRELAGKENLEYPSVTLPPQPHTKEGVDAYNEVIARVRMWVNLNLWQKLKLSRDDAKPLLRLKGFPSFPLVERQANEVDWWDMVCNVKKLINEKKEDGKVFWQNLAGYKRQEALRPYLSSEEDRKKGKKFARYQLGDLLLHLYKKHGEDWGKVYDEAWERIDKKVEGLSKHIKLEEERRSEDAQSKAALTDWLRAKASFVIEGLKEADKDEFCRCELKLQKWYGDLRGKPFAIEAENSILDISGFSKQYNCAFIWQKDGVKKLNLYLIINYFKGGKLRFKKIKPEAFEANRFYTVINKKSGEIVPMEVNFNFDDPNLIILPLAFGKRQGREFIWNDLLSLETGSLKLANGRVIEKTLYNRRTRQDEPALFVALTFERREVLDSSNIKPMNLIGVDRGENIPAVIALTDPEGCPLSRFKDSLGNPTHILRIGERYKEKQRTIQAKKEVEQRRAGGYSRKYASKAKNLADDMVRNTARDLLYYAVTQDAMLIFENLSRGFGRQGKRTFMAERQYTRMEDWLTAKLAYEGLPSKTYLSKTLAQYTSKTCSNCGFTITSADYDRVLEKLKKTATGWMTTINGKELKVEGQITYYNRYKRQNVVKDLSVELDRLSEESVNNDISSWTKGRSGEALSLLKKRFSHRPVQEKFVCLNCGFETHADEQAALNIARSWLFLRSQEYKKYQTNKTTGNTDKRAFVETWQSFYRKKLKEVWKPAV

SEQ ID NO: 48300 - protein, 978 aa, synthetic construct
  REGION 1..978: note = engineered CasX variant
QEIKRINKIRRRLVKDSNTKKAGKTGPMKTLLVRVMTPDLRERLENLRKKPENIPQPISNTSRANLNKLLTDYTEMKKAILHVYWEEFQKDPVGLMSRVAQPASKKIDQNKLKPEMDEKGNLTTAGFACSQCGQPLFVYKLEQVSEKGKAYTNYFGRCNVAEHEKLILLAQLKPEKDSDEAVTYSLGKFGQRALDFYSIHVTKESTHPVKPLAQIAGNRYASAPVGKALSDACMGTIASFLSKYQDIIIEHQKVVKGNQKRLESLRELAGKENLEYPSVTLPPQPHTKEGVDAYNEVIARVRMWVNLNLWQKLKLSRDDAKPLLRLKGFPSFPLVERQANEVDWWDMVCNVKKLINEKKEDGKVFWQNLAGYKRQEALRPYLSSEEDRKKGKKFARYQLGDLLLHLYKKHGEDWGKVYDEAWERIDKKVEGLSKHIKLEEERRSEDAQSKAALTDWLRAKASFVIEGLKEADKDEFCRCELKLQKWYGDLRGKPFAIEAENSILDISGFSKQYNCAFIWQKDGVKKLNLYLIINYFKGGKLRFKKIKPEAFEANRFYTVINKKSGEIVPMEVNFNFDDPNLIILPLAFGKRQGREFIWNDLLSLETGSLKLANGRVIEKTLYNRRTRQDEPALFVALTFERREVLDSSNIKPMNLIGVDRGENIPAVIALTDPEGCPLSRFKDSLGNPTHILRIGERYKEKQRTIQAKKEVEQRRAGGYSRKYASKAKNLADDMVRNTARDLLYYAVTQDAMLIFENLSRGFGRQGKRTFMAERQYTRMEDWLTAKLAYEGLPSKTYLSKTLAQYTSKTCSNCGFTITSADYDRVLEKLKKTATGWMTTINGKELKVEGQITYYNRYKRQNVVKDLSVELDRLSEESVNNDISSWTKGRSGEALSLLKKRFSHRPVQEKFVCLNCGFETHADEQAALNIARSWLFLRSQEYKKYQTNKTTGNTDKRAFVETWQSFYRKKLKEVWKPAV

SEQ ID NO: 48301 - protein, 978 aa, synthetic construct
  REGION 1..978: note = engineered CasX variant
QEIKRINKIRRRLVKDSNTKKAGKTGPMKTLLVRVMTPDLRERLENLRKKPENIPQPISNTSRANLNKLLTDYTEMKKAILHVYWEEFQKDPVGLMSRVAQPASKKIDQNKLKPEMDEKGNLTTAGFACSQCGQPLFVYKLEQVSEKGKAYTNYFGRCNVAEHEKLILLAQLKPEKDSDEAVTYSLGKFGQRALDFYSIHVTKESTHPVKPLAQIAGNRYASVPVGKALSDACMGTIASFLSKYQDIIIEHQKVVKGNQKRLESLRELAGKENLEYPSVTLPPQPHTKEGVDAYNEVIARVRMWVNLNLWQKLKLSRDDAKPLLRLKGFPSFPLVERQANEVDWWDMVCNVKKLINEKKEDGKVFWQNLAGYKRQEALRPYLSSEEDRKKGKKFARYQLGDLLLHLYKKHGEDWGKVYDEAWERIDKKVEGLSKHIKLEEERRSEDAQSKAALTDWLRAKASFVIEGLKEADKDEFCRCELKLQKWYGDLRGKPFAIEAENSILDISGFSKQYNCAFIWQKDGVKKLNLYLIINYFKGGKLRFKKIKPEAFEANRFYTVINKKSGEIVPMEVNFNFDDPNLIILPLAFGKRQGREFIWNDLLSLETGSLKLANGRVIEKTLYNRRTRQDEPALFVALTFERREVLDSSNIKPMNLIGVDRGENIPAVIALTDPEGCPLSRFKDSLGNPTHILRIGERYKEKQRTIQAKKEVEQRRAGGYSRKYASKAKNLADDMVRNTARDLLYYAVTQDAMLIFENLSRGFGRQGKRTFMAERQYTRMEDWLTAKLAYEGLPSKTYLSKTLAQYTSKTCSNCGFTITSADYDRVLEKLKKTATGWMTTINGKELKVEGQITYYNRYKRQNVVKDLSVELDRLSEESVNNDISSWTKGRSGEALSLLKKRFSHRPVQEKFVCLNCGFETHADEQAALNIARSWLFLRSQEYKKYQTNKTTGNTDKRAFVETWQSFYRKKLKEVWKPAV

SEQ ID NO: 48302 - protein, 978 aa, synthetic construct
  REGION 1..978: note = engineered CasX variant
QEIKRINKIRRRLVKDSNTKKAGKTGPMKTLLVRVMTPDLRERLENLRKKPENIPQPISNTSRANLNKLLTDYTEMKKAILHVYWEEFQKDPVGLMSRVAQPASKKIDQNKLKPEMDEKGNLTTAGFACSQCGQPLFVYKLEQVSEKGKAYTNYFGRCNVAEHEKLIKLAQLKPEKDSDEAVTYSLGKFGQRALDFYSIHVTKESTHPVKPLAQIAGNRYASGPVGKALSDACMGTIASFLSKYQDIIIEHQKVVKGNQKRLESLRELAGKENLEYPSVTLPPQPHTKEGVDAYNEVIARVRMWVNLNLWQKLKLSRDDAKPLLRLKGFPSFPLVERQANEVDWWDMVCNVKKLINEKKEDGKVFWQNLAGYKRQEALRPYLSSEEDRKKGKKFARYQLGDLLLHLYKKHGEDWGKVYDEAWERIDKKVEGLSKHIKLEEERRSEDAQSKAALTDWLRAKASFVIEGLKEADKDEFCRCELKLQKWYGDLRGKPFAIEAENSILDISGFSKQYNCAFIWQKDGVKKLNLYLIINYFKGGKLRFKKIKPEAFEANRFYTVINKKSGEIVPMEVNFNFDDPNLIILPLAFGKRQGREFIWNDLLSLETGSLKLANGRVIEKTLYNRRTRQDEPALFVALTFERREVLDSSNIKPMNLIGVDRGENIPAVIALTDPEGCPLSRFKDSLGNPTHILRIGERYKEKQRTIQAKKEVEQRRAGGYSRKYASKAKNLADDMVRNTARDLLYYAVTQDAMLIFENLSRGFGRQGKRTFMAERQYTRMEDWLTAKLAYEGLPSKTYLSKTLAQYTSKTCSNCGFTITSADYDRVLEKLKKTATGWMTTINGKELKVEGQITYYNRYKRQNVVKDLSVELDRLSEESVNNDISSWTKGRSGEALSLLKKRFSHRPVQEKFVCLNCGFETHADEQAALNIARSWLFLRSQEYKKYQTNKTTGNTDKRAFVETWQSFYRKKLKEVWKPAV

SEQ ID NO: 48303 - protein, 977 aa, synthetic construct
  REGION 1..977: note = engineered CasX variant
QEIKRINKIRRRLVKDSNTKKAGKTGPMKTLLVRVMTPDLRERLENLRKKPENIPQPISNTSRANLNKLLTDYTEMKKAILHVYWEEFQKDPVGLMSRVAQPASKKIDQNKLKPEMDEKGNLTTAGFACSQCGQPLFVYKLEQVSEKGKAYTNYFGRCNVAEHEKLILLAQLKPEKDSDEAVTYSLGKFGQRALDFYSIHVTKESTHPVKPLAQIAGNRYASPVGKALSDACMGTIASFLSKYQDIIIEHQKVVKGNQKRLESLRELAGKENLEYPSVTLPPQPHTKEGVDAYNEVIARVRMWVNLNLWQKLKLSRDDAKPLLRLKGFPSFPLVERQANEVDWWDMVCNVKKLINEKKEDGKVFWQNLAGYKRQEALRPYLSSEEDRKKGKKFARYQLGDLLLHLYKKHGEDWGKVYDEAWERIDKKVEGLSKHIKLEEERRSEDAQSKAALTDWLRAKASFVIEGLKEADKDEFCRCELKLQKWYGDLRGKPFAIEAENSILDISGFSKQYNCAFIWQKDGVKKLNLYLIINYFKGGKLRFKKIKPEAFEANRFYTVINKKSGEIVPMEVNFNFDDPNLIILPLAFGKRQGREFIWNDLLSLETGSLKLANGRVIEKTLYNRRTRQDEPALFVALTFERREVLDSSNIKPMNLIGVDRGENIPAVIALTDPEGCPLSRFKDSLGNPTHILRIGERYKEKQRTIQAKKEVEQRRAGGYSRKYASKAKNLADDMVRNTARDLLYYAVTQDAMLIFENLSRGFGRQGKRTFMAERQYTRMEDWLTAKLAYEGLPSKTYLSKTLAQYTSKTCSNCGFTITSADYDRVLEKLKKTATGWMTTINGKELKVEGQITYYNRYKRQNVVKDLSVELDRLSEESVNNDISSWTKGRSGEALSLLKKRFSHRPVQEKFVCLNCGFETHADEQAALNIARSWLFLRSQEYKKYQTNKTTGNTDKRAFVETWQSFYRKKLKEVWKPAV

SEQ ID NO: 48304 - protein, 978 aa, synthetic construct
  REGION 1..978: note = engineered CasX variant
QEIKRINKIRRRLVKDSNTKKAGKTGPMKTLLVRVMTPDLRERLENLRKKPENIPQPISNTSRANLNKLLTDYTEMKKAILHVYWEEFQKDPVGLMSRVAQPASKKIDQNKLKPEMDEKGNLTTAGFACSQCGQPLFVYKLEQVSEKGKAYTNYFGRCNVAEHEKLILLAQLKPEKDSDEAVTYSLGKFGQRALDFYSIHVTKESTHPVKPLAQIAGNRYASYPVGKALSDACMGTIASFLSKYQDIIIEHQKVVKGNQKRLESLRELAGKENLEYPSVTLPPQPHTKEGVDAYNEVIARVRMWVNLNLWQKLKLSRDDAKPLLRLKGFPSFPLVERQANEVDWWDMVCNVKKLINEKKEDGKVFWQNLAGYKRQEALRPYLSSEEDRKKGKKFARYQLGDLLLHLEKKHPEDWGKVYDEAWERIDKKVEGLSKHIKLEEERRSEDAQSKAALTDWLRAKASFVIEGLKEADKDEFCRCELKLQKWYGDLRGKPFAIEAENSILDISGFSKQYNCAFIWQKDGVKKLNLYLIINYFKGGKLRFKKIKPEAFEANRFYTVINKKSGEIVPMEVNFNFDDPNLIILPLAFGKRQGREFIWNDLLSLETGSLKLANGRVIEKTLYNRRTRQDEPALFVALTFERREVLDSSNIKPMNLIGVDRGENIPAVIALTDPEGCPLSRFKDSLGNPTHILRIGERYKEKQRTIQAKKEVEQRRAGGYSRKYASKAKNLADDMVRNTARDLLYYAVTQDAMLIFENLSRGFGRQGKRTFMAERQYTRMEDWLTAKLAYEGLPSKTYLSKTLAQYTSKTCSNCGFTITSADYDRVLEKLKKTATGWMTTINGKELKVEGQITYYNRYKRQNVVKDLSVELDRLSEESVNNDISSWTKGRSGEALSLLKKRFSHRPVQEKFVCLNCGFETHADEQAALNIARSWLFLRSQEYKKYQTNKTTGNTDKRAFVETWQSFYRKKLKEVWKPAV

SEQ ID NO: 48305 - protein, 978 aa, synthetic construct
  REGION 1..978: note = engineered CasX variant
QEIKRINKIRRRLVKDSNTKKAGKTGPMKTLLVRVMTPDLRERLENLRKKPENIPQPISNTSRANLNKLLTDYTEMKKAILHVYWEEFQKDPVGLMSRVAQPASKKIDQNKLKPEMDEKGNLTTAGFACSQCGQPLFVYKLEQVSEKGKAYTNYFGRCNVAEHEKLILLAQLKPEKDSDEAVTYSLGKFGQRALDFYSIHVTKESTHPVKPLAQIAGNRYASHPVGKALSDACMGTIASFLSKYQDIIIEHQKVVKGNQKRLESLRELAGKENLEYPSVTLPPQPHTKEGVDAYNEVIARVRMWVNLNLWQKLKLSRDDAKPLLRLKGFPSFPLVERQANEVDWWDMVCNVKKLINEKKEDGKVFWQNLAGYKRQEALRPYLSSEEDRKKGKKFARYQLGDLLLHLEKKHPEDWGKVYDEAWERIDKKVEGLSKHIKLEEERRSEDAQSKAALTDWLRAKASFVIEGLKEADKDEFCRCELKLQKWYGDLRGKPFAIEAENSILDISGFSKQYNCAFIWQKDGVKKLNLYLIINYFKGGKLRFKKIKPEAFEANRFYTVINKKSGEIVPMEVNFNFDDPNLIILPLAFGKRQGREFIWNDLLSLETGSLKLANGRVIEKTLYNRRTRQDEPALFVALTFERREVLDSSNIKPMNLIGVDRGENIPAVIALTDPEGCPLSRFKDSLGNPTHILRIGERYKEKQRTIQAKKEVEQRRAGGYSRKYASKAKNLADDMVRNTARDLLYYAVTQDAMLIFENLSRGFGRQGKRTFMAERQYTRMEDWLTAKLAYEGLPSKTYLSKTLAQYTSKTCSNCGFTITSADYDRVLEKLKKTATGWMTTINGKELKVEGQITYYNRYKRQNVVKDLSVELDRLSEESVNNDISSWTKGRSGEALSLLKKRFSHRPVQEKFVCLNCGFETHADEQAALNIARSWLFLRSQEYKKYQTNKTTGNTDKRAFVETWQSFYRKKLKEVWKPAV

SEQ ID NO: 48306 - protein, 978 aa, synthetic construct
  REGION 1..978: note = engineered CasX variant
QEIKRINKIRRRLVKDSNTKKAGKTGPMKTLLVRVMTPDLRERLENLRKKPENIPQPISNTSRANLNKLLTDYTEMKKAILHVYWEEFQKDPVGLMSRVAQPASKKIDQNKLKPEMDEKGNLTTAGFACSQCGQPLFVYKLEQVSEKGKAYTNYFGRCNVAEHEKLILLAQLKPEKDSDEAVTYSLGKFGQRALDFYSIHVTKESTHPVKPLAQIAGNRYASSPVGKALSDACMGTIASFLSKYQDIIIEHQKVVKGNQKRLESLRELAGKENLEYPSVTLPPQPHTKEGVDAYNEVIARVRMWVNLNLWQKLKLSRDDAKPLLRLKGFPSFPLVERQANEVDWWDMVCNVKKLINEKKEDGKVFWQNLAGYKRQEALRPYLSSEEDRKKGKKFARYQLGDLLLHLEKKHPEDWGKVYDEAWERIDKKVEGLSKHIKLEEERRSEDAQSKAALTDWLRAKASFVIEGLKEADKDEFCRCELKLQKWYGDLRGKPFAIEAENSILDISGFSKQYNCAFIWQKDGVKKLNLYLIINYFKGGKLRFKKIKPEAFEANRFYTVINKKSGEIVPMEVNFNFDDPNLIILPLAFGKRQGREFIWNDLLSLETGSLKLANGRVIEKTLYNRRTRQDEPALFVALTFERREVLDSSNIKPMNLIGVDRGENIPAVIALTDPEGCPLSRFKDSLGNPTHILRIGERYKEKQRTIQAKKEVEQRRAGGYSRKYASKAKNLADDMVRNTARDLLYYAVTQDAMLIFENLSRGFGRQGKRTFMAERQYTRMEDWLTAKLAYEGLPSKTYLSKTLAQYTSKTCSNCGFTITSADYDRVLEKLKKTATGWMTTINGKELKVEGQITYYNRYKRQNVVKDLSVELDRLSEESVNNDISSWTKGRSGEALSLLKKRFSHRPVQEKFVCLNCGFETHADEQAALNIARSWLFLRSQEYKKYQTNKTTGNTDKRAFVETWQSFYRKKLKEVWKPAV

SEQ ID NO: 48307 - protein, 978 aa, synthetic construct
  REGION 1..978: note = engineered CasX variant
QEIKRINKIRRRLVKDSNTKKAGKTGPMKTLLVRVMTPDLRERLENLRKKPENIPQPISNTSRANLNKLLTDYTEMKKAILHVYWEEFQKDPVGLMSRVAQPASKKIDQNKLKPEMDEKGNLTTAGFACSQCGQPLFVYKLEQVSEKGKAYTNYFGRCNVAEHEKLILLAQLKPEKDSDEAVTYSLGKFGQRALDFYSIHVTKESTHPVKPLAQIAGNRYASTPVGKALSDACMGTIASFLSKYQDIIIEHQKVVKGNQKRLESLRELAGKENLEYPSVTLPPQPHTKEGVDAYNEVIARVRMWVNLNLWQKLKLSRDDAKPLLRLKGFPSFPLVERQANEVDWWDMVCNVKKLINEKKEDGKVFWQNLAGYKRQEALRPYLSSEEDRKKGKKFARYQLGDLLLHLEKKHPEDWGKVYDEAWERIDKKVEGLSKHIKLEEERRSEDAQSKAALTDWLRAKASFVIEGLKEADKDEFCRCELKLQKWYGDLRGKPFAIEAENSILDISGFSKQYNCAFIWQKDGVKKLNLYLIINYFKGGKLRFKKIKPEAFEANRFYTVINKKSGEIVPMEVNFNFDDPNLIILPLAFGKRQGREFIWNDLLSLETGSLKLANGRVIEKTLYNRRTRQDEPALFVALTFERREVLDSSNIKPMNLIGVDRGENIPAVIALTDPEGCPLSRFKDSLGNPTHILRIGERYKEKQRTIQAKKEVEQRRAGGYSRKYASKAKNLADDMVRNTARDLLYYAVTQDAMLIFENLSRGFGRQGKRTFMAERQYTRMEDWLTAKLAYEGLPSKTYLSKTLAQYTSKTCSNCGFTITSADYDRVLEKLKKTATGWMTTINGKELKVEGQITYYNRYKRQNVVKDLSVELDRLSEESVNNDISSWTKGRSGEALSLLKKRFSHRPVQEKFVCLNCGFETHADEQAALNIARSWLFLRSQEYKKYQTNKTTGNTDKRAFVETWQSFYRKKLKEVWKPAV

SEQ ID NO: 48308 - protein, 978 aa, synthetic construct
  REGION 1..978: note = engineered CasX variant
QEIKRINKIRRRLVKDSNTKKAGKTGPMKTLLVRVMTPDLRERLENLRKKPENIPQPISNTSRANLNKLLTDYTEMKKAILHVYWEEFQKDPVGLMSRVAQPASKKIDQNKLKPEMDEKGNLTTAGFACSQCGQPLFVYKLEQVSEKGKAYTNYFGRCNVAEHEKLILLAQLKPEKDSDEAVTYSLGKFGQRALDFYSIHVTKESTHPVKPLAQIAGNRYASAPVGKALSDACMGTIASFLSKYQDIIIEHQKVVKGNQKRLESLRELAGKENLEYPSVTLPPQPHTKEGVDAYNEVIARVRMWVNLNLWQKLKLSRDDAKPLLRLKGFPSFPLVERQANEVDWWDMVCNVKKLINEKKEDGKVFWQNLAGYKRQEALRPYLSSEEDRKKGKKFARYQLGDLLLHLEKKHPEDWGKVYDEAWERIDKKVEGLSKHIKLEEERRSEDAQSKAALTDWLRAKASFVIEGLKEADKDEFCRCELKLQKWYGDLRGKPFAIEAENSILDISGFSKQYNCAFIWQKDGVKKLNLYLIINYFKGGKLRFKKIKPEAFEANRFYTVINKKSGEIVPMEVNFNFDDPNLIILPLAFGKRQGREFIWNDLLSLETGSLKLANGRVIEKTLYNRRTRQDEPALFVALTFERREVLDSSNIKPMNLIGVDRGENIPAVIALTDPEGCPLSRFKDSLGNPTHILRIGERYKEKQRTIQAKKEVEQRRAGGYSRKYASKAKNLADDMVRNTARDLLYYAVTQDAMLIFENLSRGFGRQGKRTFMAERQYTRMEDWLTAKLAYEGLPSKTYLSKTLAQYTSKTCSNCGFTITSADYDRVLEKLKKTATGWMTTINGKELKVEGQITYYNRYKRQNVVKDLSVELDRLSEESVNNDISSWTKGRSGEALSLLKKRFSHRPVQEKFVCLNCGFETHADEQAALNIARSWLFLRSQEYKKYQTNKTTGNTDKRAFVETWQSFYRKKLKEVWKPAV

SEQ ID NO: 48309 - protein, 978 aa, synthetic construct
  REGION 1..978: note = engineered CasX variant
QEIKRINKIRRRLVKDSNTKKAGKTGPMKTLLVRVMTPDLRERLENLRKKPENIPQPISNTSRANLNKLLTDYTEMKKAILHVYWEEFQKDPVGLMSRVAQPASKKIDQNKLKPEMDEKGNLTTAGFACSQCGQPLFVYKLEQVSEKGKAYTNYFGRCNVAEHEKLILLAQLKPEKDSDEAVTYSLGKFGQRALDFYSIHVTKESTHPVKPLAQIAGNRYASVPVGKALSDACMGTIASFLSKYQDIIIEHQKVVKGNQKRLESLRELAGKENLEYPSVTLPPQPHTKEGVDAYNEVIARVRMWVNLNLWQKLKLSRDDAKPLLRLKGFPSFPLVERQANEVDWWDMVCNVKKLINEKKEDGKVFWQNLAGYKRQEALRPYLSSEEDRKKGKKFARYQLGDLLLHLEKKHPEDWGKVYDEAWERIDKKVEGLSKHIKLEEERRSEDAQSKAALTDWLRAKASFVIEGLKEADKDEFCRCELKLQKWYGDLRGKPFAIEAENSILDISGFSKQYNCAFIWQKDGVKKLNLYLIINYFKGGKLRFKKIKPEAFEANRFYTVINKKSGEIVPMEVNFNFDDPNLIILPLAFGKRQGREFIWNDLLSLETGSLKLANGRVIEKTLYNRRTRQDEPALFVALTFERREVLDSSNIKPMNLIGVDRGENIPAVIALTDPEGCPLSRFKDSLGNPTHILRIGERYKEKQRTIQAKKEVEQRRAGGYSRKYASKAKNLADDMVRNTARDLLYYAVTQDAMLIFENLSRGFGRQGKRTFMAERQYTRMEDWLTAKLAYEGLPSKTYLSKTLAQYTSKTCSNCGFTITSADYDRVLEKLKKTATGWMTTINGKELKVEGQITYYNRYKRQNVVKDLSVELDRLSEESVNNDISSWTKGRSGEALSLLKKRFSHRPVQEKFVCLNCGFETHADEQAALNIARSWLFLRSQEYKKYQTNKTTGNTDKRAFVETWQSFYRKKLKEVWKPAV

SEQ ID NO: 48310 - protein, 978 aa, synthetic construct
  REGION 1..978: note = engineered CasX variant
QEIKRINKIRRRLVKDSNTKKAGKTGPMKTLLVRVMTPDLRERLENLRKKPENIPQPISNTSRANLNKLLTDYTEMKKAILHVYWEEFQKDPVGLMSRVAQPASKKIDQNKLKPEMDEKGNLTTAGFACSQCGQPLFVYKLEQVSEKGKAYTNYFGRCNVAEHEKLIKLAQLKPEKDSDEAVTYSLGKFGQRALDFYSIHVTKESTHPVKPLAQIAGNRYASGPVGKALSDACMGTIASFLSKYQDIIIEHQKVVKGNQKRLESLRELAGKENLEYPSVTLPPQPHTKEGVDAYNEVIARVRMWVNLNLWQKLKLSRDDAKPLLRLKGFPSFPLVERQANEVDWWDMVCNVKKLINEKKEDGKVFWQNLAGYKRQEALRPYLSSEEDRKKGKKFARYQLGDLLLHLEKKHPEDWGKVYDEAWERIDKKVEGLSKHIKLEEERRSEDAQSKAALTDWLRAKASFVIEGLKEADKDEFCRCELKLQKWYGDLRGKPFAIEAENSILDISGFSKQYNCAFIWQKDGVKKLNLYLIINYFKGGKLRFKKIKPEAFEANRFYTVINKKSGEIVPMEVNFNFDDPNLIILPLAFGKRQGREFIWNDLLSLETGSLKLANGRVIEKTLYNRRTRQDEPALFVALTFERREVLDSSNIKPMNLIGVDRGENIPAVIALTDPEGCPLSRFKDSLGNPTHILRIGERYKEKQRTIQAKKEVEQRRAGGYSRKYASKAKNLADDMVRNTARDLLYYAVTQDAMLIFENLSRGFGRQGKRTFMAERQYTRMEDWLTAKLAYEGLPSKTYLSKTLAQYTSKTCSNCGFTITSADYDRVLEKLKKTATGWMTTINGKELKVEGQITYYNRYKRQNVVKDLSVELDRLSEESVNNDISSWTKGRSGEALSLLKKRFSHRPVQEKFVCLNCGFETHADEQAALNIARSWLFLRSQEYKKYQTNKTTGNTDKRAFVETWQSFYRKKLKEVWKPAV

SEQ ID NO: 48311 - protein, 977 aa, synthetic construct
  REGION 1..977: note = engineered CasX variant
QEIKRINKIRRRLVKDSNTKKAGKTGPMKTLLVRVMTPDLRERLENLRKKPENIPQPISNTSRANLNKLLTDYTEMKKAILHVYWEEFQKDPVGLMSRVAQPASKKIDQNKLKPEMDEKGNLTTAGFACSQCGQPLFVYKLEQVSEKGKAYTNYFGRCNVAEHEKLILLAQLKPEKDSDEAVTYSLGKFGQRALDFYSIHVTKESTHPVKPLAQIAGNRYASPVGKALSDACMGTIASFLSKYQDIIIEHQKVVKGNQKRLESLRELAGKENLEYPSVTLPPQPHTKEGVDAYNEVIARVRMWVNLNLWQKLKLSRDDAKPLLRLKGFPSFPLVERQANEVDWWDMVCNVKKLINEKKEDGKVFWQNLAGYKRQEALRPYLSSEEDRKKGKKFARYQLGDLLLHLEKKHPEDWGKVYDEAWERIDKKVEGLSKHIKLEEERRSEDAQSKAALTDWLRAKASFVIEGLKEADKDEFCRCELKLQKWYGDLRGKPFAIEAENSILDISGFSKQYNCAFIWQKDGVKKLNLYLIINYFKGGKLRFKKIKPEAFEANRFYTVINKKSGEIVPMEVNFNFDDPNLIILPLAFGKRQGREFIWNDLLSLETGSLKLANGRVIEKTLYNRRTRQDEPALFVALTFERREVLDSSNIKPMNLIGVDRGENIPAVIALTDPEGCPLSRFKDSLGNPTHILRIGERYKEKQRTIQAKKEVEQRRAGGYSRKYASKAKNLADDMVRNTARDLLYYAVTQDAMLIFENLSRGFGRQGKRTFMAERQYTRMEDWLTAKLAYEGLPSKTYLSKTLAQYTSKTCSNCGFTITSADYDRVLEKLKKTATGWMTTINGKELKVEGQITYYNRYKRQNVVKDLSVELDRLSEESVNNDISSWTKGRSGEALSLLKKRFSHRPVQEKFVCLNCGFETHADEQAALNIARSWLFLRSQEYKKYQTNKTTGNTDKRAFVETWQSFYRKKLKEVWKPAV

SEQ ID NO: 48312 - protein, 979 aa, synthetic construct
  REGION 1..979: note = engineered CasX variant
QEIKRINKIRRRLVKDSNTKKAGKTGPMKTLLVRVMTPDLRERLENLRKKPENIPQPISNTSRANLNKLLTDYTEMKKAILHVYWEEFQKDPVGLMSRVAQPASKKIDQNKLKPEMDEKGNLTTAGFACSQCGQPLFVYKLEQVSEKGKAYTNYFGRCNVAEHEKLILLAQLKPEKDSDEAVTYSLGKFGQRALDFYSIHVTKESTHPVKPLAQIAGNRYASYPVGKALSDACMGTIASFLSKYQDIIIEHQKVVKGNQKRLESLRELAGKENLEYPSVTLPPQPHTKEGVDAYNEVIARVRMWVNLNLWQKLKLSRDDAKPLLRLKGFPSFPLVERQANEVDWWDMVCNVKKLINEKKEDGKVFWQNLAGYKRQEALRPYLSSEEDRKKGKKFARYQLGDLLLHLEKKHGERDWGKVYDEAWERIDKKVEGLSKHIKLEEERRSEDAQSKAALTDWLRAKASFVIEGLKEADKDEFCRCELKLQKWYGDLRGKPFAIEAENSILDISGFSKQYNCAFIWQKDGVKKLNLYLIINYFKGGKLRFKKIKPEAFEANRFYTVINKKSGEIVPMEVNFNFDDPNLIILPLAFGKRQGREFIWNDLLSLETGSLKLANGRVIEKTLYNRRTRQDEPALFVALTFERREVLDSSNIKPMNLIGVDRGENIPAVIALTDPEGCPLSRFKDSLGNPTHILRIGERYKEKQRTIQAKKEVEQRRAGGYSRKYASKAKNLADDMVRNTARDLLYYAVTQDAMLIFENLSRGFGRQGKRTFMAERQYTRMEDWLTAKLAYEGLPSKTYLSKTLAQYTSKTCSNCGFTITSADYDRVLEKLKKTATGWMTTINGKELKVEGQITYYNRYKRQNVVKDLSVELDRLSEESVNNDISSWTKGRSGEALSLLKKRFSHRPVQEKFVCLNCGFETHADEQAALNIARSWLFLRSQEYKKYQTNKTTGNTDKRAFVETWQSFYRKKLKEVWKPAV

SEQ ID NO: 48313 - protein, 979 aa, synthetic construct
  REGION 1..979: note = engineered CasX variant
QEIKRINKIRRRLVKDSNTKKAGKTGPMKTLLVRVMTPDLRERLENLRKKPENIPQPISNTSRANLNKLLTDYTEMKKAILHVYWEEFQKDPVGLMSRVAQPASKKIDQNKLKPEMDEKGNLTTAGFACSQCGQPLFVYKLEQVSEKGKAYTNYFGRCNVAEHEKLILLAQLKPEKDSDEAVTYSLGKFGQRALDFYSIHVTKESTHPVKPLAQIAGNRYASHPVGKALSDACMGTIASFLSKYQDIIIEHQKVVKGNQKRLESLRELAGKENLEYPSVTLPPQPHTKEGVDAYNEVIARVRMWVNLNLWQKLKLSRDDAKPLLRLKGFPSFPLVERQANEVDWWDMVCNVKKLINEKKEDGKVFWQNLAGYKRQEALRPYLSSEEDRKKGKKFARYQLGDLLLHLEKKHGERDWGKVYDEAWERIDKKVEGLSKHIKLEEERRSEDAQSKAALTDWLRAKASFVIEGLKEADKDEFCRCELKLQKWYGDLRGKPFAIEAENSILDISGFSKQYNCAFIWQKDGVKKLNLYLIINYFKGGKLRFKKIKPEAFEANRFYTVINKKSGEIVPMEVNFNFDDPNLIILPLAFGKRQGREFIWNDLLSLETGSLKLANGRVIEKTLYNRRTRQDEPALFVALTFERREVLDSSNIKPMNLIGVDRGENIPAVIALTDPEGCPLSRFKDSLGNPTHILRIGERYKEKQRTIQAKKEVEQRRAGGYSRKYASKAKNLADDMVRNTARDLLYYAVTQDAMLIFENLSRGFGRQGKRTFMAERQYTRMEDWLTAKLAYEGLPSKTYLSKTLAQYTSKTCSNCGFTITSADYDRVLEKLKKTATGWMTTINGKELKVEGQITYYNRYKRQNVVKDLSVELDRLSEESVNNDISSWTKGRSGEALSLLKKRFSHRPVQEKFVCLNCGFETHADEQAALNIARSWLFLRSQEYKKYQTNKTTGNTDKRAFVETWQSFYRKKLKEVWKPAV

SEQ ID NO: 48314 - protein, 979 aa, synthetic construct
  REGION 1..979: note = engineered CasX variant
QEIKRINKIRRRLVKDSNTKKAGKTGPMKTLLVRVMTPDLRERLENLRKKPENIPQPISNTSRANLNKLLTDYTEMKKAILHVYWEEFQKDPVGLMSRVAQPASKKIDQNKLKPEMDEKGNLTTAGFACSQCGQPLFVYKLEQVSEKGKAYTNYFGRCNVAEHEKLILLAQLKPEKDSDEAVTYSLGKFGQRALDFYSIHVTKESTHPVKPLAQIAGNRYASSPVGKALSDACMGTIASFLSKYQDIIIEHQKVVKGNQKRLESLRELAGKENLEYPSVTLPPQPHTKEGVDAYNEVIARVRMWVNLNLWQKLKLSRDDAKPLLRLKGFPSFPLVERQANEVDWWDMVCNVKKLINEKKEDGKVFWQNLAGYKRQEALRPYLSSEEDRKKGKKFARYQLGDLLLHLEKKHGERDWGKVYDEAWERIDKKVEGLSKHIKLEEERRSEDAQSKAALTDWLRAKASFVIEGLKEADKDEFCRCELKLQKWYGDLRGKPFAIEAENSILDISGFSKQYNCAFIWQKDGVKKLNLYLIINYFKGGKLRFKKIKPEAFEANRFYTVINKKSGEIVPMEVNFNFDDPNLIILPLAFGKRQGREFIWNDLLSLETGSLKLANGRVIEKTLYNRRTRQDEPALFVALTFERREVLDSSNIKPMNLIGVDRGENIPAVIALTDPEGCPLSRFKDSLGNPTHILRIGERYKEKQRTIQAKKEVEQRRAGGYSRKYASKAKNLADDMVRNTARDLLYYAVTQDAMLIFENLSRGFGRQGKRTFMAERQYTRMEDWLTAKLAYEGLPSKTYLSKTLAQYTSKTCSNCGFTITSADYDRVLEKLKKTATGWMTTINGKELKVEGQITYYNRYKRQNVVKDLSVELDRLSEESVNNDISSWTKGRSGEALSLLKKRFSHRPVQEKFVCLNCGFETHADEQAALNIARSWLFLRSQEYKKYQTNKTTGNTDKRAFVETWQSFYRKKLKEVWKPAV

SEQ ID NO: 48315 - protein, 979 aa, synthetic construct
  REGION 1..979: note = engineered CasX variant
QEIKRINKIRRRLVKDSNTKKAGKTGPMKTLLVRVMTPDLRERLENLRKKPENIPQPISNTSRANLNKLLTDYTEMKKAILHVYWEEFQKDPVGLMSRVAQPASKKIDQNKLKPEMDEKGNLTTAGFACSQCGQPLFVYKLEQVSEKGKAYTNYFGRCNVAEHEKLILLAQLKPEKDSDEAVTYSLGKFGQRALDFYSIHVTKESTHPVKPLAQIAGNRYASTPVGKALSDACMGTIASFLSKYQDIIIEHQKVVKGNQKRLESLRELAGKENLEYPSVTLPPQPHTKEGVDAYNEVIARVRMWVNLNLWQKLKLSRDDAKPLLRLKGFPSFPLVERQANEVDWWDMVCNVKKLINEKKEDGKVFWQNLAGYKRQEALRPYLSSEEDRKKGKKFARYQLGDLLLHLEKKHGERDWGKVYDEAWERIDKKVEGLSKHIKLEEERRSEDAQSKAALTDWLRAKASFVIEGLKEADKDEFCRCELKLQKWYGDLRGKPFAIEAENSILDISGFSKQYNCAFIWQKDGVKKLNLYLIINYFKGGKLRFKKIKPEAFEANRFYTVINKKSGEIVPMEVNFNFDDPNLIILPLAFGKRQGREFIWNDLLSLETGSLKLANGRVIEKTLYNRRTRQDEPALFVALTFERREVLDSSNIKPMNLIGVDRGENIPAVIALTDPEGCPLSRFKDSLGNPTHILRIGERYKEKQRTIQAKKEVEQRRAGGYSRKYASKAKNLADDMVRNTARDLLYYAVTQDAMLIFENLSRGFGRQGKRTFMAERQYTRMEDWLTAKLAYEGLPSKTYLSKTLAQYTSKTCSNCGFTITSADYDRVLEKLKKTATGWMTTINGKELKVEGQITYYNRYKRQNVVKDLSVELDRLSEESVNNDISSWTKGRSGEALSLLKKRFSHRPVQEKFVCLNCGFETHADEQAALNIARSWLFLRSQEYKKYQTNKTTGNTDKRAFVETWQSFYRKKLKEVWKPAV

SEQ ID NO: 48316 - protein, 979 aa, synthetic construct
  REGION 1..979: note = engineered CasX variant
QEIKRINKIRRRLVKDSNTKKAGKTGPMKTLLVRVMTPDLRERLENLRKKPENIPQPISNTSRANLNKLLTDYTEMKKAILHVYWEEFQKDPVGLMSRVAQPASKKIDQNKLKPEMDEKGNLTTAGFACSQCGQPLFVYKLEQVSEKGKAYTNYFGRCNVAEHEKLILLAQLKPEKDSDEAVTYSLGKFGQRALDFYSIHVTKESTHPVKPLAQIAGNRYASAPVGKALSDACMGTIASFLSKYQDIIIEHQKVVKGNQKRLESLRELAGKENLEYPSVTLPPQPHTKEGVDAYNEVIARVRMWVNLNLWQKLKLSRDDAKPLLRLKGFPSFPLVERQANEVDWWDMVCNVKKLINEKKEDGKVFWQNLAGYKRQEALRPYLSSEEDRKKGKKFARYQLGDLLLHLEKKHGERDWGKVYDEAWERIDKKVEGLSKHIKLEEERRSEDAQSKAALTDWLRAKASFVIEGLKEADKDEFCRCELKLQKWYGDLRGKPFAIEAENSILDISGFSKQYNCAFIWQKDGVKKLNLYLIINYFKGGKLRFKKIKPEAFEANRFYTVINKKSGEIVPMEVNFNFDDPNLIILPLAFGKRQGREFIWNDLLSLETGSLKLANGRVIEKTLYNRRTRQDEPALFVALTFERREVLDSSNIKPMNLIGVDRGENIPAVIALTDPEGCPLSRFKDSLGNPTHILRIGERYKEKQRTIQAKKEVEQRRAGGYSRKYASKAKNLADDMVRNTARDLLYYAVTQDAMLIFENLSRGFGRQGKRTFMAERQYTRMEDWLTAKLAYEGLPSKTYLSKTLAQYTSKTCSNCGFTITSADYDRVLEKLKKTATGWMTTINGKELKVEGQITYYNRYKRQNVVKDLSVELDRLSEESVNNDISSWTKGRSGEALSLLKKRFSHRPVQEKFVCLNCGFETHADEQAALNIARSWLFLRSQEYKKYQTNKTTGNTDKRAFVETWQSFYRKKLKEVWKPAV

SEQ ID NO: 48317 - protein, 979 aa, synthetic construct
  REGION 1..979: note = engineered CasX variant
QEIKRINKIRRRLVKDSNTKKAGKTGPMKTLLVRVMTPDLRERLENLRKKPENIPQPISNTSRANLNKLLTDYTEMKKAILHVYWEEFQKDPVGLMSRVAQPASKKIDQNKLKPEMDEKGNLTTAGFACSQCGQPLFVYKLEQVSEKGKAYTNYFGRCNVAEHEKLILLAQLKPEKDSDEAVTYSLGKFGQRALDFYSIHVTKESTHPVKPLAQIAGNRYASVPVGKALSDACMGTIASFLSKYQDIIIEHQKVVKGNQKRLESLRELAGKENLEYPSVTLPPQPHTKEGVDAYNEVIARVRMWVNLNLWQKLKLSRDDAKPLLRLKGFPSFPLVERQANEVDWWDMVCNVKKLINEKKEDGKVFWQNLAGYKRQEALRPYLSSEEDRKKGKKFARYQLGDLLLHLEKKHGERDWGKVYDEAWERIDKKVEGLSKHIKLEEERRSEDAQSKAALTDWLRAKASFVIEGLKEADKDEFCRCELKLQKWYGDLRGKPFAIEAENSILDISGFSKQYNCAFIWQKDGVKKLNLYLIINYFKGGKLRFKKIKPEAFEANRFYTVINKKSGEIVPMEVNFNFDDPNLIILPLAFGKRQGREFIWNDLLSLETGSLKLANGRVIEKTLYNRRTRQDEPALFVALTFERREVLDSSNIKPMNLIGVDRGENIPAVIALTDPEGCPLSRFKDSLGNPTHILRIGERYKEKQRTIQAKKEVEQRRAGGYSRKYASKAKNLADDMVRNTARDLLYYAVTQDAMLIFENLSRGFGRQGKRTFMAERQYTRMEDWLTAKLAYEGLPSKTYLSKTLAQYTSKTCSNCGFTITSADYDRVLEKLKKTATGWMTTINGKELKVEGQITYYNRYKRQNVVKDLSVELDRLSEESVNNDISSWTKGRSGEALSLLKKRFSHRPVQEKFVCLNCGFETHADEQAALNIARSWLFLRSQEYKKYQTNKTTGNTDKRAFVETWQSFYRKKLKEVWKPAV

SEQ ID NO: 48318 - protein, 979 aa, synthetic construct
  REGION 1..979: note = engineered CasX variant
QEIKRINKIRRRLVKDSNTKKAGKTGPMKTLLVRVMTPDLRERLENLRKKPENIPQPISNTSRANLNKLLTDYTEMKKAILHVYWEEFQKDPVGLMSRVAQPASKKIDQNKLKPEMDEKGNLTTAGFACSQCGQPLFVYKLEQVSEKGKAYTNYFGRCNVAEHEKLIKLAQLKPEKDSDEAVTYSLGKFGQRALDFYSIHVTKESTHPVKPLAQIAGNRYASGPVGKALSDACMGTIASFLSKYQDIIIEHQKVVKGNQKRLESLRELAGKENLEYPSVTLPPQPHTKEGVDAYNEVIARVRMWVNLNLWQKLKLSRDDAKPLLRLKGFPSFPLVERQANEVDWWDMVCNVKKLINEKKEDGKVFWQNLAGYKRQEALRPYLSSEEDRKKGKKFARYQLGDLLLHLEKKHGERDWGKVYDEAWERIDKKVEGLSKHIKLEEERRSEDAQSKAALTDWLRAKASFVIEGLKEADKDEFCRCELKLQKWYGDLRGKPFAIEAENSILDISGFSKQYNCAFIWQKDGVKKLNLYLIINYFKGGKLRFKKIKPEAFEANRFYTVINKKSGEIVPMEVNFNFDDPNLIILPLAFGKRQGREFIWNDLLSLETGSLKLANGRVIEKTLYNRRTRQDEPALFVALTFERREVLDSSNIKPMNLIGVDRGENIPAVIALTDPEGCPLSRFKDSLGNPTHILRIGERYKEKQRTIQAKKEVEQRRAGGYSRKYASKAKNLADDMVRNTARDLLYYAVTQDAMLIFENLSRGFGRQGKRTFMAERQYTRMEDWLTAKLAYEGLPSKTYLSKTLAQYTSKTCSNCGFTITSADYDRVLEKLKKTATGWMTTINGKELKVEGQITYYNRYKRQNVVKDLSVELDRLSEESVNNDISSWTKGRSGEALSLLKKRFSHRPVQEKFVCLNCGFETHADEQAALNIARSWLFLRSQEYKKYQTNKTTGNTDKRAFVETWQSFYRKKLKEVWKPAV

SEQ ID NO: 48319 - protein, 978 aa, synthetic construct
  REGION 1..978: note = engineered CasX variant
QEIKRINKIRRRLVKDSNTKKAGKTGPMKTLLVRVMTPDLRERLENLRKKPENIPQPISNTSRANLNKLLTDYTEMKKAILHVYWEEFQKDPVGLMSRVAQPASKKIDQNKLKPEMDEKGNLTTAGFACSQCGQPLFVYKLEQVSEKGKAYTNYFGRCNVAEHEKLILLAQLKPEKDSDEAVTYSLGKFGQRALDFYSIHVTKESTHPVKPLAQIAGNRYASPVGKALSDACMGTIASFLSKYQDIIIEHQKVVKGNQKRLESLRELAGKENLEYPSVTLPPQPHTKEGVDAYNEVIARVRMWVNLNLWQKLKLSRDDAKPLLRLKGFPSFPLVERQANEVDWWDMVCNVKKLINEKKEDGKVFWQNLAGYKRQEALRPYLSSEEDRKKGKKFARYQLGDLLLHLEKKHGERDWGKVYDEAWERIDKKVEGLSKHIKLEEERRSEDAQSKAALTDWLRAKASFVIEGLKEADKDEFCRCELKLQKWYGDLRGKPFAIEAENSILDISGFSKQYNCAFIWQKDGVKKLNLYLIINYFKGGKLRFKKIKPEAFEANRFYTVINKKSGEIVPMEVNFNFDDPNLIILPLAFGKRQGREFIWNDLLSLETGSLKLANGRVIEKTLYNRRTRQDEPALFVALTFERREVLDSSNIKPMNLIGVDRGENIPAVIALTDPEGCPLSRFKDSLGNPTHILRIGERYKEKQRTIQAKKEVEQRRAGGYSRKYASKAKNLADDMVRNTARDLLYYAVTQDAMLIFENLSRGFGRQGKRTFMAERQYTRMEDWLTAKLAYEGLPSKTYLSKTLAQYTSKTCSNCGFTITSADYDRVLEKLKKTATGWMTTINGKELKVEGQITYYNRYKRQNVVKDLSVELDRLSEESVNNDISSWTKGRSGEALSLLKKRFSHRPVQEKFVCLNCGFETHADEQAALNIARSWLFLRSQEYKKYQTNKTTGNTDKRAFVETWQSFYRKKLKEVWKPAV

SEQ ID NO: 48320 - protein, 979 aa, synthetic construct
  REGION 1..979: note = engineered CasX variant
QEIKRINKIRRRLVKDSNTKKAGKTGPMKTLLVRVMTPDLRERLENLRKKPENIPQPISNTSRANLNKLLTDYTEMKKAILHVYWEEFQKDPVGLMSRVAQPASKKIDQNKLKPEMDEKGNLTTAGFACSQCGQPLFVYKLEQVSEKGKAYTNYFGRCNVAEHEKLILLAQLKPEKDSDEAVTYSLGKFGQRALDFYSIHVTKESTHPVKPLAQIAGNRYASYPVGKALSDACMGTIASFLSKYQDIIIEHQKVVKGNQKRLESLRELAGKENLEYPSVTLPPQPHTKEGVDAYNEVIARVRMWVNLNLWQKLKLSRDDAKPLLRLKGFPSFPLVERQANEVDWWDMVCNVKKLINEKKEDGKVFWQNLAGYKRQEALRPYLSSEEDRKKGKKFARYQLGDLLLHLEKKHGEYDWGKVYDEAWERIDKKVEGLSKHIKLEEERRSEDAQSKAALTDWLRAKASFVIEGLKEADKDEFCRCELKLQKWYGDLRGKPFAIEAENSILDISGFSKQYNCAFIWQKDGVKKLNLYLIINYFKGGKLRFKKIKPEAFEANRFYTVINKKSGEIVPMEVNFNFDDPNLIILPLAFGKRQGREFIWNDLLSLETGSLKLANGRVIEKTLYNRRTRQDEPALFVALTFERREVLDSSNIKPMNLIGVDRGENIPAVIALTDPEGCPLSRFKDSLGNPTHILRIGERYKEKQRTIQAKKEVEQRRAGGYSRKYASKAKNLADDMVRNTARDLLYYAVTQDAMLIFENLSRGFGRQGKRTFMAERQYTRMEDWLTAKLAYEGLPSKTYLSKTLAQYTSKTCSNCGFTITSADYDRVLEKLKKTATGWMTTINGKELKVEGQITYYNRYKRQNVVKDLSVELDRLSEESVNNDISSWTKGRSGEALSLLKKRFSHRPVQEKFVCLNCGFETHADEQAALNIARSWLFLRSQEYKKYQTNKTTGNTDKRAFVETWQSFYRKKLKEVWKPAV

SEQ ID NO: 48321 - protein, 979 aa, synthetic construct
  REGION 1..979: note = engineered CasX variant
QEIKRINKIRRRLVKDSNTKKAGKTGPMKTLLVRVMTPDLRERLENLRKKPENIPQPISNTSRANLNKLLTDYTEMKKAILHVYWEEFQKDPVGLMSRVAQPASKKIDQNKLKPEMDEKGNLTTAGFACSQCGQPLFVYKLEQVSEKGKAYTNYFGRCNVAEHEKLILLAQLKPEKDSDEAVTYSLGKFGQRALDFYSIHVTKESTHPVKPLAQIAGNRYASHPVGKALSDACMGTIASFLSKYQDIIIEHQKVVKGNQKRLESLRELAGKENLEYPSVTLPPQPHTKEGVDAYNEVIARVRMWVNLNLWQKLKLSRDDAKPLLRLKGFPSFPLVERQANEVDWWDMVCNVKKLINEKKEDGKVFWQNLAGYKRQEALRPYLSSEEDRKKGKKFARYQLGDLLLHLEKKHGEYDWGKVYDEAWERIDKKVEGLSKHIKLEEERRSEDAQSKAALTDWLRAKASFVIEGLKEADKDEFCRCELKLQKWYGDLRGKPFAIEAENSILDISGFSKQYNCAFIWQKDGVKKLNLYLIINYFKGGKLRFKKIKPEAFEANRFYTVINKKSGEIVPMEVNFNFDDPNLIILPLAFGKRQGREFIWNDLLSLETGSLKLANGRVIEKTLYNRRTRQDEPALFVALTFERREVLDSSNIKPMNLIGVDRGENIPAVIALTDPEGCPLSRFKDSLGNPTHILRIGERYKEKQRTIQAKKEVEQRRAGGYSRKYASKAKNLADDMVRNTARDLLYYAVTQDAMLIFENLSRGFGRQGKRTFMAERQYTRMEDWLTAKLAYEGLPSKTYLSKTLAQYTSKTCSNCGFTITSADYDRVLEKLKKTATGWMTTINGKELKVEGQITYYNRYKRQNVVKDLSVELDRLSEESVNNDISSWTKGRSGEALSLLKKRFSHRPVQEKFVCLNCGFETHADEQAALNIARSWLFLRSQEYKKYQTNKTTGNTDKRAFVETWQSFYRKKLKEVWKPAV

SEQ ID NO: 48322 - protein, 979 aa, synthetic construct
  REGION 1..979: note = engineered CasX variant
QEIKRINKIRRRLVKDSNTKKAGKTGPMKTLLVRVMTPDLRERLENLRKKPENIPQPISNTSRANLNKLLTDYTEMKKAILHVYWEEFQKDPVGLMSRVAQPASKKIDQNKLKPEMDEKGNLTTAGFACSQCGQPLFVYKLEQVSEKGKAYTNYFGRCNVAEHEKLILLAQLKPEKDSDEAVTYSLGKFGQRALDFYSIHVTKESTHPVKPLAQIAGNRYASSPVGKALSDACMGTIASFLSKYQDIIIEHQKVVKGNQKRLESLRELAGKENLEYPSVTLPPQPHTKEGVDAYNEVIARVRMWVNLNLWQKLKLSRDDAKPLLRLKGFPSFPLVERQANEVDWWDMVCNVKKLINEKKEDGKVFWQNLAGYKRQEALRPYLSSEEDRKKGKKFARYQLGDLLLHLEKKHGEYDWGKVYDEAWERIDKKVEGLSKHIKLEEERRSEDAQSKAALTDWLRAKASFVIEGLKEADKDEFCRCELKLQKWYGDLRGKPFAIEAENSILDISGFSKQYNCAFIWQKDGVKKLNLYLIINYFKGGKLRFKKIKPEAFEANRFYTVINKKSGEIVPMEVNFNFDDPNLIILPLAFGKRQGREFIWNDLLSLETGSLKLANGRVIEKTLYNRRTRQDEPALFVALTFERREVLDSSNIKPMNLIGVDRGENIPAVIALTDPEGCPLSRFKDSLGNPTHILRIGERYKEKQRTIQAKKEVEQRRAGGYSRKYASKAKNLADDMVRNTARDLLYYAVTQDAMLIFENLSRGFGRQGKRTFMAERQYTRMEDWLTAKLAYEGLPSKTYLSKTLAQYTSKTCSNCGFTITSADYDRVLEKLKKTATGWMTTINGKELKVEGQITYYNRYKRQNVVKDLSVELDRLSEESVNNDISSWTKGRSGEALSLLKKRFSHRPVQEKFVCLNCGFETHADEQAALNIARSWLFLRSQEYKKYQTNKTTGNTDKRAFVETWQSFYRKKLKEVWKPAV

SEQ ID NO: 48323 - protein, 979 aa, synthetic construct
  REGION 1..979: note = engineered CasX variant
QEIKRINKIRRRLVKDSNTKKAGKTGPMKTLLVRVMTPDLRERLENLRKKPENIPQPISNTSRANLNKLLTDYTEMKKAILHVYWEEFQKDPVGLMSRVAQPASKKIDQNKLKPEMDEKGNLTTAGFACSQCGQPLFVYKLEQVSEKGKAYTNYFGRCNVAEHEKLILLAQLKPEKDSDEAVTYSLGKFGQRALDFYSIHVTKESTHPVKPLAQIAGNRYASTPVGKALSDACMGTIASFLSKYQDIIIEHQKVVKGNQKRLESLRELAGKENLEYPSVTLPPQPHTKEGVDAYNEVIARVRMWVNLNLWQKLKLSRDDAKPLLRLKGFPSFPLVERQANEVDWWDMVCNVKKLINEKKEDGKVFWQNLAGYKRQEALRPYLSSEEDRKKGKKFARYQLGDLLLHLEKKHGEYDWGKVYDEAWERIDKKVEGLSKHIKLEEERRSEDAQSKAALTDWLRAKASFVIEGLKEADKDEFCRCELKLQKWYGDLRGKPFAIEAENSILDISGFSKQYNCAFIWQKDGVKKLNLYLIINYFKGGKLRFKKIKPEAFEANRFYTVINKKSGEIVPMEVNFNFDDPNLIILPLAFGKRQGREFIWNDLLSLETGSLKLANGRVIEKTLYNRRTRQDEPALFVALTFERREVLDSSNIKPMNLIGVDRGENIPAVIALTDPEGCPLSRFKDSLGNPTHILRIGERYKEKQRTIQAKKEVEQRRAGGYSRKYASKAKNLADDMVRNTARDLLYYAVTQDAMLIFENLSRGFGRQGKRTFMAERQYTRMEDWLTAKLAYEGLPSKTYLSKTLAQYTSKTCSNCGFTITSADYDRVLEKLKKTATGWMTTINGKELKVEGQITYYNRYKRQNVVKDLSVELDRLSEESVNNDISSWTKGRSGEALSLLKKRFSHRPVQEKFVCLNCGFETHADEQAALNIARSWLFLRSQEYKKYQTNKTTGNTDKRAFVETWQSFYRKKLKEVWKPAV

SEQ ID NO: 48324 - protein, 979 aa, synthetic construct
  REGION 1..979: note = engineered CasX variant
QEIKRINKIRRRLVKDSNTKKAGKTGPMKTLLVRVMTPDLRERLENLRKKPENIPQPISNTSRANLNKLLTDYTEMKKAILHVYWEEFQKDPVGLMSRVAQPASKKIDQNKLKPEMDEKGNLTTAGFACSQCGQPLFVYKLEQVSEKGKAYTNYFGRCNVAEHEKLILLAQLKPEKDSDEAVTYSLGKFGQRALDFYSIHVTKESTHPVKPLAQIAGNRYASAPVGKALSDACMGTIASFLSKYQDIIIEHQKVVKGNQKRLESLRELAGKENLEYPSVTLPPQPHTKEGVDAYNEVIARVRMWVNLNLWQKLKLSRDDAKPLLRLKGFPSFPLVERQANEVDWWDMVCNVKKLINEKKEDGKVFWQNLAGYKRQEALRPYLSSEEDRKKGKKFARYQLGDLLLHLEKKHGEYDWGKVYDEAWERIDKKVEGLSKHIKLEEERRSEDAQSKAALTDWLRAKASFVIEGLKEADKDEFCRCELKLQKWYGDLRGKPFAIEAENSILDISGFSKQYNCAFIWQKDGVKKLNLYLIINYFKGGKLRFKKIKPEAFEANRFYTVINKKSGEIVPMEVNFNFDDPNLIILPLAFGKRQGREFIWNDLLSLETGSLKLANGRVIEKTLYNRRTRQDEPALFVALTFERREVLDSSNIKPMNLIGVDRGENIPAVIALTDPEGCPLSRFKDSLGNPTHILRIGERYKEKQRTIQAKKEVEQRRAGGYSRKYASKAKNLADDMVRNTARDLLYYAVTQDAMLIFENLSRGFGRQGKRTFMAERQYTRMEDWLTAKLAYEGLPSKTYLSKTLAQYTSKTCSNCGFTITSADYDRVLEKLKKTATGWMTTINGKELKVEGQITYYNRYKRQNVVKDLSVELDRLSEESVNNDISSWTKGRSGEALSLLKKRFSHRPVQEKFVCLNCGFETHADEQAALNIARSWLFLRSQEYKKYQTNKTTGNTDKRAFVETWQSFYRKKLKEVWKPAV

SEQ ID NO: 48325 - protein, 979 aa, synthetic construct
  REGION 1..979: note = engineered CasX variant
QEIKRINKIRRRLVKDSNTKKAGKTGPMKTLLVRVMTPDLRERLENLRKKPENIPQPISNTSRANLNKLLTDYTEMKKAILHVYWEEFQKDPVGLMSRVAQPASKKIDQNKLKPEMDEKGNLTTAGFACSQCGQPLFVYKLEQVSEKGKAYTNYFGRCNVAEHEKLILLAQLKPEKDSDEAVTYSLGKFGQRALDFYSIHVTKESTHPVKPLAQIAGNRYASVPVGKALSDACMGTIASFLSKYQDIIIEHQKVVKGNQKRLESLRELAGKENLEYPSVTLPPQPHTKEGVDAYNEVIARVRMWVNLNLWQKLKLSRDDAKPLLRLKGFPSFPLVERQANEVDWWDMVCNVKKLINEKKEDGKVFWQNLAGYKRQEALRPYLSSEEDRKKGKKFARYQLGDLLLHLEKKHGEYDWGKVYDEAWERIDKKVEGLSKHIKLEEERRSEDAQSKAALTDWLRAKASFVIEGLKEADKDEFCRCELKLQKWYGDLRGKPFAIEAENSILDISGFSKQYNCAFIWQKDGVKKLNLYLIINYFKGGKLRFKKIKPEAFEANRFYTVINKKSGEIVPMEVNFNFDDPNLIILPLAFGKRQGREFIWNDLLSLETGSLKLANGRVIEKTLYNRRTRQDEPALFVALTFERREVLDSSNIKPMNLIGVDRGENIPAVIALTDPEGCPLSRFKDSLGNPTHILRIGERYKEKQRTIQAKKEVEQRRAGGYSRKYASKAKNLADDMVRNTARDLLYYAVTQDAMLIFENLSRGFGRQGKRTFMAERQYTRMEDWLTAKLAYEGLPSKTYLSKTLAQYTSKTCSNCGFTITSADYDRVLEKLKKTATGWMTTINGKELKVEGQITYYNRYKRQNVVKDLSVELDRLSEESVNNDISSWTKGRSGEALSLLKKRFSHRPVQEKFVCLNCGFETHADEQAALNIARSWLFLRSQEYKKYQTNKTTGNTDKRAFVETWQSFYRKKLKEVWKPAV

SEQ ID NO: 48326 - protein, 979 aa, synthetic construct
  REGION 1..979: note = engineered CasX variant
QEIKRINKIRRRLVKDSNTKKAGKTGPMKTLLVRVMTPDLRERLENLRKKPENIPQPISNTSRANLNKLLTDYTEMKKAILHVYWEEFQKDPVGLMSRVAQPASKKIDQNKLKPEMDEKGNLTTAGFACSQCGQPLFVYKLEQVSEKGKAYTNYFGRCNVAEHEKLIKLAQLKPEKDSDEAVTYSLGKFGQRALDFYSIHVTKESTHPVKPLAQIAGNRYASGPVGKALSDACMGTIASFLSKYQDIIIEHQKVVKGNQKRLESLRELAGKENLEYPSVTLPPQPHTKEGVDAYNEVIARVRMWVNLNLWQKLKLSRDDAKPLLRLKGFPSFPLVERQANEVDWWDMVCNVKKLINEKKEDGKVFWQNLAGYKRQEALRPYLSSEEDRKKGKKFARYQLGDLLLHLEKKHGEYDWGKVYDEAWERIDKKVEGLSKHIKLEEERRSEDAQSKAALTDWLRAKASFVIEGLKEADKDEFCRCELKLQKWYGDLRGKPFAIEAENSILDISGFSKQYNCAFIWQKDGVKKLNLYLIINYFKGGKLRFKKIKPEAFEANRFYTVINKKSGEIVPMEVNFNFDDPNLIILPLAFGKRQGREFIWNDLLSLETGSLKLANGRVIEKTLYNRRTRQDEPALFVALTFERREVLDSSNIKPMNLIGVDRGENIPAVIALTDPEGCPLSRFKDSLGNPTHILRIGERYKEKQRTIQAKKEVEQRRAGGYSRKYASKAKNLADDMVRNTARDLLYYAVTQDAMLIFENLSRGFGRQGKRTFMAERQYTRMEDWLTAKLAYEGLPSKTYLSKTLAQYTSKTCSNCGFTITSADYDRVLEKLKKTATGWMTTINGKELKVEGQITYYNRYKRQNVVKDLSVELDRLSEESVNNDISSWTKGRSGEALSLLKKRFSHRPVQEKFVCLNCGFETHADEQAALNIARSWLFLRSQEYKKYQTNKTTGNTDKRAFVETWQSFYRKKLKEVWKPAV

SEQ ID NO: 48327 - protein, 978 aa, synthetic construct
  REGION 1..978: note = engineered CasX variant
QEIKRINKIRRRLVKDSNTKKAGKTGPMKTLLVRVMTPDLRERLENLRKKPENIPQPISNTSRANLNKLLTDYTEMKKAILHVYWEEFQKDPVGLMSRVAQPASKKIDQNKLKPEMDEKGNLTTAGFACSQCGQPLFVYKLEQVSEKGKAYTNYFGRCNVAEHEKLILLAQLKPEKDSDEAVTYSLGKFGQRALDFYSIHVTKESTHPVKPLAQIAGNRYASPVGKALSDACMGTIASFLSKYQDIIIEHQKVVKGNQKRLESLRELAGKENLEYPSVTLPPQPHTKEGVDAYNEVIARVRMWVNLNLWQKLKLSRDDAKPLLRLKGFPSFPLVERQANEVDWWDMVCNVKKLINEKKEDGKVFWQNLAGYKRQEALRPYLSSEEDRKKGKKFARYQLGDLLLHLEKKHGEYDWGKVYDEAWERIDKKVEGLSKHIKLEEERRSEDAQSKAALTDWLRAKASFVIEGLKEADKDEFCRCELKLQKWYGDLRGKPFAIEAENSILDISGFSKQYNCAFIWQKDGVKKLNLYLIINYFKGGKLRFKKIKPEAFEANRFYTVINKKSGEIVPMEVNFNFDDPNLIILPLAFGKRQGREFIWNDLLSLETGSLKLANGRVIEKTLYNRRTRQDEPALFVALTFERREVLDSSNIKPMNLIGVDRGENIPAVIALTDPEGCPLSRFKDSLGNPTHILRIGERYKEKQRTIQAKKEVEQRRAGGYSRKYASKAKNLADDMVRNTARDLLYYAVTQDAMLIFENLSRGFGRQGKRTFMAERQYTRMEDWLTAKLAYEGLPSKTYLSKTLAQYTSKTCSNCGFTITSADYDRVLEKLKKTATGWMTTINGKELKVEGQITYYNRYKRQNVVKDLSVELDRLSEESVNNDISSWTKGRSGEALSLLKKRFSHRPVQEKFVCLNCGFETHADEQAALNIARSWLFLRSQEYKKYQTNKTTGNTDKRAFVETWQSFYRKKLKEVWKPAV

SEQ ID NO: 48328 - protein, 978 aa, synthetic construct
  REGION 1..978: note = engineered CasX variant
QEIKRINKIRRRLVKDSNTKKAGKTGPMKTLLVRVMTPDLRERLENLRKKPENIPQPISNTSRANLNKLLTDYTEMKKAILHVYWEEFQKDPVGLMSRVAQPASKKIDQNKLKPEMDEKGNLTTAGFACSQCGQPLFVYKLEQVSEKGKAYTNYFGRCNVAEHEKLILLAQLKPEKDSDEAVTYSLGKFGQRALDFYSIHVTKESTHPVKPLAQIAGNRYASYPVGKALSDACMGTIASFLSKYQDIIIEHQKVVKGNQKRLESLRELAGKENLEYPSVTLPPQPHTKEGVDAYNEVIARVRMWVNLNLWQKLKLSRDDAKPLLRLKGFPSFPLVERQANEVDWWDMVCNVKKLINEKKEDGKVFWQNLAGYKRQEALRPYLSSEEDRKKGKKFARYQLGDLLLHLEKKHGEDWGDVYDEAWERIDKKVEGLSKHIKLEEERRSEDAQSKAALTDWLRAKASFVIEGLKEADKDEFCRCELKLQKWYGDLRGKPFAIEAENSILDISGFSKQYNCAFIWQKDGVKKLNLYLIINYFKGGKLRFKKIKPEAFEANRFYTVINKKSGEIVPMEVNFNFDDPNLIILPLAFGKRQGREFIWNDLLSLETGSLKLANGRVIEKTLYNRRTRQDEPALFVALTFERREVLDSSNIKPMNLIGVDRGENIPAVIALTDPEGCPLSRFKDSLGNPTHILRIGERYKEKQRTIQAKKEVEQRRAGGYSRKYASKAKNLADDMVRNTARDLLYYAVTQDAMLIFENLSRGFGRQGKRTFMAERQYTRMEDWLTAKLAYEGLPSKTYLSKTLAQYTSKTCSNCGFTITSADYDRVLEKLKKTATGWMTTINGKELKVEGQITYYNRYKRQNVVKDLSVELDRLSEESVNNDISSWTKGRSGEALSLLKKRFSHRPVQEKFVCLNCGFETHADEQAALNIARSWLFLRSQEYKKYQTNKTTGNTDKRAFVETWQSFYRKKLKEVWKPAV

SEQ ID NO: 48329 - protein, 978 aa, synthetic construct
  REGION 1..978: note = engineered CasX variant
QEIKRINKIRRRLVKDSNTKKAGKTGPMKTLLVRVMTPDLRERLENLRKKPENIPQPISNTSRANLNKLLTDYTEMKKAILHVYWEEFQKDPVGLMSRVAQPASKKIDQNKLKPEMDEKGNLTTAGFACSQCGQPLFVYKLEQVSEKGKAYTNYFGRCNVAEHEKLILLAQLKPEKDSDEAVTYSLGKFGQRALDFYSIHVTKESTHPVKPLAQIAGNRYASHPVGKALSDACMGTIASFLSKYQDIIIEHQKVVKGNQKRLESLRELAGKENLEYPSVTLPPQPHTKEGVDAYNEVIARVRMWVNLNLWQKLKLSRDDAKPLLRLKGFPSFPLVERQANEVDWWDMVCNVKKLINEKKEDGKVFWQNLAGYKRQEALRPYLSSEEDRKKGKKFARYQLGDLLLHLEKKHGEDWGDVYDEAWERIDKKVEGLSKHIKLEEERRSEDAQSKAALTDWLRAKASFVIEGLKEADKDEFCRCELKLQKWYGDLRGKPFAIEAENSILDISGFSKQYNCAFIWQKDGVKKLNLYLIINYFKGGKLRFKKIKPEAFEANRFYTVINKKSGEIVPMEVNFNFDDPNLIILPLAFGKRQGREFIWNDLLSLETGSLKLANGRVIEKTLYNRRTRQDEPALFVALTFERREVLDSSNIKPMNLIGVDRGENIPAVIALTDPEGCPLSRFKDSLGNPTHILRIGERYKEKQRTIQAKKEVEQRRAGGYSRKYASKAKNLADDMVRNTARDLLYYAVTQDAMLIFENLSRGFGRQGKRTFMAERQYTRMEDWLTAKLAYEGLPSKTYLSKTLAQYTSKTCSNCGFTITSADYDRVLEKLKKTATGWMTTINGKELKVEGQITYYNRYKRQNVVKDLSVELDRLSEESVNNDISSWTKGRSGEALSLLKKRFSHRPVQEKFVCLNCGFETHADEQAALNIARSWLFLRSQEYKKYQTNKTTGNTDKRAFVETWQSFYRKKLKEVWKPAV

SEQ ID NO: 48330 - protein, 978 aa, synthetic construct
  REGION 1..978: note = engineered CasX variant
QEIKRINKIRRRLVKDSNTKKAGKTGPMKTLLVRVMTPDLRERLENLRKKPENIPQPISNTSRANLNKLLTDYTEMKKAILHVYWEEFQKDPVGLMSRVAQPASKKIDQNKLKPEMDEKGNLTTAGFACSQCGQPLFVYKLEQVSEKGKAYTNYFGRCNVAEHEKLILLAQLKPEKDSDEAVTYSLGKFGQRALDFYSIHVTKESTHPVKPLAQIAGNRYASSPVGKALSDACMGTIASFLSKYQDIIIEHQKVVKGNQKRLESLRELAGKENLEYPSVTLPPQPHTKEGVDAYNEVIARVRMWVNLNLWQKLKLSRDDAKPLLRLKGFPSFPLVERQANEVDWWDMVCNVKKLINEKKEDGKVFWQNLAGYKRQEALRPYLSSEEDRKKGKKFARYQLGDLLLHLEKKHGEDWGDVYDEAWERIDKKVEGLSKHIKLEEERRSEDAQSKAALTDWLRAKASFVIEGLKEADKDEFCRCELKLQKWYGDLRGKPFAIEAENSILDISGFSKQYNCAFIWQKDGVKKLNLYLIINYFKGGKLRFKKIKPEAFEANRFYTVINKKSGEIVPMEVNFNFDDPNLIILPLAFGKRQGREFIWNDLLSLETGSLKLANGRVIEKTLYNRRTRQDEPALFVALTFERREVLDSSNIKPMNLIGVDRGENIPAVIALTDPEGCPLSRFKDSLGNPTHILRIGERYKEKQRTIQAKKEVEQRRAGGYSRKYASKAKNLADDMVRNTARDLLYYAVTQDAMLIFENLSRGFGRQGKRTFMAERQYTRMEDWLTAKLAYEGLPSKTYLSKTLAQYTSKTCSNCGFTITSADYDRVLEKLKKTATGWMTTINGKELKVEGQITYYNRYKRQNVVKDLSVELDRLSEESVNNDISSWTKGRSGEALSLLKKRFSHRPVQEKFVCLNCGFETHADEQAALNIARSWLFLRSQEYKKYQTNKTTGNTDKRAFVETWQSFYRKKLKEVWKPAV

SEQ ID NO: 48331 - protein, 978 aa, synthetic construct
  REGION 1..978: note = engineered CasX variant
QEIKRINKIRRRLVKDSNTKKAGKTGPMKTLLVRVMTPDLRERLENLRKKPENIPQPISNTSRANLNKLLTDYTEMKKAILHVYWEEFQKDPVGLMSRVAQPASKKIDQNKLKPEMDEKGNLTTAGFACSQCGQPLFVYKLEQVSEKGKAYTNYFGRCNVAEHEKLILLAQLKPEKDSDEAVTYSLGKFGQRALDFYSIHVTKESTHPVKPLAQIAGNRYASTPVGKALSDACMGTIASFLSKYQDIIIEHQKVVKGNQKRLESLRELAGKENLEYPSVTLPPQPHTKEGVDAYNEVIARVRMWVNLNLWQKLKLSRDDAKPLLRLKGFPSFPLVERQANEVDWWDMVCNVKKLINEKKEDGKVFWQNLAGYKRQEALRPYLSSEEDRKKGKKFARYQLGDLLLHLEKKHGEDWGDVYDEAWERIDKKVEGLSKHIKLEEERRSEDAQSKAALTDWLRAKASFVIEGLKEADKDEFCRCELKLQKWYGDLRGKPFAIEAENSILDISGFSKQYNCAFIWQKDGVKKLNLYLIINYFKGGKLRFKKIKPEAFEANRFYTVINKKSGEIVPMEVNFNFDDPNLIILPLAFGKRQGREFIWNDLLSLETGSLKLANGRVIEKTLYNRRTRQDEPALFVALTFERREVLDSSNIKPMNLIGVDRGENIPAVIALTDPEGCPLSRFKDSLGNPTHILRIGERYKEKQRTIQAKKEVEQRRAGGYSRKYASKAKNLADDMVRNTARDLLYYAVTQDAMLIFENLSRGFGRQGKRTFMAERQYTRMEDWLTAKLAYEGLPSKTYLSKTLAQYTSKTCSNCGFTITSADYDRVLEKLKKTATGWMTTINGKELKVEGQITYYNRYKRQNVVKDLSVELDRLSEESVNNDISSWTKGRSGEALSLLKKRFSHRPVQEKFVCLNCGFETHADEQAALNIARSWLFLRSQEYKKYQTNKTTGNTDKRAFVETWQSFYRKKLKEVWKPAV

SEQ ID NO: 48332 - protein, 978 aa, synthetic construct
  REGION 1..978: note = engineered CasX variant
QEIKRINKIRRRLVKDSNTKKAGKTGPMKTLLVRVMTPDLRERLENLRKKPENIPQPISNTSRANLNKLLTDYTEMKKAILHVYWEEFQKDPVGLMSRVAQPASKKIDQNKLKPEMDEKGNLTTAGFACSQCGQPLFVYKLEQVSEKGKAYTNYFGRCNVAEHEKLILLAQLKPEKDSDEAVTYSLGKFGQRALDFYSIHVTKESTHPVKPLAQIAGNRYASAPVGKALSDACMGTIASFLSKYQDIIIEHQKVVKGNQKRLESLRELAGKENLEYPSVTLPPQPHTKEGVDAYNEVIARVRMWVNLNLWQKLKLSRDDAKPLLRLKGFPSFPLVERQANEVDWWDMVCNVKKLINEKKEDGKVFWQNLAGYKRQEALRPYLSSEEDRKKGKKFARYQLGDLLLHLEKKHGEDWGDVYDEAWERIDKKVEGLSKHIKLEEERRSEDAQSKAALTDWLRAKASFVIEGLKEADKDEFCRCELKLQKWYGDLRGKPFAIEAENSILDISGFSKQYNCAFIWQKDGVKKLNLYLIINYFKGGKLRFKKIKPEAFEANRFYTVINKKSGEIVPMEVNFNFDDPNLIILPLAFGKRQGREFIWNDLLSLETGSLKLANGRVIEKTLYNRRTRQDEPALFVALTFERREVLDSSNIKPMNLIGVDRGENIPAVIALTDPEGCPLSRFKDSLGNPTHILRIGERYKEKQRTIQAKKEVEQRRAGGYSRKYASKAKNLADDMVRNTARDLLYYAVTQDAMLIFENLSRGFGRQGKRTFMAERQYTRMEDWLTAKLAYEGLPSKTYLSKTLAQYTSKTCSNCGFTITSADYDRVLEKLKKTATGWMTTINGKELKVEGQITYYNRYKRQNVVKDLSVELDRLSEESVNNDISSWTKGRSGEALSLLKKRFSHRPVQEKFVCLNCGFETHADEQAALNIARSWLFLRSQEYKKYQTNKTTGNTDKRAFVETWQSFYRKKLKEVWKPAV

SEQ ID NO: 48333 - protein, 978 aa, synthetic construct
  REGION 1..978: note = engineered CasX variant
QEIKRINKIRRRLVKDSNTKKAGKTGPMKTLLVRVMTPDLRERLENLRKKPENIPQPISNTSRANLNKLLTDYTEMKKAILHVYWEEFQKDPVGLMSRVAQPASKKIDQNKLKPEMDEKGNLTTAGFACSQCGQPLFVYKLEQVSEKGKAYTNYFGRCNVAEHEKLILLAQLKPEKDSDEAVTYSLGKFGQRALDFYSIHVTKESTHPVKPLAQIAGNRYASVPVGKALSDACMGTIASFLSKYQDIIIEHQKVVKGNQKRLESLRELAGKENLEYPSVTLPPQPHTKEGVDAYNEVIARVRMWVNLNLWQKLKLSRDDAKPLLRLKGFPSFPLVERQANEVDWWDMVCNVKKLINEKKEDGKVFWQNLAGYKRQEALRPYLSSEEDRKKGKKFARYQLGDLLLHLEKKHGEDWGDVYDEAWERIDKKVEGLSKHIKLEEERRSEDAQSKAALTDWLRAKASFVIEGLKEADKDEFCRCELKLQKWYGDLRGKPFAIEAENSILDISGFSKQYNCAFIWQKDGVKKLNLYLIINYFKGGKLRFKKIKPEAFEANRFYTVINKKSGEIVPMEVNFNFDDPNLIILPLAFGKRQGREFIWNDLLSLETGSLKLANGRVIEKTLYNRRTRQDEPALFVALTFERREVLDSSNIKPMNLIGVDRGENIPAVIALTDPEGCPLSRFKDSLGNPTHILRIGERYKEKQRTIQAKKEVEQRRAGGYSRKYASKAKNLADDMVRNTARDLLYYAVTQDAMLIFENLSRGFGRQGKRTFMAERQYTRMEDWLTAKLAYEGLPSKTYLSKTLAQYTSKTCSNCGFTITSADYDRVLEKLKKTATGWMTTINGKELKVEGQITYYNRYKRQNVVKDLSVELDRLSEESVNNDISSWTKGRSGEALSLLKKRFSHRPVQEKFVCLNCGFETHADEQAALNIARSWLFLRSQEYKKYQTNKTTGNTDKRAFVETWQSFYRKKLKEVWKPAV

SEQ ID NO: 48334 - protein, 978 aa, synthetic construct
  REGION 1..978: note = engineered CasX variant
QEIKRINKIRRRLVKDSNTKKAGKTGPMKTLLVRVMTPDLRERLENLRKKPENIPQPISNTSRANLNKLLTDYTEMKKAILHVYWEEFQKDPVGLMSRVAQPASKKIDQNKLKPEMDEKGNLTTAGFACSQCGQPLFVYKLEQVSEKGKAYTNYFGRCNVAEHEKLIKLAQLKPEKDSDEAVTYSLGKFGQRALDFYSIHVTKESTHPVKPLAQIAGNRYASGPVGKALSDACMGTIASFLSKYQDIIIEHQKVVKGNQKRLESLRELAGKENLEYPSVTLPPQPHTKEGVDAYNEVIARVRMWVNLNLWQKLKLSRDDAKPLLRLKGFPSFPLVERQANEVDWWDMVCNVKKLINEKKEDGKVFWQNLAGYKRQEALRPYLSSEEDRKKGKKFARYQLGDLLLHLEKKHGEDWGDVYDEAWERIDKKVEGLSKHIKLEEERRSEDAQSKAALTDWLRAKASFVIEGLKEADKDEFCRCELKLQKWYGDLRGKPFAIEAENSILDISGFSKQYNCAFIWQKDGVKKLNLYLIINYFKGGKLRFKKIKPEAFEANRFYTVINKKSGEIVPMEVNFNFDDPNLIILPLAFGKRQGREFIWNDLLSLETGSLKLANGRVIEKTLYNRRTRQDEPALFVALTFERREVLDSSNIKPMNLIGVDRGENIPAVIALTDPEGCPLSRFKDSLGNPTHILRIGERYKEKQRTIQAKKEVEQRRAGGYSRKYASKAKNLADDMVRNTARDLLYYAVTQDAMLIFENLSRGFGRQGKRTFMAERQYTRMEDWLTAKLAYEGLPSKTYLSKTLAQYTSKTCSNCGFTITSADYDRVLEKLKKTATGWMTTINGKELKVEGQITYYNRYKRQNVVKDLSVELDRLSEESVNNDISSWTKGRSGEALSLLKKRFSHRPVQEKFVCLNCGFETHADEQAALNIARSWLFLRSQEYKKYQTNKTTGNTDKRAFVETWQSFYRKKLKEVWKPAV

SEQ ID NO: 48335 - protein, 977 aa, synthetic construct
  REGION 1..977: note = engineered CasX variant
QEIKRINKIRRRLVKDSNTKKAGKTGPMKTLLVRVMTPDLRERLENLRKKPENIPQPISNTSRANLNKLLTDYTEMKKAILHVYWEEFQKDPVGLMSRVAQPASKKIDQNKLKPEMDEKGNLTTAGFACSQCGQPLFVYKLEQVSEKGKAYTNYFGRCNVAEHEKLILLAQLKPEKDSDEAVTYSLGKFGQRALDFYSIHVTKESTHPVKPLAQIAGNRYASPVGKALSDACMGTIASFLSKYQDIIIEHQKVVKGNQKRLESLRELAGKENLEYPSVTLPPQPHTKEGVDAYNEVIARVRMWVNLNLWQKLKLSRDDAKPLLRLKGFPSFPLVERQANEVDWWDMVCNVKKLINEKKEDGKVFWQNLAGYKRQEALRPYLSSEEDRKKGKKFARYQLGDLLLHLEKKHGEDWGDVYDEAWERIDKKVEGLSKHIKLEEERRSEDAQSKAALTDWLRAKASFVIEGLKEADKDEFCRCELKLQKWYGDLRGKPFAIEAENSILDISGFSKQYNCAFIWQKDGVKKLNLYLIINYFKGGKLRFKKIKPEAFEANRFYTVINKKSGEIVPMEVNFNFDDPNLIILPLAFGKRQGREFIWNDLLSLETGSLKLANGRVIEKTLYNRRTRQDEPALFVALTFERREVLDSSNIKPMNLIGVDRGENIPAVIALTDPEGCPLSRFKDSLGNPTHILRIGERYKEKQRTIQAKKEVEQRRAGGYSRKYASKAKNLADDMVRNTARDLLYYAVTQDAMLIFENLSRGFGRQGKRTFMAERQYTRMEDWLTAKLAYEGLPSKTYLSKTLAQYTSKTCSNCGFTITSADYDRVLEKLKKTATGWMTTINGKELKVEGQITYYNRYKRQNVVKDLSVELDRLSEESVNNDISSWTKGRSGEALSLLKKRFSHRPVQEKFVCLNCGFETHADEQAALNIARSWLFLRSQEYKKYQTNKTTGNTDKRAFVETWQSFYRKKLKEVWKPAV

SEQ ID NO: 48336 - protein, 978 aa, synthetic construct
  REGION 1..978: note = engineered CasX variant
QEIKRINKIRRRLVKDSNTKKAGKTGPMKTLLVRVMTPDLRERLENLRKKPENIPQPISNTSRANLNKLLTDYTEMKKAILHVYWEEFQKDPVGLMSRVAQPASKKIDQNKLKPEMDEKGNLTTAGFACSQCGQPLFVYKLEQVSEKGKAYTNYFGRCNVAEHEKLILLAQLKPEKDSDEAVTYSLGKFGQRALDFYSIHVTKESTHPVKPLAQIAGNRYASYPVGKALSDACMGTIASFLSKYQDIIIEHQKVVKGNQKRLESLRELAGKENLEYPSVTLPPQPHTKEGVDAYNEVIARVRMWVNLNLWQKLKLSRDDAKPLLRLKGFPSFPLVERQANEVDWWDMVCNVKKLINEKKEDGKVFWQNLAGYKRQEALRPYLSSEEDRKKGKKFARYQLGDLLLHLEKKHGEDWGKVYGEAWERIDKKVEGLSKHIKLEEERRSEDAQSKAALTDWLRAKASFVIEGLKEADKDEFCRCELKLQKWYGDLRGKPFAIEAENSILDISGFSKQYNCAFIWQKDGVKKLNLYLIINYFKGGKLRFKKIKPEAFEANRFYTVINKKSGEIVPMEVNFNFDDPNLIILPLAFGKRQGREFIWNDLLSLETGSLKLANGRVIEKTLYNRRTRQDEPALFVALTFERREVLDSSNIKPMNLIGVDRGENIPAVIALTDPEGCPLSRFKDSLGNPTHILRIGERYKEKQRTIQAKKEVEQRRAGGYSRKYASKAKNLADDMVRNTARDLLYYAVTQDAMLIFENLSRGFGRQGKRTFMAERQYTRMEDWLTAKLAYEGLPSKTYLSKTLAQYTSKTCSNCGFTITSADYDRVLEKLKKTATGWMTTINGKELKVEGQITYYNRYKRQNVVKDLSVELDRLSEESVNNDISSWTKGRSGEALSLLKKRFSHRPVQEKFVCLNCGFETHADEQAALNIARSWLFLRSQEYKKYQTNKTTGNTDKRAFVETWQSFYRKKLKEVWKPAV

SEQ ID NO: 48337 - protein, 978 aa, synthetic construct
  REGION 1..978: note = engineered CasX variant
QEIKRINKIRRRLVKDSNTKKAGKTGPMKTLLVRVMTPDLRERLENLRKKPENIPQPISNTSRANLNKLLTDYTEMKKAILHVYWEEFQKDPVGLMSRVAQPASKKIDQNKLKPEMDEKGNLTTAGFACSQCGQPLFVYKLEQVSEKGKAYTNYFGRCNVAEHEKLILLAQLKPEKDSDEAVTYSLGKFGQRALDFYSIHVTKESTHPVKPLAQIAGNRYASHPVGKALSDACMGTIASFLSKYQDIIIEHQKVVKGNQKRLESLRELAGKENLEYPSVTLPPQPHTKEGVDAYNEVIARVRMWVNLNLWQKLKLSRDDAKPLLRLKGFPSFPLVERQANEVDWWDMVCNVKKLINEKKEDGKVFWQNLAGYKRQEALRPYLSSEEDRKKGKKFARYQLGDLLLHLEKKHGEDWGKVYGEAWERIDKKVEGLSKHIKLEEERRSEDAQSKAALTDWLRAKASFVIEGLKEADKDEFCRCELKLQKWYGDLRGKPFAIEAENSILDISGFSKQYNCAFIWQKDGVKKLNLYLIINYFKGGKLRFKKIKPEAFEANRFYTVINKKSGEIVPMEVNFNFDDPNLIILPLAFGKRQGREFIWNDLLSLETGSLKLANGRVIEKTLYNRRTRQDEPALFVALTFERREVLDSSNIKPMNLIGVDRGENIPAVIALTDPEGCPLSRFKDSLGNPTHILRIGERYKEKQRTIQAKKEVEQRRAGGYSRKYASKAKNLADDMVRNTARDLLYYAVTQDAMLIFENLSRGFGRQGKRTFMAERQYTRMEDWLTAKLAYEGLPSKTYLSKTLAQYTSKTCSNCGFTITSADYDRVLEKLKKTATGWMTTINGKELKVEGQITYYNRYKRQNVVKDLSVELDRLSEESVNNDISSWTKGRSGEALSLLKKRFSHRPVQEKFVCLNCGFETHADEQAALNIARSWLFLRSQEYKKYQTNKTTGNTDKRAFVETWQSFYRKKLKEVWKPAV

SEQ ID NO: 48338 - protein, 978 aa, synthetic construct
  REGION 1..978: note = engineered CasX variant
QEIKRINKIRRRLVKDSNTKKAGKTGPMKTLLVRVMTPDLRERLENLRKKPENIPQPISNTSRANLNKLLTDYTEMKKAILHVYWEEFQKDPVGLMSRVAQPASKKIDQNKLKPEMDEKGNLTTAGFACSQCGQPLFVYKLEQVSEKGKAYTNYFGRCNVAEHEKLILLAQLKPEKDSDEAVTYSLGKFGQRALDFYSIHVTKESTHPVKPLAQIAGNRYASSPVGKALSDACMGTIASFLSKYQDIIIEHQKVVKGNQKRLESLRELAGKENLEYPSVTLPPQPHTKEGVDAYNEVIARVRMWVNLNLWQKLKLSRDDAKPLLRLKGFPSFPLVERQANEVDWWDMVCNVKKLINEKKEDGKVFWQNLAGYKRQEALRPYLSSEEDRKKGKKFARYQLGDLLLHLEKKHGEDWGKVYGEAWERIDKKVEGLSKHIKLEEERRSEDAQSKAALTDWLRAKASFVIEGLKEADKDEFCRCELKLQKWYGDLRGKPFAIEAENSILDISGFSKQYNCAFIWQKDGVKKLNLYLIINYFKGGKLRFKKIKPEAFEANRFYTVINKKSGEIVPMEVNFNFDDPNLIILPLAFGKRQGREFIWNDLLSLETGSLKLANGRVIEKTLYNRRTRQDEPALFVALTFERREVLDSSNIKPMNLIGVDRGENIPAVIALTDPEGCPLSRFKDSLGNPTHILRIGERYKEKQRTIQAKKEVEQRRAGGYSRKYASKAKNLADDMVRNTARDLLYYAVTQDAMLIFENLSRGFGRQGKRTFMAERQYTRMEDWLTAKLAYEGLPSKTYLSKTLAQYTSKTCSNCGFTITSADYDRVLEKLKKTATGWMTTINGKELKVEGQITYYNRYKRQNVVKDLSVELDRLSEESVNNDISSWTKGRSGEALSLLKKRFSHRPVQEKFVCLNCGFETHADEQAALNIARSWLFLRSQEYKKYQTNKTTGNTDKRAFVETWQSFYRKKLKEVWKPAV

SEQ ID NO: 48339 - protein, 978 aa, synthetic construct
  REGION 1..978: note = engineered CasX variant
QEIKRINKIRRRLVKDSNTKKAGKTGPMKTLLVRVMTPDLRERLENLRKKPENIPQPISNTSRANLNKLLTDYTEMKKAILHVYWEEFQKDPVGLMSRVAQPASKKIDQNKLKPEMDEKGNLTTAGFACSQCGQPLFVYKLEQVSEKGKAYTNYFGRCNVAEHEKLILLAQLKPEKDSDEAVTYSLGKFGQRALDFYSIHVTKESTHPVKPLAQIAGNRYASTPVGKALSDACMGTIASFLSKYQDIIIEHQKVVKGNQKRLESLRELAGKENLEYPSVTLPPQPHTKEGVDAYNEVIARVRMWVNLNLWQKLKLSRDDAKPLLRLKGFPSFPLVERQANEVDWWDMVCNVKKLINEKKEDGKVFWQNLAGYKRQEALRPYLSSEEDRKKGKKFARYQLGDLLLHLEKKHGEDWGKVYGEAWERIDKKVEGLSKHIKLEEERRSEDAQSKAALTDWLRAKASFVIEGLKEADKDEFCRCELKLQKWYGDLRGKPFAIEAENSILDISGFSKQYNCAFIWQKDGVKKLNLYLIINYFKGGKLRFKKIKPEAFEANRFYTVINKKSGEIVPMEVNFNFDDPNLIILPLAFGKRQGREFIWNDLLSLETGSLKLANGRVIEKTLYNRRTRQDEPALFVALTFERREVLDSSNIKPMNLIGVDRGENIPAVIALTDPEGCPLSRFKDSLGNPTHILRIGERYKEKQRTIQAKKEVEQRRAGGYSRKYASKAKNLADDMVRNTARDLLYYAVTQDAMLIFENLSRGFGRQGKRTFMAERQYTRMEDWLTAKLAYEGLPSKTYLSKTLAQYTSKTCSNCGFTITSADYDRVLEKLKKTATGWMTTINGKELKVEGQITYYNRYKRQNVVKDLSVELDRLSEESVNNDISSWTKGRSGEALSLLKKRFSHRPVQEKFVCLNCGFETHADEQAALNIARSWLFLRSQEYKKYQTNKTTGNTDKRAFVETWQSFYRKKLKEVWKPAV

SEQ ID NO: 48340 - protein, 978 aa, synthetic construct
  REGION 1..978: note = engineered CasX variant
QEIKRINKIRRRLVKDSNTKKAGKTGPMKTLLVRVMTPDLRERLENLRKKPENIPQPISNTSRANLNKLLTDYTEMKKAILHVYWEEFQKDPVGLMSRVAQPASKKIDQNKLKPEMDEKGNLTTAGFACSQCGQPLFVYKLEQVSEKGKAYTNYFGRCNVAEHEKLILLAQLKPEKDSDEAVTYSLGKFGQRALDFYSIHVTKESTHPVKPLAQIAGNRYASAPVGKALSDACMGTIASFLSKYQDIIIEHQKVVKGNQKRLESLRELAGKENLEYPSVTLPPQPHTKEGVDAYNEVIARVRMWVNLNLWQKLKLSRDDAKPLLRLKGFPSFPLVERQANEVDWWDMVCNVKKLINEKKEDGKVFWQNLAGYKRQEALRPYLSSEEDRKKGKKFARYQLGDLLLHLEKKHGEDWGKVYGEAWERIDKKVEGLSKHIKLEEERRSEDAQSKAALTDWLRAKASFVIEGLKEADKDEFCRCELKLQKWYGDLRGKPFAIEAENSILDISGFSKQYNCAFIWQKDGVKKLNLYLIINYFKGGKLRFKKIKPEAFEANRFYTVINKKSGEIVPMEVNFNFDDPNLIILPLAFGKRQGREFIWNDLLSLETGSLKLANGRVIEKTLYNRRTRQDEPALFVALTFERREVLDSSNIKPMNLIGVDRGENIPAVIALTDPEGCPLSRFKDSLGNPTHILRIGERYKEKQRTIQAKKEVEQRRAGGYSRKYASKAKNLADDMVRNTARDLLYYAVTQDAMLIFENLSRGFGRQGKRTFMAERQYTRMEDWLTAKLAYEGLPSKTYLSKTLAQYTSKTCSNCGFTITSADYDRVLEKLKKTATGWMTTINGKELKVEGQITYYNRYKRQNVVKDLSVELDRLSEESVNNDISSWTKGRSGEALSLLKKRFSHRPVQEKFVCLNCGFETHADEQAALNIARSWLFLRSQEYKKYQTNKTTGNTDKRAFVETWQSFYRKKLKEVWKPAV

SEQ ID NO: 48341 - protein, 978 aa, synthetic construct
  REGION 1..978: note = engineered CasX variant
QEIKRINKIRRRLVKDSNTKKAGKTGPMKTLLVRVMTPDLRERLENLRKKPENIPQPISNTSRANLNKLLTDYTEMKKAILHVYWEEFQKDPVGLMSRVAQPASKKIDQNKLKPEMDEKGNLTTAGFACSQCGQPLFVYKLEQVSEKGKAYTNYFGRCNVAEHEKLILLAQLKPEKDSDEAVTYSLGKFGQRALDFYSIHVTKESTHPVKPLAQIAGNRYASVPVGKALSDACMGTIASFLSKYQDIIIEHQKVVKGNQKRLESLRELAGKENLEYPSVTLPPQPHTKEGVDAYNEVIARVRMWVNLNLWQKLKLSRDDAKPLLRLKGFPSFPLVERQANEVDWWDMVCNVKKLINEKKEDGKVFWQNLAGYKRQEALRPYLSSEEDRKKGKKFARYQLGDLLLHLEKKHGEDWGKVYGEAWERIDKKVEGLSKHIKLEEERRSEDAQSKAALTDWLRAKASFVIEGLKEADKDEFCRCELKLQKWYGDLRGKPFAIEAENSILDISGFSKQYNCAFIWQKDGVKKLNLYLIINYFKGGKLRFKKIKPEAFEANRFYTVINKKSGEIVPMEVNFNFDDPNLIILPLAFGKRQGREFIWNDLLSLETGSLKLANGRVIEKTLYNRRTRQDEPALFVALTFERREVLDSSNIKPMNLIGVDRGENIPAVIALTDPEGCPLSRFKDSLGNPTHILRIGERYKEKQRTIQAKKEVEQRRAGGYSRKYASKAKNLADDMVRNTARDLLYYAVTQDAMLIFENLSRGFGRQGKRTFMAERQYTRMEDWLTAKLAYEGLPSKTYLSKTLAQYTSKTCSNCGFTITSADYDRVLEKLKKTATGWMTTINGKELKVEGQITYYNRYKRQNVVKDLSVELDRLSEESVNNDISSWTKGRSGEALSLLKKRFSHRPVQEKFVCLNCGFETHADEQAALNIARSWLFLRSQEYKKYQTNKTTGNTDKRAFVETWQSFYRKKLKEVWKPAV

SEQ ID NO: 48342 - protein, 978 aa, synthetic construct
  REGION 1..978: note = engineered CasX variant
QEIKRINKIRRRLVKDSNTKKAGKTGPMKTLLVRVMTPDLRERLENLRKKPENIPQPISNTSRANLNKLLTDYTEMKKAILHVYWEEFQKDPVGLMSRVAQPASKKIDQNKLKPEMDEKGNLTTAGFACSQCGQPLFVYKLEQVSEKGKAYTNYFGRCNVAEHEKLIKLAQLKPEKDSDEAVTYSLGKFGQRALDFYSIHVTKESTHPVKPLAQIAGNRYASGPVGKALSDACMGTIASFLSKYQDIIIEHQKVVKGNQKRLESLRELAGKENLEYPSVTLPPQPHTKEGVDAYNEVIARVRMWVNLNLWQKLKLSRDDAKPLLRLKGFPSFPLVERQANEVDWWDMVCNVKKLINEKKEDGKVFWQNLAGYKRQEALRPYLSSEEDRKKGKKFARYQLGDLLLHLEKKHGEDWGKVYGEAWERIDKKVEGLSKHIKLEEERRSEDAQSKAALTDWLRAKASFVIEGLKEADKDEFCRCELKLQKWYGDLRGKPFAIEAENSILDISGFSKQYNCAFIWQKDGVKKLNLYLIINYFKGGKLRFKKIKPEAFEANRFYTVINKKSGEIVPMEVNFNFDDPNLIILPLAFGKRQGREFIWNDLLSLETGSLKLANGRVIEKTLYNRRTRQDEPALFVALTFERREVLDSSNIKPMNLIGVDRGENIPAVIALTDPEGCPLSRFKDSLGNPTHILRIGERYKEKQRTIQAKKEVEQRRAGGYSRKYASKAKNLADDMVRNTARDLLYYAVTQDAMLIFENLSRGFGRQGKRTFMAERQYTRMEDWLTAKLAYEGLPSKTYLSKTLAQYTSKTCSNCGFTITSADYDRVLEKLKKTATGWMTTINGKELKVEGQITYYNRYKRQNVVKDLSVELDRLSEESVNNDISSWTKGRSGEALSLLKKRFSHRPVQEKFVCLNCGFETHADEQAALNIARSWLFLRSQEYKKYQTNKTTGNTDKRAFVETWQSFYRKKLKEVWKPAV

SEQ ID NO: 48343 - protein, 977 aa, synthetic construct
  REGION 1..977: note = engineered CasX variant
QEIKRINKIRRRLVKDSNTKKAGKTGPMKTLLVRVMTPDLRERLENLRKKPENIPQPISNTSRANLNKLLTDYTEMKKAILHVYWEEFQKDPVGLMSRVAQPASKKIDQNKLKPEMDEKGNLTTAGFACSQCGQPLFVYKLEQVSEKGKAYTNYFGRCNVAEHEKLILLAQLKPEKDSDEAVTYSLGKFGQRALDFYSIHVTKESTHPVKPLAQIAGNRYASPVGKALSDACMGTIASFLSKYQDIIIEHQKVVKGNQKRLESLRELAGKENLEYPSVTLPPQPHTKEGVDAYNEVIARVRMWVNLNLWQKLKLSRDDAKPLLRLKGFPSFPLVERQANEVDWWDMVCNVKKLINEKKEDGKVFWQNLAGYKRQEALRPYLSSEEDRKKGKKFARYQLGDLLLHLEKKHGEDWGKVYGEAWERIDKKVEGLSKHIKLEEERRSEDAQSKAALTDWLRAKASFVIEGLKEADKDEFCRCELKLQKWYGDLRGKPFAIEAENSILDISGFSKQYNCAFIWQKDGVKKLNLYLIINYFKGGKLRFKKIKPEAFEANRFYTVINKKSGEIVPMEVNFNFDDPNLIILPLAFGKRQGREFIWNDLLSLETGSLKLANGRVIEKTLYNRRTRQDEPALFVALTFERREVLDSSNIKPMNLIGVDRGENIPAVIALTDPEGCPLSRFKDSLGNPTHILRIGERYKEKQRTIQAKKEVEQRRAGGYSRKYASKAKNLADDMVRNTARDLLYYAVTQDAMLIFENLSRGFGRQGKRTFMAERQYTRMEDWLTAKLAYEGLPSKTYLSKTLAQYTSKTCSNCGFTITSADYDRVLEKLKKTATGWMTTINGKELKVEGQITYYNRYKRQNVVKDLSVELDRLSEESVNNDISSWTKGRSGEALSLLKKRFSHRPVQEKFVCLNCGFETHADEQAALNIARSWLFLRSQEYKKYQTNKTTGNTDKRAFVETWQSFYRKKLKEVWKPAV

SEQ ID NO: 48344 - protein, 978 aa, synthetic construct
  REGION 1..978: note = engineered CasX variant
QEIKRINKIRRRLVKDSNTKKAGKTGPMKTLLVRVMTPDLRERLENLRKKPENIPQPISNTSRANLNKLLTDYTEMKKAILHVYWEEFQKDPVGLMSRVAQPASKKIDQNKLKPEMDEKGNLTTAGFACSQCGQPLFVYKLEQVSEKGKAYTNYFGRCNVAEHEKLILLAQLKPEKDSDEAVTYSLGKFGQRALDFYSIHVTKESTHPVKPLAQIAGNRYASYPVGKALSDACMGTIASFLSKYQDIIIEHQKVVKGNQKRLESLRELAGKENLEYPSVTLPPQPHTKEGVDAYNEVIARVRMWVNLNLWQKLKLSRDDAKPLLRLKGFPSFPLVERQANEVDWWDMVCNVKKLINEKKEDGKVFWQNLAGYKRQEALRPYLSSEEDRKKGKKFARYQLGDLLLHLEKKHGEDWGKVYDEAWERIDKKVEGLSKHIKLEEERRSEDAQSKAALTDWLRAKASFVIEGKKEADKDEFCRCELKLQKWYGDLRGKPFAIEAENSILDISGFSKQYNCAFIWQKDGVKKLNLYLIINYFKGGKLRFKKIKPEAFEANRFYTVINKKSGEIVPMEVNFNFDDPNLIILPLAFGKRQGREFIWNDLLSLETGSLKLANGRVIEKTLYNRRTRQDEPALFVALTFERREVLDSSNIKPMNLIGVDRGENIPAVIALTDPEGCPLSRFKDSLGNPTHILRIGERYKEKQRTIQAKKEVEQRRAGGYSRKYASKAKNLADDMVRNTARDLLYYAVTQDAMLIFENLSRGFGRQGKRTFMAERQYTRMEDWLTAKLAYEGLPSKTYLSKTLAQYTSKTCSNCGFTITSADYDRVLEKLKKTATGWMTTINGKELKVEGQITYYNRYKRQNVVKDLSVELDRLSEESVNNDISSWTKGRSGEALSLLKKRFSHRPVQEKFVCLNCGFETHADEQAALNIARSWLFLRSQEYKKYQTNKTTGNTDKRAFVETWQSFYRKKLKEVWKPAV

SEQ ID NO: 48345 - protein, 978 aa, synthetic construct
  REGION 1..978: note = engineered CasX variant
QEIKRINKIRRRLVKDSNTKKAGKTGPMKTLLVRVMTPDLRERLENLRKKPENIPQPISNTSRANLNKLLTDYTEMKKAILHVYWEEFQKDPVGLMSRVAQPASKKIDQNKLKPEMDEKGNLTTAGFACSQCGQPLFVYKLEQVSEKGKAYTNYFGRCNVAEHEKLILLAQLKPEKDSDEAVTYSLGKFGQRALDFYSIHVTKESTHPVKPLAQIAGNRYASHPVGKALSDACMGTIASFLSKYQDIIIEHQKVVKGNQKRLESLRELAGKENLEYPSVTLPPQPHTKEGVDAYNEVIARVRMWVNLNLWQKLKLSRDDAKPLLRLKGFPSFPLVERQANEVDWWDMVCNVKKLINEKKEDGKVFWQNLAGYKRQEALRPYLSSEEDRKKGKKFARYQLGDLLLHLEKKHGEDWGKVYDEAWERIDKKVEGLSKHIKLEEERRSEDAQSKAALTDWLRAKASFVIEGKKEADKDEFCRCELKLQKWYGDLRGKPFAIEAENSILDISGFSKQYNCAFIWQKDGVKKLNLYLIINYFKGGKLRFKKIKPEAFEANRFYTVINKKSGEIVPMEVNFNFDDPNLIILPLAFGKRQGREFIWNDLLSLETGSLKLANGRVIEKTLYNRRTRQDEPALFVALTFERREVLDSSNIKPMNLIGVDRGENIPAVIALTDPEGCPLSRFKDSLGNPTHILRIGERYKEKQRTIQAKKEVEQRRAGGYSRKYASKAKNLADDMVRNTARDLLYYAVTQDAMLIFENLSRGFGRQGKRTFMAERQYTRMEDWLTAKLAYEGLPSKTYLSKTLAQYTSKTCSNCGFTITSADYDRVLEKLKKTATGWMTTINGKELKVEGQITYYNRYKRQNVVKDLSVELDRLSEESVNNDISSWTKGRSGEALSLLKKRFSHRPVQEKFVCLNCGFETHADEQAALNIARSWLFLRSQEYKKYQTNKTTGNTDKRAFVETWQSFYRKKLKEVWKPAV

SEQ ID NO: 48346 - protein, 978 aa, synthetic construct
  REGION 1..978: note = engineered CasX variant
QEIKRINKIRRRLVKDSNTKKAGKTGPMKTLLVRVMTPDLRERLENLRKKPENIPQPISNTSRANLNKLLTDYTEMKKAILHVYWEEFQKDPVGLMSRVAQPASKKIDQNKLKPEMDEKGNLTTAGFACSQCGQPLFVYKLEQVSEKGKAYTNYFGRCNVAEHEKLILLAQLKPEKDSDEAVTYSLGKFGQRALDFYSIHVTKESTHPVKPLAQIAGNRYASSPVGKALSDACMGTIASFLSKYQDIIIEHQKVVKGNQKRLESLRELAGKENLEYPSVTLPPQPHTKEGVDAYNEVIARVRMWVNLNLWQKLKLSRDDAKPLLRLKGFPSFPLVERQANEVDWWDMVCNVKKLINEKKEDGKVFWQNLAGYKRQEALRPYLSSEEDRKKGKKFARYQLGDLLLHLEKKHGEDWGKVYDEAWERIDKKVEGLSKHIKLEEERRSEDAQSKAALTDWLRAKASFVIEGKKEADKDEFCRCELKLQKWYGDLRGKPFAIEAENSILDISGFSKQYNCAFIWQKDGVKKLNLYLIINYFKGGKLRFKKIKPEAFEANRFYTVINKKSGEIVPMEVNFNFDDPNLIILPLAFGKRQGREFIWNDLLSLETGSLKLANGRVIEKTLYNRRTRQDEPALFVALTFERREVLDSSNIKPMNLIGVDRGENIPAVIALTDPEGCPLSRFKDSLGNPTHILRIGERYKEKQRTIQAKKEVEQRRAGGYSRKYASKAKNLADDMVRNTARDLLYYAVTQDAMLIFENLSRGFGRQGKRTFMAERQYTRMEDWLTAKLAYEGLPSKTYLSKTLAQYTSKTCSNCGFTITSADYDRVLEKLKKTATGWMTTINGKELKVEGQITYYNRYKRQNVVKDLSVELDRLSEESVNNDISSWTKGRSGEALSLLKKRFSHRPVQEKFVCLNCGFETHADEQAALNIARSWLFLRSQEYKKYQTNKTTGNTDKRAFVETWQSFYRKKLKEVWKPAV

SEQ ID NO: 48347 - protein, 978 aa, synthetic construct
  REGION 1..978: note = engineered CasX variant
QEIKRINKIRRRLVKDSNTKKAGKTGPMKTLLVRVMTPDLRERLENLRKKPENIPQPISNTSRANLNKLLTDYTEMKKAILHVYWEEFQKDPVGLMSRVAQPASKKIDQNKLKPEMDEKGNLTTAGFACSQCGQPLFVYKLEQVSEKGKAYTNYFGRCNVAEHEKLILLAQLKPEKDSDEAVTYSLGKFGQRALDFYSIHVTKESTHPVKPLAQIAGNRYASTPVGKALSDACMGTIASFLSKYQDIIIEHQKVVKGNQKRLESLRELAGKENLEYPSVTLPPQPHTKEGVDAYNEVIARVRMWVNLNLWQKLKLSRDDAKPLLRLKGFPSFPLVERQANEVDWWDMVCNVKKLINEKKEDGKVFWQNLAGYKRQEALRPYLSSEEDRKKGKKFARYQLGDLLLHLEKKHGEDWGKVYDEAWERIDKKVEGLSKHIKLEEERRSEDAQSKAALTDWLRAKASFVIEGKKEADKDEFCRCELKLQKWYGDLRGKPFAIEAENSILDISGFSKQYNCAFIWQKDGVKKLNLYLIINYFKGGKLRFKKIKPEAFEANRFYTVINKKSGEIVPMEVNFNFDDPNLIILPLAFGKRQGREFIWNDLLSLETGSLKLANGRVIEKTLYNRRTRQDEPALFVALTFERREVLDSSNIKPMNLIGVDRGENIPAVIALTDPEGCPLSRFKDSLGNPTHILRIGERYKEKQRTIQAKKEVEQRRAGGYSRKYASKAKNLADDMVRNTARDLLYYAVTQDAMLIFENLSRGFGRQGKRTFMAERQYTRMEDWLTAKLAYEGLPSKTYLSKTLAQYTSKTCSNCGFTITSADYDRVLEKLKKTATGWMTTINGKELKVEGQITYYNRYKRQNVVKDLSVELDRLSEESVNNDISSWTKGRSGEALSLLKKRFSHRPVQEKFVCLNCGFETHADEQAALNIARSWLFLRSQEYKKYQTNKTTGNTDKRAFVETWQSFYRKKLKEVWKPAV

SEQ ID NO: 48348 - protein, 978 aa, synthetic construct
  REGION 1..978: note = engineered CasX variant
QEIKRINKIRRRLVKDSNTKKAGKTGPMKTLLVRVMTPDLRERLENLRKKPENIPQPISNTSRANLNKLLTDYTEMKKAILHVYWEEFQKDPVGLMSRVAQPASKKIDQNKLKPEMDEKGNLTTAGFACSQCGQPLFVYKLEQVSEKGKAYTNYFGRCNVAEHEKLILLAQLKPEKDSDEAVTYSLGKFGQRALDFYSIHVTKESTHPVKPLAQIAGNRYASAPVGKALSDACMGTIASFLSKYQDIIIEHQKVVKGNQKRLESLRELAGKENLEYPSVTLPPQPHTKEGVDAYNEVIARVRMWVNLNLWQKLKLSRDDAKPLLRLKGFPSFPLVERQANEVDWWDMVCNVKKLINEKKEDGKVFWQNLAGYKRQEALRPYLSSEEDRKKGKKFARYQLGDLLLHLEKKHGEDWGKVYDEAWERIDKKVEGLSKHIKLEEERRSEDAQSKAALTDWLRAKASFVIEGKKEADKDEFCRCELKLQKWYGDLRGKPFAIEAENSILDISGFSKQYNCAFIWQKDGVKKLNLYLIINYFKGGKLRFKKIKPEAFEANRFYTVINKKSGEIVPMEVNFNFDDPNLIILPLAFGKRQGREFIWNDLLSLETGSLKLANGRVIEKTLYNRRTRQDEPALFVALTFERREVLDSSNIKPMNLIGVDRGENIPAVIALTDPEGCPLSRFKDSLGNPTHILRIGERYKEKQRTIQAKKEVEQRRAGGYSRKYASKAKNLADDMVRNTARDLLYYAVTQDAMLIFENLSRGFGRQGKRTFMAERQYTRMEDWLTAKLAYEGLPSKTYLSKTLAQYTSKTCSNCGFTITSADYDRVLEKLKKTATGWMTTINGKELKVEGQITYYNRYKRQNVVKDLSVELDRLSEESVNNDISSWTKGRSGEALSLLKKRFSHRPVQEKFVCLNCGFETHADEQAALNIARSWLFLRSQEYKKYQTNKTTGNTDKRAFVETWQSFYRKKLKEVWKPAV

SEQ ID NO: 48349 - protein, 978 aa, synthetic construct
  REGION 1..978: note = engineered CasX variant
QEIKRINKIRRRLVKDSNTKKAGKTGPMKTLLVRVMTPDLRERLENLRKKPENIPQPISNTSRANLNKLLTDYTEMKKAILHVYWEEFQKDPVGLMSRVAQPASKKIDQNKLKPEMDEKGNLTTAGFACSQCGQPLFVYKLEQVSEKGKAYTNYFGRCNVAEHEKLILLAQLKPEKDSDEAVTYSLGKFGQRALDFYSIHVTKESTHPVKPLAQIAGNRYASVPVGKALSDACMGTIASFLSKYQDIIIEHQKVVKGNQKRLESLRELAGKENLEYPSVTLPPQPHTKEGVDAYNEVIARVRMWVNLNLWQKLKLSRDDAKPLLRLKGFPSFPLVERQANEVDWWDMVCNVKKLINEKKEDGKVFWQNLAGYKRQEALRPYLSSEEDRKKGKKFARYQLGDLLLHLEKKHGEDWGKVYDEAWERIDKKVEGLSKHIKLEEERRSEDAQSKAALTDWLRAKASFVIEGKKEADKDEFCRCELKLQKWYGDLRGKPFAIEAENSILDISGFSKQYNCAFIWQKDGVKKLNLYLIINYFKGGKLRFKKIKPEAFEANRFYTVINKKSGEIVPMEVNFNFDDPNLIILPLAFGKRQGREFIWNDLLSLETGSLKLANGRVIEKTLYNRRTRQDEPALFVALTFERREVLDSSNIKPMNLIGVDRGENIPAVIALTDPEGCPLSRFKDSLGNPTHILRIGERYKEKQRTIQAKKEVEQRRAGGYSRKYASKAKNLADDMVRNTARDLLYYAVTQDAMLIFENLSRGFGRQGKRTFMAERQYTRMEDWLTAKLAYEGLPSKTYLSKTLAQYTSKTCSNCGFTITSADYDRVLEKLKKTATGWMTTINGKELKVEGQITYYNRYKRQNVVKDLSVELDRLSEESVNNDISSWTKGRSGEALSLLKKRFSHRPVQEKFVCLNCGFETHADEQAALNIARSWLFLRSQEYKKYQTNKTTGNTDKRAFVETWQSFYRKKLKEVWKPAV

SEQ ID NO: 48350 - protein, 978 aa, synthetic construct
  REGION 1..978: note = engineered CasX variant
QEIKRINKIRRRLVKDSNTKKAGKTGPMKTLLVRVMTPDLRERLENLRKKPENIPQPISNTSRANLNKLLTDYTEMKKAILHVYWEEFQKDPVGLMSRVAQPASKKIDQNKLKPEMDEKGNLTTAGFACSQCGQPLFVYKLEQVSEKGKAYTNYFGRCNVAEHEKLIKLAQLKPEKDSDEAVTYSLGKFGQRALDFYSIHVTKESTHPVKPLAQIAGNRYASGPVGKALSDACMGTIASFLSKYQDIIIEHQKVVKGNQKRLESLRELAGKENLEYPSVTLPPQPHTKEGVDAYNEVIARVRMWVNLNLWQKLKLSRDDAKPLLRLKGFPSFPLVERQANEVDWWDMVCNVKKLINEKKEDGKVFWQNLAGYKRQEALRPYLSSEEDRKKGKKFARYQLGDLLLHLEKKHGEDWGKVYDEAWERIDKKVEGLSKHIKLEEERRSEDAQSKAALTDWLRAKASFVIEGKKEADKDEFCRCELKLQKWYGDLRGKPFAIEAENSILDISGFSKQYNCAFIWQKDGVKKLNLYLIINYFKGGKLRFKKIKPEAFEANRFYTVINKKSGEIVPMEVNFNFDDPNLIILPLAFGKRQGREFIWNDLLSLETGSLKLANGRVIEKTLYNRRTRQDEPALFVALTFERREVLDSSNIKPMNLIGVDRGENIPAVIALTDPEGCPLSRFKDSLGNPTHILRIGERYKEKQRTIQAKKEVEQRRAGGYSRKYASKAKNLADDMVRNTARDLLYYAVTQDAMLIFENLSRGFGRQGKRTFMAERQYTRMEDWLTAKLAYEGLPSKTYLSKTLAQYTSKTCSNCGFTITSADYDRVLEKLKKTATGWMTTINGKELKVEGQITYYNRYKRQNVVKDLSVELDRLSEESVNNDISSWTKGRSGEALSLLKKRFSHRPVQEKFVCLNCGFETHADEQAALNIARSWLFLRSQEYKKYQTNKTTGNTDKRAFVETWQSFYRKKLKEVWKPAV

SEQ ID NO: 48351 - protein, 977 aa, synthetic construct
  REGION 1..977: note = engineered CasX variant
QEIKRINKIRRRLVKDSNTKKAGKTGPMKTLLVRVMTPDLRERLENLRKKPENIPQPISNTSRANLNKLLTDYTEMKKAILHVYWEEFQKDPVGLMSRVAQPASKKIDQNKLKPEMDEKGNLTTAGFACSQCGQPLFVYKLEQVSEKGKAYTNYFGRCNVAEHEKLILLAQLKPEKDSDEAVTYSLGKFGQRALDFYSIHVTKESTHPVKPLAQIAGNRYASPVGKALSDACMGTIASFLSKYQDIIIEHQKVVKGNQKRLESLRELAGKENLEYPSVTLPPQPHTKEGVDAYNEVIARVRMWVNLNLWQKLKLSRDDAKPLLRLKGFPSFPLVERQANEVDWWDMVCNVKKLINEKKEDGKVFWQNLAGYKRQEALRPYLSSEEDRKKGKKFARYQLGDLLLHLEKKHGEDWGKVYDEAWERIDKKVEGLSKHIKLEEERRSEDAQSKAALTDWLRAKASFVIEGKKEADKDEFCRCELKLQKWYGDLRGKPFAIEAENSILDISGFSKQYNCAFIWQKDGVKKLNLYLIINYFKGGKLRFKKIKPEAFEANRFYTVINKKSGEIVPMEVNFNFDDPNLIILPLAFGKRQGREFIWNDLLSLETGSLKLANGRVIEKTLYNRRTRQDEPALFVALTFERREVLDSSNIKPMNLIGVDRGENIPAVIALTDPEGCPLSRFKDSLGNPTHILRIGERYKEKQRTIQAKKEVEQRRAGGYSRKYASKAKNLADDMVRNTARDLLYYAVTQDAMLIFENLSRGFGRQGKRTFMAERQYTRMEDWLTAKLAYEGLPSKTYLSKTLAQYTSKTCSNCGFTITSADYDRVLEKLKKTATGWMTTINGKELKVEGQITYYNRYKRQNVVKDLSVELDRLSEESVNNDISSWTKGRSGEALSLLKKRFSHRPVQEKFVCLNCGFETHADEQAALNIARSWLFLRSQEYKKYQTNKTTGNTDKRAFVETWQSFYRKKLKEVWKPAV

SEQ ID NO: 48352 - protein, 978 aa, synthetic construct
  REGION 1..978: note = engineered CasX variant
QEIKRINKIRRRLVKDSNTKKAGKTGPMKTLLVRVMTPDLRERLENLRKKPENIPQPISNTSRANLNKLLTDYTEMKKAILHVYWEEFQKDPVGLMSRVAQPASKKIDQNKLKPEMDEKGNLTTAGFACSQCGQPLFVYKLEQVSEKGKAYTNYFGRCNVAEHEKLILLAQLKPEKDSDEAVTYSLGKFGQRALDFYSIHVTKESTHPVKPLAQIAGNRYASYPVGKALSDACMGTIASFLSKYQDIIIEHQKVVKGNQKRLESLRELAGKENLEYPSVTLPPQPHTKEGVDAYNEVIARVRMWVNLNLWQKLKLSRDDAKPLLRLKGFPSFPLVERQANEVDWWDMVCNVKKLINEKKEDGKVFWQNLAGYKRQEALRPYLSSEEDRKKGKKFARYQLGDLLLHLEKKHGEDWGKVYDEAWERIDKKVEGLSKHIKLEEERRSEDAQSKAALTDWLRAKASFVIEGSKEADKDEFCRCELKLQKWYGDLRGKPFAIEAENSILDISGFSKQYNCAFIWQKDGVKKLNLYLIINYFKGGKLRFKKIKPEAFEANRFYTVINKKSGEIVPMEVNFNFDDPNLIILPLAFGKRQGREFIWNDLLSLETGSLKLANGRVIEKTLYNRRTRQDEPALFVALTFERREVLDSSNIKPMNLIGVDRGENIPAVIALTDPEGCPLSRFKDSLGNPTHILRIGERYKEKQRTIQAKKEVEQRRAGGYSRKYASKAKNLADDMVRNTARDLLYYAVTQDAMLIFENLSRGFGRQGKRTFMAERQYTRMEDWLTAKLAYEGLPSKTYLSKTLAQYTSKTCSNCGFTITSADYDRVLEKLKKTATGWMTTINGKELKVEGQITYYNRYKRQNVVKDLSVELDRLSEESVNNDISSWTKGRSGEALSLLKKRFSHRPVQEKFVCLNCGFETHADEQAALNIARSWLFLRSQEYKKYQTNKTTGNTDKRAFVETWQSFYRKKLKEVWKPAV

SEQ ID NO: 48353 - protein, 978 aa, synthetic construct
  REGION 1..978: note = engineered CasX variant
QEIKRINKIRRRLVKDSNTKKAGKTGPMKTLLVRVMTPDLRERLENLRKKPENIPQPISNTSRANLNKLLTDYTEMKKAILHVYWEEFQKDPVGLMSRVAQPASKKIDQNKLKPEMDEKGNLTTAGFACSQCGQPLFVYKLEQVSEKGKAYTNYFGRCNVAEHEKLILLAQLKPEKDSDEAVTYSLGKFGQRALDFYSIHVTKESTHPVKPLAQIAGNRYASHPVGKALSDACMGTIASFLSKYQDIIIEHQKVVKGNQKRLESLRELAGKENLEYPSVTLPPQPHTKEGVDAYNEVIARVRMWVNLNLWQKLKLSRDDAKPLLRLKGFPSFPLVERQANEVDWWDMVCNVKKLINEKKEDGKVFWQNLAGYKRQEALRPYLSSEEDRKKGKKFARYQLGDLLLHLEKKHGEDWGKVYDEAWERIDKKVEGLSKHIKLEEERRSEDAQSKAALTDWLRAKASFVIEGSKEADKDEFCRCELKLQKWYGDLRGKPFAIEAENSILDISGFSKQYNCAFIWQKDGVKKLNLYLIINYFKGGKLRFKKIKPEAFEANRFYTVINKKSGEIVPMEVNFNFDDPNLIILPLAFGKRQGREFIWNDLLSLETGSLKLANGRVIEKTLYNRRTRQDEPALFVALTFERREVLDSSNIKPMNLIGVDRGENIPAVIALTDPEGCPLSRFKDSLGNPTHILRIGERYKEKQRTIQAKKEVEQRRAGGYSRKYASKAKNLADDMVRNTARDLLYYAVTQDAMLIFENLSRGFGRQGKRTFMAERQYTRMEDWLTAKLAYEGLPSKTYLSKTLAQYTSKTCSNCGFTITSADYDRVLEKLKKTATGWMTTINGKELKVEGQITYYNRYKRQNVVKDLSVELDRLSEESVNNDISSWTKGRSGEALSLLKKRFSHRPVQEKFVCLNCGFETHADEQAALNIARSWLFLRSQEYKKYQTNKTTGNTDKRAFVETWQSFYRKKLKEVWKPAV

SEQ ID NO: 48354 - protein, 978 aa, synthetic construct
  REGION 1..978: note = engineered CasX variant
QEIKRINKIRRRLVKDSNTKKAGKTGPMKTLLVRVMTPDLRERLENLRKKPENIPQPISNTSRANLNKLLTDYTEMKKAILHVYWEEFQKDPVGLMSRVAQPASKKIDQNKLKPEMDEKGNLTTAGFACSQCGQPLFVYKLEQVSEKGKAYTNYFGRCNVAEHEKLILLAQLKPEKDSDEAVTYSLGKFGQRALDFYSIHVTKESTHPVKPLAQIAGNRYASSPVGKALSDACMGTIASFLSKYQDIIIEHQKVVKGNQKRLESLRELAGKENLEYPSVTLPPQPHTKEGVDAYNEVIARVRMWVNLNLWQKLKLSRDDAKPLLRLKGFPSFPLVERQANEVDWWDMVCNVKKLINEKKEDGKVFWQNLAGYKRQEALRPYLSSEEDRKKGKKFARYQLGDLLLHLEKKHGEDWGKVYDEAWERIDKKVEGLSKHIKLEEERRSEDAQSKAALTDWLRAKASFVIEGSKEADKDEFCRCELKLQKWYGDLRGKPFAIEAENSILDISGFSKQYNCAFIWQKDGVKKLNLYLIINYFKGGKLRFKKIKPEAFEANRFYTVINKKSGEIVPMEVNFNFDDPNLIILPLAFGKRQGREFIWNDLLSLETGSLKLANGRVIEKTLYNRRTRQDEPALFVALTFERREVLDSSNIKPMNLIGVDRGENIPAVIALTDPEGCPLSRFKDSLGNPTHILRIGERYKEKQRTIQAKKEVEQRRAGGYSRKYASKAKNLADDMVRNTARDLLYYAVTQDAMLIFENLSRGFGRQGKRTFMAERQYTRMEDWLTAKLAYEGLPSKTYLSKTLAQYTSKTCSNCGFTITSADYDRVLEKLKKTATGWMTTINGKELKVEGQITYYNRYKRQNVVKDLSVELDRLSEESVNNDISSWTKGRSGEALSLLKKRFSHRPVQEKFVCLNCGFETHADEQAALNIARSWLFLRSQEYKKYQTNKTTGNTDKRAFVETWQSFYRKKLKEVWKPAV

SEQ ID NO: 48355 - protein, 978 aa, synthetic construct
  REGION 1..978: note = engineered CasX variant
QEIKRINKIRRRLVKDSNTKKAGKTGPMKTLLVRVMTPDLRERLENLRKKPENIPQPISNTSRANLNKLLTDYTEMKKAILHVYWEEFQKDPVGLMSRVAQPASKKIDQNKLKPEMDEKGNLTTAGFACSQCGQPLFVYKLEQVSEKGKAYTNYFGRCNVAEHEKLILLAQLKPEKDSDEAVTYSLGKFGQRALDFYSIHVTKESTHPVKPLAQIAGNRYASTPVGKALSDACMGTIASFLSKYQDIIIEHQKVVKGNQKRLESLRELAGKENLEYPSVTLPPQPHTKEGVDAYNEVIARVRMWVNLNLWQKLKLSRDDAKPLLRLKGFPSFPLVERQANEVDWWDMVCNVKKLINEKKEDGKVFWQNLAGYKRQEALRPYLSSEEDRKKGKKFARYQLGDLLLHLEKKHGEDWGKVYDEAWERIDKKVEGLSKHIKLEEERRSEDAQSKAALTDWLRAKASFVIEGSKEADKDEFCRCELKLQKWYGDLRGKPFAIEAENSILDISGFSKQYNCAFIWQKDGVKKLNLYLIINYFKGGKLRFKKIKPEAFEANRFYTVINKKSGEIVPMEVNFNFDDPNLIILPLAFGKRQGREFIWNDLLSLETGSLKLANGRVIEKTLYNRRTRQDEPALFVALTFERREVLDSSNIKPMNLIGVDRGENIPAVIALTDPEGCPLSRFKDSLGNPTHILRIGERYKEKQRTIQAKKEVEQRRAGGYSRKYASKAKNLADDMVRNTARDLLYYAVTQDAMLIFENLSRGFGRQGKRTFMAERQYTRMEDWLTAKLAYEGLPSKTYLSKTLAQYTSKTCSNCGFTITSADYDRVLEKLKKTATGWMTTINGKELKVEGQITYYNRYKRQNVVKDLSVELDRLSEESVNNDISSWTKGRSGEALSLLKKRFSHRPVQEKFVCLNCGFETHADEQAALNIARSWLFLRSQEYKKYQTNKTTGNTDKRAFVETWQSFYRKKLKEVWKPAV

SEQ ID NO: 48356 - protein, 978 aa, synthetic construct
  REGION 1..978: note = engineered CasX variant
QEIKRINKIRRRLVKDSNTKKAGKTGPMKTLLVRVMTPDLRERLENLRKKPENIPQPISNTSRANLNKLLTDYTEMKKAILHVYWEEFQKDPVGLMSRVAQPASKKIDQNKLKPEMDEKGNLTTAGFACSQCGQPLFVYKLEQVSEKGKAYTNYFGRCNVAEHEKLILLAQLKPEKDSDEAVTYSLGKFGQRALDFYSIHVTKESTHPVKPLAQIAGNRYASAPVGKALSDACMGTIASFLSKYQDIIIEHQKVVKGNQKRLESLRELAGKENLEYPSVTLPPQPHTKEGVDAYNEVIARVRMWVNLNLWQKLKLSRDDAKPLLRLKGFPSFPLVERQANEVDWWDMVCNVKKLINEKKEDGKVFWQNLAGYKRQEALRPYLSSEEDRKKGKKFARYQLGDLLLHLEKKHGEDWGKVYDEAWERIDKKVEGLSKHIKLEEERRSEDAQSKAALTDWLRAKASFVIEGSKEADKDEFCRCELKLQKWYGDLRGKPFAIEAENSILDISGFSKQYNCAFIWQKDGVKKLNLYLIINYFKGGKLRFKKIKPEAFEANRFYTVINKKSGEIVPMEVNFNFDDPNLIILPLAFGKRQGREFIWNDLLSLETGSLKLANGRVIEKTLYNRRTRQDEPALFVALTFERREVLDSSNIKPMNLIGVDRGENIPAVIALTDPEGCPLSRFKDSLGNPTHILRIGERYKEKQRTIQAKKEVEQRRAGGYSRKYASKAKNLADDMVRNTARDLLYYAVTQDAMLIFENLSRGFGRQGKRTFMAERQYTRMEDWLTAKLAYEGLPSKTYLSKTLAQYTSKTCSNCGFTITSADYDRVLEKLKKTATGWMTTINGKELKVEGQITYYNRYKRQNVVKDLSVELDRLSEESVNNDISSWTKGRSGEALSLLKKRFSHRPVQEKFVCLNCGFETHADEQAALNIARSWLFLRSQEYKKYQTNKTTGNTDKRAFVETWQSFYRKKLKEVWKPAV

SEQ ID NO: 48357 - protein, 978 aa, synthetic construct
  REGION 1..978: note = engineered CasX variant
QEIKRINKIRRRLVKDSNTKKAGKTGPMKTLLVRVMTPDLRERLENLRKKPENIPQPISNTSRANLNKLLTDYTEMKKAILHVYWEEFQKDPVGLMSRVAQPASKKIDQNKLKPEMDEKGNLTTAGFACSQCGQPLFVYKLEQVSEKGKAYTNYFGRCNVAEHEKLILLAQLKPEKDSDEAVTYSLGKFGQRALDFYSIHVTKESTHPVKPLAQIAGNRYASVPVGKALSDACMGTIASFLSKYQDIIIEHQKVVKGNQKRLESLRELAGKENLEYPSVTLPPQPHTKEGVDAYNEVIARVRMWVNLNLWQKLKLSRDDAKPLLRLKGFPSFPLVERQANEVDWWDMVCNVKKLINEKKEDGKVFWQNLAGYKRQEALRPYLSSEEDRKKGKKFARYQLGDLLLHLEKKHGEDWGKVYDEAWERIDKKVEGLSKHIKLEEERRSEDAQSKAALTDWLRAKASFVIEGSKEADKDEFCRCELKLQKWYGDLRGKPFAIEAENSILDISGFSKQYNCAFIWQKDGVKKLNLYLIINYFKGGKLRFKKIKPEAFEANRFYTVINKKSGEIVPMEVNFNFDDPNLIILPLAFGKRQGREFIWNDLLSLETGSLKLANGRVIEKTLYNRRTRQDEPALFVALTFERREVLDSSNIKPMNLIGVDRGENIPAVIALTDPEGCPLSRFKDSLGNPTHILRIGERYKEKQRTIQAKKEVEQRRAGGYSRKYASKAKNLADDMVRNTARDLLYYAVTQDAMLIFENLSRGFGRQGKRTFMAERQYTRMEDWLTAKLAYEGLPSKTYLSKTLAQYTSKTCSNCGFTITSADYDRVLEKLKKTATGWMTTINGKELKVEGQITYYNRYKRQNVVKDLSVELDRLSEESVNNDISSWTKGRSGEALSLLKKRFSHRPVQEKFVCLNCGFETHADEQAALNIARSWLFLRSQEYKKYQTNKTTGNTDKRAFVETWQSFYRKKLKEVWKPAV

SEQ ID NO: 48358 - protein, 978 aa, synthetic construct
  REGION 1..978: note = engineered CasX variant
QEIKRINKIRRRLVKDSNTKKAGKTGPMKTLLVRVMTPDLRERLENLRKKPENIPQPISNTSRANLNKLLTDYTEMKKAILHVYWEEFQKDPVGLMSRVAQPASKKIDQNKLKPEMDEKGNLTTAGFACSQCGQPLFVYKLEQVSEKGKAYTNYFGRCNVAEHEKLIKLAQLKPEKDSDEAVTYSLGKFGQRALDFYSIHVTKESTHPVKPLAQIAGNRYASGPVGKALSDACMGTIASFLSKYQDIIIEHQKVVKGNQKRLESLRELAGKENLEYPSVTLPPQPHTKEGVDAYNEVIARVRMWVNLNLWQKLKLSRDDAKPLLRLKGFPSFPLVERQANEVDWWDMVCNVKKLINEKKEDGKVFWQNLAGYKRQEALRPYLSSEEDRKKGKKFARYQLGDLLLHLEKKHGEDWGKVYDEAWERIDKKVEGLSKHIKLEEERRSEDAQSKAALTDWLRAKASFVIEGSKEADKDEFCRCELKLQKWYGDLRGKPFAIEAENSILDISGFSKQYNCAFIWQKDGVKKLNLYLIINYFKGGKLRFKKIKPEAFEANRFYTVINKKSGEIVPMEVNFNFDDPNLIILPLAFGKRQGREFIWNDLLSLETGSLKLANGRVIEKTLYNRRTRQDEPALFVALTFERREVLDSSNIKPMNLIGVDRGENIPAVIALTDPEGCPLSRFKDSLGNPTHILRIGERYKEKQRTIQAKKEVEQRRAGGYSRKYASKAKNLADDMVRNTARDLLYYAVTQDAMLIFENLSRGFGRQGKRTFMAERQYTRMEDWLTAKLAYEGLPSKTYLSKTLAQYTSKTCSNCGFTITSADYDRVLEKLKKTATGWMTTINGKELKVEGQITYYNRYKRQNVVKDLSVELDRLSEESVNNDISSWTKGRSGEALSLLKKRFSHRPVQEKFVCLNCGFETHADEQAALNIARSWLFLRSQEYKKYQTNKTTGNTDKRAFVETWQSFYRKKLKEVWKPAV

SEQ ID NO: 48359 - protein, 977 aa, synthetic construct
  REGION 1..977: note = engineered CasX variant
QEIKRINKIRRRLVKDSNTKKAGKTGPMKTLLVRVMTPDLRERLENLRKKPENIPQPISNTSRANLNKLLTDYTEMKKAILHVYWEEFQKDPVGLMSRVAQPASKKIDQNKLKPEMDEKGNLTTAGFACSQCGQPLFVYKLEQVSEKGKAYTNYFGRCNVAEHEKLILLAQLKPEKDSDEAVTYSLGKFGQRALDFYSIHVTKESTHPVKPLAQIAGNRYASPVGKALSDACMGTIASFLSKYQDIIIEHQKVVKGNQKRLESLRELAGKENLEYPSVTLPPQPHTKEGVDAYNEVIARVRMWVNLNLWQKLKLSRDDAKPLLRLKGFPSFPLVERQANEVDWWDMVCNVKKLINEKKEDGKVFWQNLAGYKRQEALRPYLSSEEDRKKGKKFARYQLGDLLLHLEKKHGEDWGKVYDEAWERIDKKVEGLSKHIKLEEERRSEDAQSKAALTDWLRAKASFVIEGSKEADKDEFCRCELKLQKWYGDLRGKPFAIEAENSILDISGFSKQYNCAFIWQKDGVKKLNLYLIINYFKGGKLRFKKIKPEAFEANRFYTVINKKSGEIVPMEVNFNFDDPNLIILPLAFGKRQGREFIWNDLLSLETGSLKLANGRVIEKTLYNRRTRQDEPALFVALTFERREVLDSSNIKPMNLIGVDRGENIPAVIALTDPEGCPLSRFKDSLGNPTHILRIGERYKEKQRTIQAKKEVEQRRAGGYSRKYASKAKNLADDMVRNTARDLLYYAVTQDAMLIFENLSRGFGRQGKRTFMAERQYTRMEDWLTAKLAYEGLPSKTYLSKTLAQYTSKTCSNCGFTITSADYDRVLEKLKKTATGWMTTINGKELKVEGQITYYNRYKRQNVVKDLSVELDRLSEESVNNDISSWTKGRSGEALSLLKKRFSHRPVQEKFVCLNCGFETHADEQAALNIARSWLFLRSQEYKKYQTNKTTGNTDKRAFVETWQSFYRKKLKEVWKPAV

SEQ ID NO: 48360 - protein, 979 aa, synthetic construct
  REGION 1..979: note = engineered CasX variant
QEIKRINKIRRRLVKDSNTKKAGKTGPMKTLLVRVMTPDLRERLENLRKKPENIPQPISNTSRANLNKLLTDYTEMKKAILHVYWEEFQKDPVGLMSRVAQPASKKIDQNKLKPEMDEKGNLTTAGFACSQCGQPLFVYKLEQVSEKGKAYTNYFGRCNVAEHEKLILLAQLKPEKDSDEAVTYSLGKFGQRALDFYSIHVTKESTHPVKPLAQIAGNRYASYPVGKALSDACMGTIASFLSKYQDIIIEHQKVVKGNQKRLESLRELAGKENLEYPSVTLPPQPHTKEGVDAYNEVIARVRMWVNLNLWQKLKLSRDDAKPLLRLKGFPSFPLVERQANEVDWWDMVCNVKKLINEKKEDGKVFWQNLAGYKRQEALRPYLSSEEDRKKGKKFARYQLGDLLLHLEKKHGEDWGKVYDEAWERIDKKVEGLSKHIKLEEERRSEDAQSKAALTDWLRAKASFVIEGLKEADDKDEFCRCELKLQKWYGDLRGKPFAIEAENSILDISGFSKQYNCAFIWQKDGVKKLNLYLIINYFKGGKLRFKKIKPEAFEANRFYTVINKKSGEIVPMEVNFNFDDPNLIILPLAFGKRQGREFIWNDLLSLETGSLKLANGRVIEKTLYNRRTRQDEPALFVALTFERREVLDSSNIKPMNLIGVDRGENIPAVIALTDPEGCPLSRFKDSLGNPTHILRIGERYKEKQRTIQAKKEVEQRRAGGYSRKYASKAKNLADDMVRNTARDLLYYAVTQDAMLIFENLSRGFGRQGKRTFMAERQYTRMEDWLTAKLAYEGLPSKTYLSKTLAQYTSKTCSNCGFTITSADYDRVLEKLKKTATGWMTTINGKELKVEGQITYYNRYKRQNVVKDLSVELDRLSEESVNNDISSWTKGRSGEALSLLKKRFSHRPVQEKFVCLNCGFETHADEQAALNIARSWLFLRSQEYKKYQTNKTTGNTDKRAFVETWQSFYRKKLKEVWKPAV

SEQ ID NO: 48361 - protein, 979 aa, synthetic construct
  REGION 1..979: note = engineered CasX variant
QEIKRINKIRRRLVKDSNTKKAGKTGPMKTLLVRVMTPDLRERLENLRKKPENIPQPISNTSRANLNKLLTDYTEMKKAILHVYWEEFQKDPVGLMSRVAQPASKKIDQNKLKPEMDEKGNLTTAGFACSQCGQPLFVYKLEQVSEKGKAYTNYFGRCNVAEHEKLILLAQLKPEKDSDEAVTYSLGKFGQRALDFYSIHVTKESTHPVKPLAQIAGNRYASHPVGKALSDACMGTIASFLSKYQDIIIEHQKVVKGNQKRLESLRELAGKENLEYPSVTLPPQPHTKEGVDAYNEVIARVRMWVNLNLWQKLKLSRDDAKPLLRLKGFPSFPLVERQANEVDWWDMVCNVKKLINEKKEDGKVFWQNLAGYKRQEALRPYLSSEEDRKKGKKFARYQLGDLLLHLEKKHGEDWGKVYDEAWERIDKKVEGLSKHIKLEEERRSEDAQSKAALTDWLRAKASFVIEGLKEADDKDEFCRCELKLQKWYGDLRGKPFAIEAENSILDISGFSKQYNCAFIWQKDGVKKLNLYLIINYFKGGKLRFKKIKPEAFEANRFYTVINKKSGEIVPMEVNFNFDDPNLIILPLAFGKRQGREFIWNDLLSLETGSLKLANGRVIEKTLYNRRTRQDEPALFVALTFERREVLDSSNIKPMNLIGVDRGENIPAVIALTDPEGCPLSRFKDSLGNPTHILRIGERYKEKQRTIQAKKEVEQRRAGGYSRKYASKAKNLADDMVRNTARDLLYYAVTQDAMLIFENLSRGFGRQGKRTFMAERQYTRMEDWLTAKLAYEGLPSKTYLSKTLAQYTSKTCSNCGFTITSADYDRVLEKLKKTATGWMTTINGKELKVEGQITYYNRYKRQNVVKDLSVELDRLSEESVNNDISSWTKGRSGEALSLLKKRFSHRPVQEKFVCLNCGFETHADEQAALNIARSWLFLRSQEYKKYQTNKTTGNTDKRAFVETWQSFYRKKLKEVWKPAV

SEQ ID NO: 48362 - protein, 979 aa, synthetic construct
  REGION 1..979: note = engineered CasX variant
QEIKRINKIRRRLVKDSNTKKAGKTGPMKTLLVRVMTPDLRERLENLRKKPENIPQPISNTSRANLNKLLTDYTEMKKAILHVYWEEFQKDPVGLMSRVAQPASKKIDQNKLKPEMDEKGNLTTAGFACSQCGQPLFVYKLEQVSEKGKAYTNYFGRCNVAEHEKLILLAQLKPEKDSDEAVTYSLGKFGQRALDFYSIHVTKESTHPVKPLAQIAGNRYASSPVGKALSDACMGTIASFLSKYQDIIIEHQKVVKGNQKRLESLRELAGKENLEYPSVTLPPQPHTKEGVDAYNEVIARVRMWVNLNLWQKLKLSRDDAKPLLRLKGFPSFPLVERQANEVDWWDMVCNVKKLINEKKEDGKVFWQNLAGYKRQEALRPYLSSEEDRKKGKKFARYQLGDLLLHLEKKHGEDWGKVYDEAWERIDKKVEGLSKHIKLEEERRSEDAQSKAALTDWLRAKASFVIEGLKEADDKDEFCRCELKLQKWYGDLRGKPFAIEAENSILDISGFSKQYNCAFIWQKDGVKKLNLYLIINYFKGGKLRFKKIKPEAFEANRFYTVINKKSGEIVPMEVNFNFDDPNLIILPLAFGKRQGREFIWNDLLSLETGSLKLANGRVIEKTLYNRRTRQDEPALFVALTFERREVLDSSNIKPMNLIGVDRGENIPAVIALTDPEGCPLSRFKDSLGNPTHILRIGERYKEKQRTIQAKKEVEQRRAGGYSRKYASKAKNLADDMVRNTARDLLYYAVTQDAMLIFENLSRGFGRQGKRTFMAERQYTRMEDWLTAKLAYEGLPSKTYLSKTLAQYTSKTCSNCGFTITSADYDRVLEKLKKTATGWMTTINGKELKVEGQITYYNRYKRQNVVKDLSVELDRLSEESVNNDISSWTKGRSGEALSLLKKRFSHRPVQEKFVCLNCGFETHADEQAALNIARSWLFLRSQEYKKYQTNKTTGNTDKRAFVETWQSFYRKKLKEVWKPAV

SEQ ID NO: 48363 - protein, 979 aa, synthetic construct
  REGION 1..979: note = engineered CasX variant
QEIKRINKIRRRLVKDSNTKKAGKTGPMKTLLVRVMTPDLRERLENLRKKPENIPQPISNTSRANLNKLLTDYTEMKKAILHVYWEEFQKDPVGLMSRVAQPASKKIDQNKLKPEMDEKGNLTTAGFACSQCGQPLFVYKLEQVSEKGKAYTNYFGRCNVAEHEKLILLAQLKPEKDSDEAVTYSLGKFGQRALDFYSIHVTKESTHPVKPLAQIAGNRYASTPVGKALSDACMGTIASFLSKYQDIIIEHQKVVKGNQKRLESLRELAGKENLEYPSVTLPPQPHTKEGVDAYNEVIARVRMWVNLNLWQKLKLSRDDAKPLLRLKGFPSFPLVERQANEVDWWDMVCNVKKLINEKKEDGKVFWQNLAGYKRQEALRPYLSSEEDRKKGKKFARYQLGDLLLHLEKKHGEDWGKVYDEAWERIDKKVEGLSKHIKLEEERRSEDAQSKAALTDWLRAKASFVIEGLKEADDKDEFCRCELKLQKWYGDLRGKPFAIEAENSILDISGFSKQYNCAFIWQKDGVKKLNLYLIINYFKGGKLRFKKIKPEAFEANRFYTVINKKSGEIVPMEVNFNFDDPNLIILPLAFGKRQGREFIWNDLLSLETGSLKLANGRVIEKTLYNRRTRQDEPALFVALTFERREVLDSSNIKPMNLIGVDRGENIPAVIALTDPEGCPLSRFKDSLGNPTHILRIGERYKEKQRTIQAKKEVEQRRAGGYSRKYASKAKNLADDMVRNTARDLLYYAVTQDAMLIFENLSRGFGRQGKRTFMAERQYTRMEDWLTAKLAYEGLPSKTYLSKTLAQYTSKTCSNCGFTITSADYDRVLEKLKKTATGWMTTINGKELKVEGQITYYNRYKRQNVVKDLSVELDRLSEESVNNDISSWTKGRSGEALSLLKKRFSHRPVQEKFVCLNCGFETHADEQAALNIARSWLFLRSQEYKKYQTNKTTGNTDKRAFVETWQSFYRKKLKEVWKPAV

SEQ ID NO: 48364 - protein, 979 aa, synthetic construct
  REGION 1..979: note = engineered CasX variant
QEIKRINKIRRRLVKDSNTKKAGKTGPMKTLLVRVMTPDLRERLENLRKKPENIPQPISNTSRANLNKLLTDYTEMKKAILHVYWEEFQKDPVGLMSRVAQPASKKIDQNKLKPEMDEKGNLTTAGFACSQCGQPLFVYKLEQVSEKGKAYTNYFGRCNVAEHEKLILLAQLKPEKDSDEAVTYSLGKFGQRALDFYSIHVTKESTHPVKPLAQIAGNRYASAPVGKALSDACMGTIASFLSKYQDIIIEHQKVVKGNQKRLESLRELAGKENLEYPSVTLPPQPHTKEGVDAYNEVIARVRMWVNLNLWQKLKLSRDDAKPLLRLKGFPSFPLVERQANEVDWWDMVCNVKKLINEKKEDGKVFWQNLAGYKRQEALRPYLSSEEDRKKGKKFARYQLGDLLLHLEKKHGEDWGKVYDEAWERIDKKVEGLSKHIKLEEERRSEDAQSKAALTDWLRAKASFVIEGLKEADDKDEFCRCELKLQKWYGDLRGKPFAIEAENSILDISGFSKQYNCAFIWQKDGVKKLNLYLIINYFKGGKLRFKKIKPEAFEANRFYTVINKKSGEIVPMEVNFNFDDPNLIILPLAFGKRQGREFIWNDLLSLETGSLKLANGRVIEKTLYNRRTRQDEPALFVALTFERREVLDSSNIKPMNLIGVDRGENIPAVIALTDPEGCPLSRFKDSLGNPTHILRIGERYKEKQRTIQAKKEVEQRRAGGYSRKYASKAKNLADDMVRNTARDLLYYAVTQDAMLIFENLSRGFGRQGKRTFMAERQYTRMEDWLTAKLAYEGLPSKTYLSKTLAQYTSKTCSNCGFTITSADYDRVLEKLKKTATGWMTTINGKELKVEGQITYYNRYKRQNVVKDLSVELDRLSEESVNNDISSWTKGRSGEALSLLKKRFSHRPVQEKFVCLNCGFETHADEQAALNIARSWLFLRSQEYKKYQTNKTTGNTDKRAFVETWQSFYRKKLKEVWKPAV

SEQ ID NO: 48365 - protein, 979 aa, synthetic construct
  REGION 1..979: note = engineered CasX variant
QEIKRINKIRRRLVKDSNTKKAGKTGPMKTLLVRVMTPDLRERLENLRKKPENIPQPISNTSRANLNKLLTDYTEMKKAILHVYWEEFQKDPVGLMSRVAQPASKKIDQNKLKPEMDEKGNLTTAGFACSQCGQPLFVYKLEQVSEKGKAYTNYFGRCNVAEHEKLILLAQLKPEKDSDEAVTYSLGKFGQRALDFYSIHVTKESTHPVKPLAQIAGNRYASVPVGKALSDACMGTIASFLSKYQDIIIEHQKVVKGNQKRLESLRELAGKENLEYPSVTLPPQPHTKEGVDAYNEVIARVRMWVNLNLWQKLKLSRDDAKPLLRLKGFPSFPLVERQANEVDWWDMVCNVKKLINEKKEDGKVFWQNLAGYKRQEALRPYLSSEEDRKKGKKFARYQLGDLLLHLEKKHGEDWGKVYDEAWERIDKKVEGLSKHIKLEEERRSEDAQSKAALTDWLRAKASFVIEGLKEADDKDEFCRCELKLQKWYGDLRGKPFAIEAENSILDISGFSKQYNCAFIWQKDGVKKLNLYLIINYFKGGKLRFKKIKPEAFEANRFYTVINKKSGEIVPMEVNFNFDDPNLIILPLAFGKRQGREFIWNDLLSLETGSLKLANGRVIEKTLYNRRTRQDEPALFVALTFERREVLDSSNIKPMNLIGVDRGENIPAVIALTDPEGCPLSRFKDSLGNPTHILRIGERYKEKQRTIQAKKEVEQRRAGGYSRKYASKAKNLADDMVRNTARDLLYYAVTQDAMLIFENLSRGFGRQGKRTFMAERQYTRMEDWLTAKLAYEGLPSKTYLSKTLAQYTSKTCSNCGFTITSADYDRVLEKLKKTATGWMTTINGKELKVEGQITYYNRYKRQNVVKDLSVELDRLSEESVNNDISSWTKGRSGEALSLLKKRFSHRPVQEKFVCLNCGFETHADEQAALNIARSWLFLRSQEYKKYQTNKTTGNTDKRAFVETWQSFYRKKLKEVWKPAV

SEQ ID NO: 48366 - protein, 979 aa, synthetic construct
  REGION 1..979: note = engineered CasX variant
QEIKRINKIRRRLVKDSNTKKAGKTGPMKTLLVRVMTPDLRERLENLRKKPENIPQPISNTSRANLNKLLTDYTEMKKAILHVYWEEFQKDPVGLMSRVAQPASKKIDQNKLKPEMDEKGNLTTAGFACSQCGQPLFVYKLEQVSEKGKAYTNYFGRCNVAEHEKLIKLAQLKPEKDSDEAVTYSLGKFGQRALDFYSIHVTKESTHPVKPLAQIAGNRYASGPVGKALSDACMGTIASFLSKYQDIIIEHQKVVKGNQKRLESLRELAGKENLEYPSVTLPPQPHTKEGVDAYNEVIARVRMWVNLNLWQKLKLSRDDAKPLLRLKGFPSFPLVERQANEVDWWDMVCNVKKLINEKKEDGKVFWQNLAGYKRQEALRPYLSSEEDRKKGKKFARYQLGDLLLHLEKKHGEDWGKVYDEAWERIDKKVEGLSKHIKLEEERRSEDAQSKAALTDWLRAKASFVIEGLKEADDKDEFCRCELKLQKWYGDLRGKPFAIEAENSILDISGFSKQYNCAFIWQKDGVKKLNLYLIINYFKGGKLRFKKIKPEAFEANRFYTVINKKSGEIVPMEVNFNFDDPNLIILPLAFGKRQGREFIWNDLLSLETGSLKLANGRVIEKTLYNRRTRQDEPALFVALTFERREVLDSSNIKPMNLIGVDRGENIPAVIALTDPEGCPLSRFKDSLGNPTHILRIGERYKEKQRTIQAKKEVEQRRAGGYSRKYASKAKNLADDMVRNTARDLLYYAVTQDAMLIFENLSRGFGRQGKRTFMAERQYTRMEDWLTAKLAYEGLPSKTYLSKTLAQYTSKTCSNCGFTITSADYDRVLEKLKKTATGWMTTINGKELKVEGQITYYNRYKRQNVVKDLSVELDRLSEESVNNDISSWTKGRSGEALSLLKKRFSHRPVQEKFVCLNCGFETHADEQAALNIARSWLFLRSQEYKKYQTNKTTGNTDKRAFVETWQSFYRKKLKEVWKPAV

SEQ ID NO: 48367 - protein, 978 aa, synthetic construct
  REGION 1..978: note = engineered CasX variant
QEIKRINKIRRRLVKDSNTKKAGKTGPMKTLLVRVMTPDLRERLENLRKKPENIPQPISNTSRANLNKLLTDYTEMKKAILHVYWEEFQKDPVGLMSRVAQPASKKIDQNKLKPEMDEKGNLTTAGFACSQCGQPLFVYKLEQVSEKGKAYTNYFGRCNVAEHEKLILLAQLKPEKDSDEAVTYSLGKFGQRALDFYSIHVTKESTHPVKPLAQIAGNRYASPVGKALSDACMGTIASFLSKYQDIIIEHQKVVKGNQKRLESLRELAGKENLEYPSVTLPPQPHTKEGVDAYNEVIARVRMWVNLNLWQKLKLSRDDAKPLLRLKGFPSFPLVERQANEVDWWDMVCNVKKLINEKKEDGKVFWQNLAGYKRQEALRPYLSSEEDRKKGKKFARYQLGDLLLHLEKKHGEDWGKVYDEAWERIDKKVEGLSKHIKLEEERRSEDAQSKAALTDWLRAKASFVIEGLKEADDKDEFCRCELKLQKWYGDLRGKPFAIEAENSILDISGFSKQYNCAFIWQKDGVKKLNLYLIINYFKGGKLRFKKIKPEAFEANRFYTVINKKSGEIVPMEVNFNFDDPNLIILPLAFGKRQGREFIWNDLLSLETGSLKLANGRVIEKTLYNRRTRQDEPALFVALTFERREVLDSSNIKPMNLIGVDRGENIPAVIALTDPEGCPLSRFKDSLGNPTHILRIGERYKEKQRTIQAKKEVEQRRAGGYSRKYASKAKNLADDMVRNTARDLLYYAVTQDAMLIFENLSRGFGRQGKRTFMAERQYTRMEDWLTAKLAYEGLPSKTYLSKTLAQYTSKTCSNCGFTITSADYDRVLEKLKKTATGWMTTINGKELKVEGQITYYNRYKRQNVVKDLSVELDRLSEESVNNDISSWTKGRSGEALSLLKKRFSHRPVQEKFVCLNCGFETHADEQAALNIARSWLFLRSQEYKKYQTNKTTGNTDKRAFVETWQSFYRKKLKEVWKPAV

SEQ ID NO: 48368 - protein, 979 aa, synthetic construct
  REGION 1..979: note = engineered CasX variant
QEIKRINKIRRRLVKDSNTKKAGKTGPMKTLLVRVMTPDLRERLENLRKKPENIPQPISNTSRANLNKLLTDYTEMKKAILHVYWEEFQKDPVGLMSRVAQPASKKIDQNKLKPEMDEKGNLTTAGFACSQCGQPLFVYKLEQVSEKGKAYTNYFGRCNVAEHEKLILLAQLKPEKDSDEAVTYSLGKFGQRALDFYSIHVTKESTHPVKPLAQIAGNRYASYPVGKALSDACMGTIASFLSKYQDIIIEHQKVVKGNQKRLESLRELAGKENLEYPSVTLPPQPHTKEGVDAYNEVIARVRMWVNLNLWQKLKLSRDDAKPLLRLKGFPSFPLVERQANEVDWWDMVCNVKKLINEKKEDGKVFWQNLAGYKRQEALRPYLSSEEDRKKGKKFARYQLGDLLLHLEKKHGEDWGKVYDEAWERIDKKVEGLSKHIKLEEERRSEDAQSKAALTDWLRAKASFVIEGLKEADKDEFCRCELKLQKWYGDLRGKPFAIEAENSILDISGFSKQYNCAFIWQKDGVKKLNLYLIINYFKGGKLRFKKIKPEAFEANRFYTVINKKSGEIVPMEVNFNFDDPNLIILPLAFGKRQGREFIWNDLLSLETGSLKLANGRVIEKTLYNRRTRQDEPALFVALTFERREVLDSSNIKPMNLIGVDRGENIPAVIALTDPEGCPLSRFKDSLGNPTHILRIGERYKEKQRTIQAKKEVEQRRAGGYSRKYASKAKNLADDMVRNTARDLLYYAVTQDAMLIFENLSRGFGRQGKRTFMAERQYTRMEDWLTAKLAYEGLPSKTYLSKTLAQYTSKTCSNCGFTITSADYDRVLEKLKKTATGWMTTINGKELKVEGQITYYNRYKRQNVVKDLSVELDRLSEESVNNDISSWTKGRSGNEALSLLKKRFSHRPVQEKFVCLNCGFETHADEQAALNIARSWLFLRSQEYKKYQTNKTTGNTDKRAFVETWQSFYRKKLKEVWKPAV

SEQ ID NO: 48369 - protein, 979 aa, synthetic construct
  REGION 1..979: note = engineered CasX variant
QEIKRINKIRRRLVKDSNTKKAGKTGPMKTLLVRVMTPDLRERLENLRKKPENIPQPISNTSRANLNKLLTDYTEMKKAILHVYWEEFQKDPVGLMSRVAQPASKKIDQNKLKPEMDEKGNLTTAGFACSQCGQPLFVYKLEQVSEKGKAYTNYFGRCNVAEHEKLILLAQLKPEKDSDEAVTYSLGKFGQRALDFYSIHVTKESTHPVKPLAQIAGNRYASHPVGKALSDACMGTIASFLSKYQDIIIEHQKVVKGNQKRLESLRELAGKENLEYPSVTLPPQPHTKEGVDAYNEVIARVRMWVNLNLWQKLKLSRDDAKPLLRLKGFPSFPLVERQANEVDWWDMVCNVKKLINEKKEDGKVFWQNLAGYKRQEALRPYLSSEEDRKKGKKFARYQLGDLLLHLEKKHGEDWGKVYDEAWERIDKKVEGLSKHIKLEEERRSEDAQSKAALTDWLRAKASFVIEGLKEADKDEFCRCELKLQKWYGDLRGKPFAIEAENSILDISGFSKQYNCAFIWQKDGVKKLNLYLIINYFKGGKLRFKKIKPEAFEANRFYTVINKKSGEIVPMEVNFNFDDPNLIILPLAFGKRQGREFIWNDLLSLETGSLKLANGRVIEKTLYNRRTRQDEPALFVALTFERREVLDSSNIKPMNLIGVDRGENIPAVIALTDPEGCPLSRFKDSLGNPTHILRIGERYKEKQRTIQAKKEVEQRRAGGYSRKYASKAKNLADDMVRNTARDLLYYAVTQDAMLIFENLSRGFGRQGKRTFMAERQYTRMEDWLTAKLAYEGLPSKTYLSKTLAQYTSKTCSNCGFTITSADYDRVLEKLKKTATGWMTTINGKELKVEGQITYYNRYKRQNVVKDLSVELDRLSEESVNNDISSWTKGRSGNEALSLLKKRFSHRPVQEKFVCLNCGFETHADEQAALNIARSWLFLRSQEYKKYQTNKTTGNTDKRAFVETWQSFYRKKLKEVWKPAV

SEQ ID NO: 48370 - protein, 979 aa, synthetic construct
  REGION 1..979: note = engineered CasX variant
QEIKRINKIRRRLVKDSNTKKAGKTGPMKTLLVRVMTPDLRERLENLRKKPENIPQPISNTSRANLNKLLTDYTEMKKAILHVYWEEFQKDPVGLMSRVAQPASKKIDQNKLKPEMDEKGNLTTAGFACSQCGQPLFVYKLEQVSEKGKAYTNYFGRCNVAEHEKLILLAQLKPEKDSDEAVTYSLGKFGQRALDFYSIHVTKESTHPVKPLAQIAGNRYASSPVGKALSDACMGTIASFLSKYQDIIIEHQKVVKGNQKRLESLRELAGKENLEYPSVTLPPQPHTKEGVDAYNEVIARVRMWVNLNLWQKLKLSRDDAKPLLRLKGFPSFPLVERQANEVDWWDMVCNVKKLINEKKEDGKVFWQNLAGYKRQEALRPYLSSEEDRKKGKKFARYQLGDLLLHLEKKHGEDWGKVYDEAWERIDKKVEGLSKHIKLEEERRSEDAQSKAALTDWLRAKASFVIEGLKEADKDEFCRCELKLQKWYGDLRGKPFAIEAENSILDISGFSKQYNCAFIWQKDGVKKLNLYLIINYFKGGKLRFKKIKPEAFEANRFYTVINKKSGEIVPMEVNFNFDDPNLIILPLAFGKRQGREFIWNDLLSLETGSLKLANGRVIEKTLYNRRTRQDEPALFVALTFERREVLDSSNIKPMNLIGVDRGENIPAVIALTDPEGCPLSRFKDSLGNPTHILRIGERYKEKQRTIQAKKEVEQRRAGGYSRKYASKAKNLADDMVRNTARDLLYYAVTQDAMLIFENLSRGFGRQGKRTFMAERQYTRMEDWLTAKLAYEGLPSKTYLSKTLAQYTSKTCSNCGFTITSADYDRVLEKLKKTATGWMTTINGKELKVEGQITYYNRYKRQNVVKDLSVELDRLSEESVNNDISSWTKGRSGNEALSLLKKRFSHRPVQEKFVCLNCGFETHADEQAALNIARSWLFLRSQEYKKYQTNKTTGNTDKRAFVETWQSFYRKKLKEVWKPAV

SEQ ID NO: 48371 - protein, 979 aa, synthetic construct
  REGION 1..979: note = engineered CasX variant
QEIKRINKIRRRLVKDSNTKKAGKTGPMKTLLVRVMTPDLRERLENLRKKPENIPQPISNTSRANLNKLLTDYTEMKKAILHVYWEEFQKDPVGLMSRVAQPASKKIDQNKLKPEMDEKGNLTTAGFACSQCGQPLFVYKLEQVSEKGKAYTNYFGRCNVAEHEKLILLAQLKPEKDSDEAVTYSLGKFGQRALDFYSIHVTKESTHPVKPLAQIAGNRYASTPVGKALSDACMGTIASFLSKYQDIIIEHQKVVKGNQKRLESLRELAGKENLEYPSVTLPPQPHTKEGVDAYNEVIARVRMWVNLNLWQKLKLSRDDAKPLLRLKGFPSFPLVERQANEVDWWDMVCNVKKLINEKKEDGKVFWQNLAGYKRQEALRPYLSSEEDRKKGKKFARYQLGDLLLHLEKKHGEDWGKVYDEAWERIDKKVEGLSKHIKLEEERRSEDAQSKAALTDWLRAKASFVIEGLKEADKDEFCRCELKLQKWYGDLRGKPFAIEAENSILDISGFSKQYNCAFIWQKDGVKKLNLYLIINYFKGGKLRFKKIKPEAFEANRFYTVINKKSGEIVPMEVNFNFDDPNLIILPLAFGKRQGREFIWNDLLSLETGSLKLANGRVIEKTLYNRRTRQDEPALFVALTFERREVLDSSNIKPMNLIGVDRGENIPAVIALTDPEGCPLSRFKDSLGNPTHILRIGERYKEKQRTIQAKKEVEQRRAGGYSRKYASKAKNLADDMVRNTARDLLYYAVTQDAMLIFENLSRGFGRQGKRTFMAERQYTRMEDWLTAKLAYEGLPSKTYLSKTLAQYTSKTCSNCGFTITSADYDRVLEKLKKTATGWMTTINGKELKVEGQITYYNRYKRQNVVKDLSVELDRLSEESVNNDISSWTKGRSGNEALSLLKKRFSHRPVQEKFVCLNCGFETHADEQAALNIARSWLFLRSQEYKKYQTNKTTGNTDKRAFVETWQSFYRKKLKEVWKPAV

SEQ ID NO: 48372 - protein, 979 aa, synthetic construct
  REGION 1..979: note = engineered CasX variant
QEIKRINKIRRRLVKDSNTKKAGKTGPMKTLLVRVMTPDLRERLENLRKKPENIPQPISNTSRANLNKLLTDYTEMKKAILHVYWEEFQKDPVGLMSRVAQPASKKIDQNKLKPEMDEKGNLTTAGFACSQCGQPLFVYKLEQVSEKGKAYTNYFGRCNVAEHEKLILLAQLKPEKDSDEAVTYSLGKFGQRALDFYSIHVTKESTHPVKPLAQIAGNRYASAPVGKALSDACMGTIASFLSKYQDIIIEHQKVVKGNQKRLESLRELAGKENLEYPSVTLPPQPHTKEGVDAYNEVIARVRMWVNLNLWQKLKLSRDDAKPLLRLKGFPSFPLVERQANEVDWWDMVCNVKKLINEKKEDGKVFWQNLAGYKRQEALRPYLSSEEDRKKGKKFARYQLGDLLLHLEKKHGEDWGKVYDEAWERIDKKVEGLSKHIKLEEERRSEDAQSKAALTDWLRAKASFVIEGLKEADKDEFCRCELKLQKWYGDLRGKPFAIEAENSILDISGFSKQYNCAFIWQKDGVKKLNLYLIINYFKGGKLRFKKIKPEAFEANRFYTVINKKSGEIVPMEVNFNFDDPNLIILPLAFGKRQGREFIWNDLLSLETGSLKLANGRVIEKTLYNRRTRQDEPALFVALTFERREVLDSSNIKPMNLIGVDRGENIPAVIALTDPEGCPLSRFKDSLGNPTHILRIGERYKEKQRTIQAKKEVEQRRAGGYSRKYASKAKNLADDMVRNTARDLLYYAVTQDAMLIFENLSRGFGRQGKRTFMAERQYTRMEDWLTAKLAYEGLPSKTYLSKTLAQYTSKTCSNCGFTITSADYDRVLEKLKKTATGWMTTINGKELKVEGQITYYNRYKRQNVVKDLSVELDRLSEESVNNDISSWTKGRSGNEALSLLKKRFSHRPVQEKFVCLNCGFETHADEQAALNIARSWLFLRSQEYKKYQTNKTTGNTDKRAFVETWQSFYRKKLKEVWKPAV

SEQ ID NO: 48373 - protein, 979 aa, synthetic construct
  REGION 1..979: note = engineered CasX variant
QEIKRINKIRRRLVKDSNTKKAGKTGPMKTLLVRVMTPDLRERLENLRKKPENIPQPISNTSRANLNKLLTDYTEMKKAILHVYWEEFQKDPVGLMSRVAQPASKKIDQNKLKPEMDEKGNLTTAGFACSQCGQPLFVYKLEQVSEKGKAYTNYFGRCNVAEHEKLILLAQLKPEKDSDEAVTYSLGKFGQRALDFYSIHVTKESTHPVKPLAQIAGNRYASVPVGKALSDACMGTIASFLSKYQDIIIEHQKVVKGNQKRLESLRELAGKENLEYPSVTLPPQPHTKEGVDAYNEVIARVRMWVNLNLWQKLKLSRDDAKPLLRLKGFPSFPLVERQANEVDWWDMVCNVKKLINEKKEDGKVFWQNLAGYKRQEALRPYLSSEEDRKKGKKFARYQLGDLLLHLEKKHGEDWGKVYDEAWERIDKKVEGLSKHIKLEEERRSEDAQSKAALTDWLRAKASFVIEGLKEADKDEFCRCELKLQKWYGDLRGKPFAIEAENSILDISGFSKQYNCAFIWQKDGVKKLNLYLIINYFKGGKLRFKKIKPEAFEANRFYTVINKKSGEIVPMEVNFNFDDPNLIILPLAFGKRQGREFIWNDLLSLETGSLKLANGRVIEKTLYNRRTRQDEPALFVALTFERREVLDSSNIKPMNLIGVDRGENIPAVIALTDPEGCPLSRFKDSLGNPTHILRIGERYKEKQRTIQAKKEVEQRRAGGYSRKYASKAKNLADDMVRNTARDLLYYAVTQDAMLIFENLSRGFGRQGKRTFMAERQYTRMEDWLTAKLAYEGLPSKTYLSKTLAQYTSKTCSNCGFTITSADYDRVLEKLKKTATGWMTTINGKELKVEGQITYYNRYKRQNVVKDLSVELDRLSEESVNNDISSWTKGRSGNEALSLLKKRFSHRPVQEKFVCLNCGFETHADEQAALNIARSWLFLRSQEYKKYQTNKTTGNTDKRAFVETWQSFYRKKLKEVWKPAV

SEQ ID NO: 48374 - protein, 979 aa, synthetic construct
  REGION 1..979: note = engineered CasX variant
QEIKRINKIRRRLVKDSNTKKAGKTGPMKTLLVRVMTPDLRERLENLRKKPENIPQPISNTSRANLNKLLTDYTEMKKAILHVYWEEFQKDPVGLMSRVAQPASKKIDQNKLKPEMDEKGNLTTAGFACSQCGQPLFVYKLEQVSEKGKAYTNYFGRCNVAEHEKLIKLAQLKPEKDSDEAVTYSLGKFGQRALDFYSIHVTKESTHPVKPLAQIAGNRYASGPVGKALSDACMGTIASFLSKYQDIIIEHQKVVKGNQKRLESLRELAGKENLEYPSVTLPPQPHTKEGVDAYNEVIARVRMWVNLNLWQKLKLSRDDAKPLLRLKGFPSFPLVERQANEVDWWDMVCNVKKLINEKKEDGKVFWQNLAGYKRQEALRPYLSSEEDRKKGKKFARYQLGDLLLHLEKKHGEDWGKVYDEAWERIDKKVEGLSKHIKLEEERRSEDAQSKAALTDWLRAKASFVIEGLKEADKDEFCRCELKLQKWYGDLRGKPFAIEAENSILDISGFSKQYNCAFIWQKDGVKKLNLYLIINYFKGGKLRFKKIKPEAFEANRFYTVINKKSGEIVPMEVNFNFDDPNLIILPLAFGKRQGREFIWNDLLSLETGSLKLANGRVIEKTLYNRRTRQDEPALFVALTFERREVLDSSNIKPMNLIGVDRGENIPAVIALTDPEGCPLSRFKDSLGNPTHILRIGERYKEKQRTIQAKKEVEQRRAGGYSRKYASKAKNLADDMVRNTARDLLYYAVTQDAMLIFENLSRGFGRQGKRTFMAERQYTRMEDWLTAKLAYEGLPSKTYLSKTLAQYTSKTCSNCGFTITSADYDRVLEKLKKTATGWMTTINGKELKVEGQITYYNRYKRQNVVKDLSVELDRLSEESVNNDISSWTKGRSGNEALSLLKKRFSHRPVQEKFVCLNCGFETHADEQAALNIARSWLFLRSQEYKKYQTNKTTGNTDKRAFVETWQSFYRKKLKEVWKPAV

SEQ ID NO: 48375 - protein, 978 aa, synthetic construct
  REGION 1..978: note = engineered CasX variant
QEIKRINKIRRRLVKDSNTKKAGKTGPMKTLLVRVMTPDLRERLENLRKKPENIPQPISNTSRANLNKLLTDYTEMKKAILHVYWEEFQKDPVGLMSRVAQPASKKIDQNKLKPEMDEKGNLTTAGFACSQCGQPLFVYKLEQVSEKGKAYTNYFGRCNVAEHEKLILLAQLKPEKDSDEAVTYSLGKFGQRALDFYSIHVTKESTHPVKPLAQIAGNRYASPVGKALSDACMGTIASFLSKYQDIIIEHQKVVKGNQKRLESLRELAGKENLEYPSVTLPPQPHTKEGVDAYNEVIARVRMWVNLNLWQKLKLSRDDAKPLLRLKGFPSFPLVERQANEVDWWDMVCNVKKLINEKKEDGKVFWQNLAGYKRQEALRPYLSSEEDRKKGKKFARYQLGDLLLHLEKKHGEDWGKVYDEAWERIDKKVEGLSKHIKLEEERRSEDAQSKAALTDWLRAKASFVIEGLKEADKDEFCRCELKLQKWYGDLRGKPFAIEAENSILDISGFSKQYNCAFIWQKDGVKKLNLYLIINYFKGGKLRFKKIKPEAFEANRFYTVINKKSGEIVPMEVNFNFDDPNLIILPLAFGKRQGREFIWNDLLSLETGSLKLANGRVIEKTLYNRRTRQDEPALFVALTFERREVLDSSNIKPMNLIGVDRGENIPAVIALTDPEGCPLSRFKDSLGNPTHILRIGERYKEKQRTIQAKKEVEQRRAGGYSRKYASKAKNLADDMVRNTARDLLYYAVTQDAMLIFENLSRGFGRQGKRTFMAERQYTRMEDWLTAKLAYEGLPSKTYLSKTLAQYTSKTCSNCGFTITSADYDRVLEKLKKTATGWMTTINGKELKVEGQITYYNRYKRQNVVKDLSVELDRLSEESVNNDISSWTKGRSGNEALSLLKKRFSHRPVQEKFVCLNCGFETHADEQAALNIARSWLFLRSQEYKKYQTNKTTGNTDKRAFVETWQSFYRKKLKEVWKPAV

SEQ ID NO: 48376 - protein, 978 aa, synthetic construct
  REGION 1..978: note = engineered CasX variant
QEIKRINKIRRRLVKDSNTKKAGKTGPMKTLLVRVMTPDLRERLENLRKKPENIPQPISNTSRANLNKLLTDYTEMKKAILHVYWEEFQKDPVGLMSRVAQPASKKIDQNKLKPEMDEKGNLTTAGFACSQCGQPLFVYKLEQVSEKGKAYTNYFGRCNVAEHEKLILLAQLKPEKDSDEAVTYSLGKFGQRALDFYSIHVTKESTHPVKPLAQIAGNRYASYPVGKALSDACMGTIASFLSKYQDIIIEHQKVVKGNQKRLESLRELAGKENLEYPSVTLPPQPHTKEGVDAYNEVIARVRMWVNLNLWQKLKLSRDDAKPLLRLKGFPSFPLVERQANEVDWWDMVCNVKKLINEKKEDGKVFWQNLAGYKRQEALRPYLSSEEDRQKGKKFARYQLGDLLLHLEKKHGEDWGKVYDEAWERIDKKVEGLSKHIKLEEERRSEDAQSKAALTDWLRAKASFVIEGLKEADKDEFCRCELKLQKWYGDLRGKPFAIEAENSILDISGFSKQYNCAFIWQKDGVKKLNLYLIINYFKGGKLRFKKIKPEAFEANRFYTVINKKSGEIVPMEVNFNFDDPNLIILPLAFGKRQGREFIWNDLLSLETGSLKLANGRVIEKTLYNRRTRQDEPALFVALTFERREVLDSSNIKPMNLIGVDRGENIPAVIALTDPEGCPLSRFKDSLGNPTHILRIGERYKEKQRTIQAKKEVEQRRAGGYSRKYASKAKNLADDMVRNTARDLLYYAVTQDAMLIFENLSRGFGRQGKRTFMAERQYTRMEDWLTAKLAYEGLPSKTYLSKTLAQYTSKTCSNCGFTITSADYDRVLEKLKKTATGWMTTINGKELKVEGQITYYNRYKRQNVVKDLSVELDRLSEESVNNDISSWTKGRSGEALSLLKKRFSHRPVQEKFVCLNCGFETHADEQAALNIARSWLFLRSQEYKKYQTNKTTGNTDKRAFVETWQSFYRKKLKEVWKPAV

SEQ ID NO: 48377 - protein, 978 aa, synthetic construct
  REGION 1..978: note = engineered CasX variant
QEIKRINKIRRRLVKDSNTKKAGKTGPMKTLLVRVMTPDLRERLENLRKKPENIPQPISNTSRANLNKLLTDYTEMKKAILHVYWEEFQKDPVGLMSRVAQPASKKIDQNKLKPEMDEKGNLTTAGFACSQCGQPLFVYKLEQVSEKGKAYTNYFGRCNVAEHEKLILLAQLKPEKDSDEAVTYSLGKFGQRALDFYSIHVTKESTHPVKPLAQIAGNRYASHPVGKALSDACMGTIASFLSKYQDIIIEHQKVVKGNQKRLESLRELAGKENLEYPSVTLPPQPHTKEGVDAYNEVIARVRMWVNLNLWQKLKLSRDDAKPLLRLKGFPSFPLVERQANEVDWWDMVCNVKKLINEKKEDGKVFWQNLAGYKRQEALRPYLSSEEDRQKGKKFARYQLGDLLLHLEKKHGEDWGKVYDEAWERIDKKVEGLSKHIKLEEERRSEDAQSKAALTDWLRAKASFVIEGLKEADKDEFCRCELKLQKWYGDLRGKPFAIEAENSILDISGFSKQYNCAFIWQKDGVKKLNLYLIINYFKGGKLRFKKIKPEAFEANRFYTVINKKSGEIVPMEVNFNFDDPNLIILPLAFGKRQGREFIWNDLLSLETGSLKLANGRVIEKTLYNRRTRQDEPALFVALTFERREVLDSSNIKPMNLIGVDRGENIPAVIALTDPEGCPLSRFKDSLGNPTHILRIGERYKEKQRTIQAKKEVEQRRAGGYSRKYASKAKNLADDMVRNTARDLLYYAVTQDAMLIFENLSRGFGRQGKRTFMAERQYTRMEDWLTAKLAYEGLPSKTYLSKTLAQYTSKTCSNCGFTITSADYDRVLEKLKKTATGWMTTINGKELKVEGQITYYNRYKRQNVVKDLSVELDRLSEESVNNDISSWTKGRSGEALSLLKKRFSHRPVQEKFVCLNCGFETHADEQAALNIARSWLFLRSQEYKKYQTNKTTGNTDKRAFVETWQSFYRKKLKEVWKPAV

SEQ ID NO: 48378 - protein, 978 aa, synthetic construct
  REGION 1..978: note = engineered CasX variant
QEIKRINKIRRRLVKDSNTKKAGKTGPMKTLLVRVMTPDLRERLENLRKKPENIPQPISNTSRANLNKLLTDYTEMKKAILHVYWEEFQKDPVGLMSRVAQPASKKIDQNKLKPEMDEKGNLTTAGFACSQCGQPLFVYKLEQVSEKGKAYTNYFGRCNVAEHEKLILLAQLKPEKDSDEAVTYSLGKFGQRALDFYSIHVTKESTHPVKPLAQIAGNRYASSPVGKALSDACMGTIASFLSKYQDIIIEHQKVVKGNQKRLESLRELAGKENLEYPSVTLPPQPHTKEGVDAYNEVIARVRMWVNLNLWQKLKLSRDDAKPLLRLKGFPSFPLVERQANEVDWWDMVCNVKKLINEKKEDGKVFWQNLAGYKRQEALRPYLSSEEDRQKGKKFARYQLGDLLLHLEKKHGEDWGKVYDEAWERIDKKVEGLSKHIKLEEERRSEDAQSKAALTDWLRAKASFVIEGLKEADKDEFCRCELKLQKWYGDLRGKPFAIEAENSILDISGFSKQYNCAFIWQKDGVKKLNLYLIINYFKGGKLRFKKIKPEAFEANRFYTVINKKSGEIVPMEVNFNFDDPNLIILPLAFGKRQGREFIWNDLLSLETGSLKLANGRVIEKTLYNRRTRQDEPALFVALTFERREVLDSSNIKPMNLIGVDRGENIPAVIALTDPEGCPLSRFKDSLGNPTHILRIGERYKEKQRTIQAKKEVEQRRAGGYSRKYASKAKNLADDMVRNTARDLLYYAVTQDAMLIFENLSRGFGRQGKRTFMAERQYTRMEDWLTAKLAYEGLPSKTYLSKTLAQYTSKTCSNCGFTITSADYDRVLEKLKKTATGWMTTINGKELKVEGQITYYNRYKRQNVVKDLSVELDRLSEESVNNDISSWTKGRSGEALSLLKKRFSHRPVQEKFVCLNCGFETHADEQAALNIARSWLFLRSQEYKKYQTNKTTGNTDKRAFVETWQSFYRKKLKEVWKPAV

SEQ ID NO: 48379 - protein, 978 aa, synthetic construct
  REGION 1..978: note = engineered CasX variant
QEIKRINKIRRRLVKDSNTKKAGKTGPMKTLLVRVMTPDLRERLENLRKKPENIPQPISNTSRANLNKLLTDYTEMKKAILHVYWEEFQKDPVGLMSRVAQPASKKIDQNKLKPEMDEKGNLTTAGFACSQCGQPLFVYKLEQVSEKGKAYTNYFGRCNVAEHEKLILLAQLKPEKDSDEAVTYSLGKFGQRALDFYSIHVTKESTHPVKPLAQIAGNRYASTPVGKALSDACMGTIASFLSKYQDIIIEHQKVVKGNQKRLESLRELAGKENLEYPSVTLPPQPHTKEGVDAYNEVIARVRMWVNLNLWQKLKLSRDDAKPLLRLKGFPSFPLVERQANEVDWWDMVCNVKKLINEKKEDGKVFWQNLAGYKRQEALRPYLSSEEDRQKGKKFARYQLGDLLLHLEKKHGEDWGKVYDEAWERIDKKVEGLSKHIKLEEERRSEDAQSKAALTDWLRAKASFVIEGLKEADKDEFCRCELKLQKWYGDLRGKPFAIEAENSILDISGFSKQYNCAFIWQKDGVKKLNLYLIINYFKGGKLRFKKIKPEAFEANRFYTVINKKSGEIVPMEVNFNFDDPNLIILPLAFGKRQGREFIWNDLLSLETGSLKLANGRVIEKTLYNRRTRQDEPALFVALTFERREVLDSSNIKPMNLIGVDRGENIPAVIALTDPEGCPLSRFKDSLGNPTHILRIGERYKEKQRTIQAKKEVEQRRAGGYSRKYASKAKNLADDMVRNTARDLLYYAVTQDAMLIFENLSRGFGRQGKRTFMAERQYTRMEDWLTAKLAYEGLPSKTYLSKTLAQYTSKTCSNCGFTITSADYDRVLEKLKKTATGWMTTINGKELKVEGQITYYNRYKRQNVVKDLSVELDRLSEESVNNDISSWTKGRSGEALSLLKKRFSHRPVQEKFVCLNCGFETHADEQAALNIARSWLFLRSQEYKKYQTNKTTGNTDKRAFVETWQSFYRKKLKEVWKPAV

SEQ ID NO: 48380 - protein, 978 aa, synthetic construct
  REGION 1..978: note = engineered CasX variant
QEIKRINKIRRRLVKDSNTKKAGKTGPMKTLLVRVMTPDLRERLENLRKKPENIPQPISNTSRANLNKLLTDYTEMKKAILHVYWEEFQKDPVGLMSRVAQPASKKIDQNKLKPEMDEKGNLTTAGFACSQCGQPLFVYKLEQVSEKGKAYTNYFGRCNVAEHEKLILLAQLKPEKDSDEAVTYSLGKFGQRALDFYSIHVTKESTHPVKPLAQIAGNRYASAPVGKALSDACMGTIASFLSKYQDIIIEHQKVVKGNQKRLESLRELAGKENLEYPSVTLPPQPHTKEGVDAYNEVIARVRMWVNLNLWQKLKLSRDDAKPLLRLKGFPSFPLVERQANEVDWWDMVCNVKKLINEKKEDGKVFWQNLAGYKRQEALRPYLSSEEDRQKGKKFARYQLGDLLLHLEKKHGEDWGKVYDEAWERIDKKVEGLSKHIKLEEERRSEDAQSKAALTDWLRAKASFVIEGLKEADKDEFCRCELKLQKWYGDLRGKPFAIEAENSILDISGFSKQYNCAFIWQKDGVKKLNLYLIINYFKGGKLRFKKIKPEAFEANRFYTVINKKSGEIVPMEVNFNFDDPNLIILPLAFGKRQGREFIWNDLLSLETGSLKLANGRVIEKTLYNRRTRQDEPALFVALTFERREVLDSSNIKPMNLIGVDRGENIPAVIALTDPEGCPLSRFKDSLGNPTHILRIGERYKEKQRTIQAKKEVEQRRAGGYSRKYASKAKNLADDMVRNTARDLLYYAVTQDAMLIFENLSRGFGRQGKRTFMAERQYTRMEDWLTAKLAYEGLPSKTYLSKTLAQYTSKTCSNCGFTITSADYDRVLEKLKKTATGWMTTINGKELKVEGQITYYNRYKRQNVVKDLSVELDRLSEESVNNDISSWTKGRSGEALSLLKKRFSHRPVQEKFVCLNCGFETHADEQAALNIARSWLFLRSQEYKKYQTNKTTGNTDKRAFVETWQSFYRKKLKEVWKPAV

SEQ ID NO: 48381 - protein, 978 aa, synthetic construct
  REGION 1..978: note = engineered CasX variant
QEIKRINKIRRRLVKDSNTKKAGKTGPMKTLLVRVMTPDLRERLENLRKKPENIPQPISNTSRANLNKLLTDYTEMKKAILHVYWEEFQKDPVGLMSRVAQPASKKIDQNKLKPEMDEKGNLTTAGFACSQCGQPLFVYKLEQVSEKGKAYTNYFGRCNVAEHEKLILLAQLKPEKDSDEAVTYSLGKFGQRALDFYSIHVTKESTHPVKPLAQIAGNRYASVPVGKALSDACMGTIASFLSKYQDIIIEHQKVVKGNQKRLESLRELAGKENLEYPSVTLPPQPHTKEGVDAYNEVIARVRMWVNLNLWQKLKLSRDDAKPLLRLKGFPSFPLVERQANEVDWWDMVCNVKKLINEKKEDGKVFWQNLAGYKRQEALRPYLSSEEDRQKGKKFARYQLGDLLLHLEKKHGEDWGKVYDEAWERIDKKVEGLSKHIKLEEERRSEDAQSKAALTDWLRAKASFVIEGLKEADKDEFCRCELKLQKWYGDLRGKPFAIEAENSILDISGFSKQYNCAFIWQKDGVKKLNLYLIINYFKGGKLRFKKIKPEAFEANRFYTVINKKSGEIVPMEVNFNFDDPNLIILPLAFGKRQGREFIWNDLLSLETGSLKLANGRVIEKTLYNRRTRQDEPALFVALTFERREVLDSSNIKPMNLIGVDRGENIPAVIALTDPEGCPLSRFKDSLGNPTHILRIGERYKEKQRTIQAKKEVEQRRAGGYSRKYASKAKNLADDMVRNTARDLLYYAVTQDAMLIFENLSRGFGRQGKRTFMAERQYTRMEDWLTAKLAYEGLPSKTYLSKTLAQYTSKTCSNCGFTITSADYDRVLEKLKKTATGWMTTINGKELKVEGQITYYNRYKRQNVVKDLSVELDRLSEESVNNDISSWTKGRSGEALSLLKKRFSHRPVQEKFVCLNCGFETHADEQAALNIARSWLFLRSQEYKKYQTNKTTGNTDKRAFVETWQSFYRKKLKEVWKPAV

SEQ ID NO: 48382 - protein, 978 aa, synthetic construct
  REGION 1..978: note = engineered CasX variant
QEIKRINKIRRRLVKDSNTKKAGKTGPMKTLLVRVMTPDLRERLENLRKKPENIPQPISNTSRANLNKLLTDYTEMKKAILHVYWEEFQKDPVGLMSRVAQPASKKIDQNKLKPEMDEKGNLTTAGFACSQCGQPLFVYKLEQVSEKGKAYTNYFGRCNVAEHEKLIKLAQLKPEKDSDEAVTYSLGKFGQRALDFYSIHVTKESTHPVKPLAQIAGNRYASGPVGKALSDACMGTIASFLSKYQDIIIEHQKVVKGNQKRLESLRELAGKENLEYPSVTLPPQPHTKEGVDAYNEVIARVRMWVNLNLWQKLKLSRDDAKPLLRLKGFPSFPLVERQANEVDWWDMVCNVKKLINEKKEDGKVFWQNLAGYKRQEALRPYLSSEEDRQKGKKFARYQLGDLLLHLEKKHGEDWGKVYDEAWERIDKKVEGLSKHIKLEEERRSEDAQSKAALTDWLRAKASFVIEGLKEADKDEFCRCELKLQKWYGDLRGKPFAIEAENSILDISGFSKQYNCAFIWQKDGVKKLNLYLIINYFKGGKLRFKKIKPEAFEANRFYTVINKKSGEIVPMEVNFNFDDPNLIILPLAFGKRQGREFIWNDLLSLETGSLKLANGRVIEKTLYNRRTRQDEPALFVALTFERREVLDSSNIKPMNLIGVDRGENIPAVIALTDPEGCPLSRFKDSLGNPTHILRIGERYKEKQRTIQAKKEVEQRRAGGYSRKYASKAKNLADDMVRNTARDLLYYAVTQDAMLIFENLSRGFGRQGKRTFMAERQYTRMEDWLTAKLAYEGLPSKTYLSKTLAQYTSKTCSNCGFTITSADYDRVLEKLKKTATGWMTTINGKELKVEGQITYYNRYKRQNVVKDLSVELDRLSEESVNNDISSWTKGRSGEALSLLKKRFSHRPVQEKFVCLNCGFETHADEQAALNIARSWLFLRSQEYKKYQTNKTTGNTDKRAFVETWQSFYRKKLKEVWKPAV

SEQ ID NO: 48383 - protein, 977 aa, synthetic construct
  REGION 1..977: note = engineered CasX variant
QEIKRINKIRRRLVKDSNTKKAGKTGPMKTLLVRVMTPDLRERLENLRKKPENIPQPISNTSRANLNKLLTDYTEMKKAILHVYWEEFQKDPVGLMSRVAQPASKKIDQNKLKPEMDEKGNLTTAGFACSQCGQPLFVYKLEQVSEKGKAYTNYFGRCNVAEHEKLILLAQLKPEKDSDEAVTYSLGKFGQRALDFYSIHVTKESTHPVKPLAQIAGNRYASPVGKALSDACMGTIASFLSKYQDIIIEHQKVVKGNQKRLESLRELAGKENLEYPSVTLPPQPHTKEGVDAYNEVIARVRMWVNLNLWQKLKLSRDDAKPLLRLKGFPSFPLVERQANEVDWWDMVCNVKKLINEKKEDGKVFWQNLAGYKRQEALRPYLSSEEDRQKGKKFARYQLGDLLLHLEKKHGEDWGKVYDEAWERIDKKVEGLSKHIKLEEERRSEDAQSKAALTDWLRAKASFVIEGLKEADKDEFCRCELKLQKWYGDLRGKPFAIEAENSILDISGFSKQYNCAFIWQKDGVKKLNLYLIINYFKGGKLRFKKIKPEAFEANRFYTVINKKSGEIVPMEVNFNFDDPNLIILPLAFGKRQGREFIWNDLLSLETGSLKLANGRVIEKTLYNRRTRQDEPALFVALTFERREVLDSSNIKPMNLIGVDRGENIPAVIALTDPEGCPLSRFKDSLGNPTHILRIGERYKEKQRTIQAKKEVEQRRAGGYSRKYASKAKNLADDMVRNTARDLLYYAVTQDAMLIFENLSRGFGRQGKRTFMAERQYTRMEDWLTAKLAYEGLPSKTYLSKTLAQYTSKTCSNCGFTITSADYDRVLEKLKKTATGWMTTINGKELKVEGQITYYNRYKRQNVVKDLSVELDRLSEESVNNDISSWTKGRSGEALSLLKKRFSHRPVQEKFVCLNCGFETHADEQAALNIARSWLFLRSQEYKKYQTNKTTGNTDKRAFVETWQSFYRKKLKEVWKPAV

SEQ ID NO: 48384 - protein, 978 aa, synthetic construct
  REGION 1..978: note = engineered CasX variant
QEIKRINKIRRRLVKDSNTKKAGKTGPMKTLLVRVMTPDLRERLENLRKKPENIPQPISNTSRANLNKLLTDYTEMKKAILHVYWEEFQKDPVGLMSRVAQPASKKIDQNKLKPEMDEKGNLTTAGFACSQCGQPLFVYKLEQVSEKGKAYTNYFGRCNVAEHEKLILLAQLKPEKDSDEAVTYSLGKFGQRALDFYSIHVTKESTHPVKPLAQIAGNRYASYPVGKALSDACMGTIASFLSKYQDIIIEHQKVVKGNQKRLESLRELAGKENLEYPSVTLPPQPHTKEGVDAYNEVIARVRMWVNLNLWQKLKLSRDDAKPLLRLKGFPSFPLVERQANEVDWWDMVCNVKKLINEKKEDGKVFWQNLAGYKRQEALRPYLSSEEDRKKGKKFARYQLGDLLLHLEKKHGEDWGKVYDEAWERIDKKVEGLSKHIKLEEERRSEDAQSKAALTDWLRAKASFVIEGLKEADKDEFCRCELKLQKWYGDLRGKPFAIEAENSILDISGFSKQYNCAFIWQKDGVKKLNLYLIINYFKGGKLRFKKIKPEAFEANRFYTVINKKSGEIVPMEVNFNFDDPNLIILPLAFGKRQGREFIWNDLLSLETGSLKLANGRVIEKTLYNRRTRQDEPALFVALTFERREVLDSSNIKPMNLIGVDRGENIPAVIALTDPEGCPLSRFKDSLGNPTHILRIGERYKEKQRTIQAKKEVEQRRAGGYSRKYASKAKNLADDMVRNTARDLLYYAVTQDAMLIFENLSRGFGRQGKRTFMAERQYTRMEDWLTAKLAYEGLPSQTYLSKTLAQYTSKTCSNCGFTITSADYDRVLEKLKKTATGWMTTINGKELKVEGQITYYNRYKRQNVVKDLSVELDRLSEESVNNDISSWTKGRSGEALSLLKKRFSHRPVQEKFVCLNCGFETHADEQAALNIARSWLFLRSQEYKKYQTNKTTGNTDKRAFVETWQSFYRKKLKEVWKPAV

SEQ ID NO: 48385 - protein, 978 aa, synthetic construct
  REGION 1..978: note = engineered CasX variant
QEIKRINKIRRRLVKDSNTKKAGKTGPMKTLLVRVMTPDLRERLENLRKKPENIPQPISNTSRANLNKLLTDYTEMKKAILHVYWEEFQKDPVGLMSRVAQPASKKIDQNKLKPEMDEKGNLTTAGFACSQCGQPLFVYKLEQVSEKGKAYTNYFGRCNVAEHEKLILLAQLKPEKDSDEAVTYSLGKFGQRALDFYSIHVTKESTHPVKPLAQIAGNRYASHPVGKALSDACMGTIASFLSKYQDIIIEHQKVVKGNQKRLESLRELAGKENLEYPSVTLPPQPHTKEGVDAYNEVIARVRMWVNLNLWQKLKLSRDDAKPLLRLKGFPSFPLVERQANEVDWWDMVCNVKKLINEKKEDGKVFWQNLAGYKRQEALRPYLSSEEDRKKGKKFARYQLGDLLLHLEKKHGEDWGKVYDEAWERIDKKVEGLSKHIKLEEERRSEDAQSKAALTDWLRAKASFVIEGLKEADKDEFCRCELKLQKWYGDLRGKPFAIEAENSILDISGFSKQYNCAFIWQKDGVKKLNLYLIINYFKGGKLRFKKIKPEAFEANRFYTVINKKSGEIVPMEVNFNFDDPNLIILPLAFGKRQGREFIWNDLLSLETGSLKLANGRVIEKTLYNRRTRQDEPALFVALTFERREVLDSSNIKPMNLIGVDRGENIPAVIALTDPEGCPLSRFKDSLGNPTHILRIGERYKEKQRTIQAKKEVEQRRAGGYSRKYASKAKNLADDMVRNTARDLLYYAVTQDAMLIFENLSRGFGRQGKRTFMAERQYTRMEDWLTAKLAYEGLPSQTYLSKTLAQYTSKTCSNCGFTITSADYDRVLEKLKKTATGWMTTINGKELKVEGQITYYNRYKRQNVVKDLSVELDRLSEESVNNDISSWTKGRSGEALSLLKKRFSHRPVQEKFVCLNCGFETHADEQAALNIARSWLFLRSQEYKKYQTNKTTGNTDKRAFVETWQSFYRKKLKEVWKPAV

SEQ ID NO: 48386 - protein, 978 aa, synthetic construct
  REGION 1..978: note = engineered CasX variant
QEIKRINKIRRRLVKDSNTKKAGKTGPMKTLLVRVMTPDLRERLENLRKKPENIPQPISNTSRANLNKLLTDYTEMKKAILHVYWEEFQKDPVGLMSRVAQPASKKIDQNKLKPEMDEKGNLTTAGFACSQCGQPLFVYKLEQVSEKGKAYTNYFGRCNVAEHEKLILLAQLKPEKDSDEAVTYSLGKFGQRALDFYSIHVTKESTHPVKPLAQIAGNRYASSPVGKALSDACMGTIASFLSKYQDIIIEHQKVVKGNQKRLESLRELAGKENLEYPSVTLPPQPHTKEGVDAYNEVIARVRMWVNLNLWQKLKLSRDDAKPLLRLKGFPSFPLVERQANEVDWWDMVCNVKKLINEKKEDGKVFWQNLAGYKRQEALRPYLSSEEDRKKGKKFARYQLGDLLLHLEKKHGEDWGKVYDEAWERIDKKVEGLSKHIKLEEERRSEDAQSKAALTDWLRAKASFVIEGLKEADKDEFCRCELKLQKWYGDLRGKPFAIEAENSILDISGFSKQYNCAFIWQKDGVKKLNLYLIINYFKGGKLRFKKIKPEAFEANRFYTVINKKSGEIVPMEVNFNFDDPNLIILPLAFGKRQGREFIWNDLLSLETGSLKLANGRVIEKTLYNRRTRQDEPALFVALTFERREVLDSSNIKPMNLIGVDRGENIPAVIALTDPEGCPLSRFKDSLGNPTHILRIGERYKEKQRTIQAKKEVEQRRAGGYSRKYASKAKNLADDMVRNTARDLLYYAVTQDAMLIFENLSRGFGRQGKRTFMAERQYTRMEDWLTAKLAYEGLPSQTYLSKTLAQYTSKTCSNCGFTITSADYDRVLEKLKKTATGWMTTINGKELKVEGQITYYNRYKRQNVVKDLSVELDRLSEESVNNDISSWTKGRSGEALSLLKKRFSHRPVQEKFVCLNCGFETHADEQAALNIARSWLFLRSQEYKKYQTNKTTGNTDKRAFVETWQSFYRKKLKEVWKPAV

SEQ ID NO: 48387 - protein, 978 aa, synthetic construct
  REGION 1..978: note = engineered CasX variant
QEIKRINKIRRRLVKDSNTKKAGKTGPMKTLLVRVMTPDLRERLENLRKKPENIPQPISNTSRANLNKLLTDYTEMKKAILHVYWEEFQKDPVGLMSRVAQPASKKIDQNKLKPEMDEKGNLTTAGFACSQCGQPLFVYKLEQVSEKGKAYTNYFGRCNVAEHEKLILLAQLKPEKDSDEAVTYSLGKFGQRALDFYSIHVTKESTHPVKPLAQIAGNRYASTPVGKALSDACMGTIASFLSKYQDIIIEHQKVVKGNQKRLESLRELAGKENLEYPSVTLPPQPHTKEGVDAYNEVIARVRMWVNLNLWQKLKLSRDDAKPLLRLKGFPSFPLVERQANEVDWWDMVCNVKKLINEKKEDGKVFWQNLAGYKRQEALRPYLSSEEDRKKGKKFARYQLGDLLLHLEKKHGEDWGKVYDEAWERIDKKVEGLSKHIKLEEERRSEDAQSKAALTDWLRAKASFVIEGLKEADKDEFCRCELKLQKWYGDLRGKPFAIEAENSILDISGFSKQYNCAFIWQKDGVKKLNLYLIINYFKGGKLRFKKIKPEAFEANRFYTVINKKSGEIVPMEVNFNFDDPNLIILPLAFGKRQGREFIWNDLLSLETGSLKLANGRVIEKTLYNRRTRQDEPALFVALTFERREVLDSSNIKPMNLIGVDRGENIPAVIALTDPEGCPLSRFKDSLGNPTHILRIGERYKEKQRTIQAKKEVEQRRAGGYSRKYASKAKNLADDMVRNTARDLLYYAVTQDAMLIFENLSRGFGRQGKRTFMAERQYTRMEDWLTAKLAYEGLPSQTYLSKTLAQYTSKTCSNCGFTITSADYDRVLEKLKKTATGWMTTINGKELKVEGQITYYNRYKRQNVVKDLSVELDRLSEESVNNDISSWTKGRSGEALSLLKKRFSHRPVQEKFVCLNCGFETHADEQAALNIARSWLFLRSQEYKKYQTNKTTGNTDKRAFVETWQSFYRKKLKEVWKPAV

SEQ ID NO: 48388 - protein, 978 aa, synthetic construct
  REGION 1..978: note = engineered CasX variant
QEIKRINKIRRRLVKDSNTKKAGKTGPMKTLLVRVMTPDLRERLENLRKKPENIPQPISNTSRANLNKLLTDYTEMKKAILHVYWEEFQKDPVGLMSRVAQPASKKIDQNKLKPEMDEKGNLTTAGFACSQCGQPLFVYKLEQVSEKGKAYTNYFGRCNVAEHEKLILLAQLKPEKDSDEAVTYSLGKFGQRALDFYSIHVTKESTHPVKPLAQIAGNRYASAPVGKALSDACMGTIASFLSKYQDIIIEHQKVVKGNQKRLESLRELAGKENLEYPSVTLPPQPHTKEGVDAYNEVIARVRMWVNLNLWQKLKLSRDDAKPLLRLKGFPSFPLVERQANEVDWWDMVCNVKKLINEKKEDGKVFWQNLAGYKRQEALRPYLSSEEDRKKGKKFARYQLGDLLLHLEKKHGEDWGKVYDEAWERIDKKVEGLSKHIKLEEERRSEDAQSKAALTDWLRAKASFVIEGLKEADKDEFCRCELKLQKWYGDLRGKPFAIEAENSILDISGFSKQYNCAFIWQKDGVKKLNLYLIINYFKGGKLRFKKIKPEAFEANRFYTVINKKSGEIVPMEVNFNFDDPNLIILPLAFGKRQGREFIWNDLLSLETGSLKLANGRVIEKTLYNRRTRQDEPALFVALTFERREVLDSSNIKPMNLIGVDRGENIPAVIALTDPEGCPLSRFKDSLGNPTHILRIGERYKEKQRTIQAKKEVEQRRAGGYSRKYASKAKNLADDMVRNTARDLLYYAVTQDAMLIFENLSRGFGRQGKRTFMAERQYTRMEDWLTAKLAYEGLPSQTYLSKTLAQYTSKTCSNCGFTITSADYDRVLEKLKKTATGWMTTINGKELKVEGQITYYNRYKRQNVVKDLSVELDRLSEESVNNDISSWTKGRSGEALSLLKKRFSHRPVQEKFVCLNCGFETHADEQAALNIARSWLFLRSQEYKKYQTNKTTGNTDKRAFVETWQSFYRKKLKEVWKPAV

SEQ ID NO: 48389 - protein, 978 aa, synthetic construct
  REGION 1..978: note = engineered CasX variant
QEIKRINKIRRRLVKDSNTKKAGKTGPMKTLLVRVMTPDLRERLENLRKKPENIPQPISNTSRANLNKLLTDYTEMKKAILHVYWEEFQKDPVGLMSRVAQPASKKIDQNKLKPEMDEKGNLTTAGFACSQCGQPLFVYKLEQVSEKGKAYTNYFGRCNVAEHEKLILLAQLKPEKDSDEAVTYSLGKFGQRALDFYSIHVTKESTHPVKPLAQIAGNRYASVPVGKALSDACMGTIASFLSKYQDIIIEHQKVVKGNQKRLESLRELAGKENLEYPSVTLPPQPHTKEGVDAYNEVIARVRMWVNLNLWQKLKLSRDDAKPLLRLKGFPSFPLVERQANEVDWWDMVCNVKKLINEKKEDGKVFWQNLAGYKRQEALRPYLSSEEDRKKGKKFARYQLGDLLLHLEKKHGEDWGKVYDEAWERIDKKVEGLSKHIKLEEERRSEDAQSKAALTDWLRAKASFVIEGLKEADKDEFCRCELKLQKWYGDLRGKPFAIEAENSILDISGFSKQYNCAFIWQKDGVKKLNLYLIINYFKGGKLRFKKIKPEAFEANRFYTVINKKSGEIVPMEVNFNFDDPNLIILPLAFGKRQGREFIWNDLLSLETGSLKLANGRVIEKTLYNRRTRQDEPALFVALTFERREVLDSSNIKPMNLIGVDRGENIPAVIALTDPEGCPLSRFKDSLGNPTHILRIGERYKEKQRTIQAKKEVEQRRAGGYSRKYASKAKNLADDMVRNTARDLLYYAVTQDAMLIFENLSRGFGRQGKRTFMAERQYTRMEDWLTAKLAYEGLPSQTYLSKTLAQYTSKTCSNCGFTITSADYDRVLEKLKKTATGWMTTINGKELKVEGQITYYNRYKRQNVVKDLSVELDRLSEESVNNDISSWTKGRSGEALSLLKKRFSHRPVQEKFVCLNCGFETHADEQAALNIARSWLFLRSQEYKKYQTNKTTGNTDKRAFVETWQSFYRKKLKEVWKPAV

SEQ ID NO: 48390 - protein, 978 aa, synthetic construct
  REGION 1..978: note = engineered CasX variant
QEIKRINKIRRRLVKDSNTKKAGKTGPMKTLLVRVMTPDLRERLENLRKKPENIPQPISNTSRANLNKLLTDYTEMKKAILHVYWEEFQKDPVGLMSRVAQPASKKIDQNKLKPEMDEKGNLTTAGFACSQCGQPLFVYKLEQVSEKGKAYTNYFGRCNVAEHEKLIKLAQLKPEKDSDEAVTYSLGKFGQRALDFYSIHVTKESTHPVKPLAQIAGNRYASGPVGKALSDACMGTIASFLSKYQDIIIEHQKVVKGNQKRLESLRELAGKENLEYPSVTLPPQPHTKEGVDAYNEVIARVRMWVNLNLWQKLKLSRDDAKPLLRLKGFPSFPLVERQANEVDWWDMVCNVKKLINEKKEDGKVFWQNLAGYKRQEALRPYLSSEEDRKKGKKFARYQLGDLLLHLEKKHGEDWGKVYDEAWERIDKKVEGLSKHIKLEEERRSEDAQSKAALTDWLRAKASFVIEGLKEADKDEFCRCELKLQKWYGDLRGKPFAIEAENSILDISGFSKQYNCAFIWQKDGVKKLNLYLIINYFKGGKLRFKKIKPEAFEANRFYTVINKKSGEIVPMEVNFNFDDPNLIILPLAFGKRQGREFIWNDLLSLETGSLKLANGRVIEKTLYNRRTRQDEPALFVALTFERREVLDSSNIKPMNLIGVDRGENIPAVIALTDPEGCPLSRFKDSLGNPTHILRIGERYKEKQRTIQAKKEVEQRRAGGYSRKYASKAKNLADDMVRNTARDLLYYAVTQDAMLIFENLSRGFGRQGKRTFMAERQYTRMEDWLTAKLAYEGLPSQTYLSKTLAQYTSKTCSNCGFTITSADYDRVLEKLKKTATGWMTTINGKELKVEGQITYYNRYKRQNVVKDLSVELDRLSEESVNNDISSWTKGRSGEALSLLKKRFSHRPVQEKFVCLNCGFETHADEQAALNIARSWLFLRSQEYKKYQTNKTTGNTDKRAFVETWQSFYRKKLKEVWKPAV

SEQ ID NO: 48391 - protein, 977 aa, synthetic construct
  REGION 1..977: note = engineered CasX variant
QEIKRINKIRRRLVKDSNTKKAGKTGPMKTLLVRVMTPDLRERLENLRKKPENIPQPISNTSRANLNKLLTDYTEMKKAILHVYWEEFQKDPVGLMSRVAQPASKKIDQNKLKPEMDEKGNLTTAGFACSQCGQPLFVYKLEQVSEKGKAYTNYFGRCNVAEHEKLILLAQLKPEKDSDEAVTYSLGKFGQRALDFYSIHVTKESTHPVKPLAQIAGNRYASPVGKALSDACMGTIASFLSKYQDIIIEHQKVVKGNQKRLESLRELAGKENLEYPSVTLPPQPHTKEGVDAYNEVIARVRMWVNLNLWQKLKLSRDDAKPLLRLKGFPSFPLVERQANEVDWWDMVCNVKKLINEKKEDGKVFWQNLAGYKRQEALRPYLSSEEDRKKGKKFARYQLGDLLLHLEKKHGEDWGKVYDEAWERIDKKVEGLSKHIKLEEERRSEDAQSKAALTDWLRAKASFVIEGLKEADKDEFCRCELKLQKWYGDLRGKPFAIEAENSILDISGFSKQYNCAFIWQKDGVKKLNLYLIINYFKGGKLRFKKIKPEAFEANRFYTVINKKSGEIVPMEVNFNFDDPNLIILPLAFGKRQGREFIWNDLLSLETGSLKLANGRVIEKTLYNRRTRQDEPALFVALTFERREVLDSSNIKPMNLIGVDRGENIPAVIALTDPEGCPLSRFKDSLGNPTHILRIGERYKEKQRTIQAKKEVEQRRAGGYSRKYASKAKNLADDMVRNTARDLLYYAVTQDAMLIFENLSRGFGRQGKRTFMAERQYTRMEDWLTAKLAYEGLPSQTYLSKTLAQYTSKTCSNCGFTITSADYDRVLEKLKKTATGWMTTINGKELKVEGQITYYNRYKRQNVVKDLSVELDRLSEESVNNDISSWTKGRSGEALSLLKKRFSHRPVQEKFVCLNCGFETHADEQAALNIARSWLFLRSQEYKKYQTNKTTGNTDKRAFVETWQSFYRKKLKEVWKPAV

SEQ ID NO: 48392 - protein, 978 aa, synthetic construct
  REGION 1..978: note = engineered CasX variant
QEIKRINKIRRRLVKDSNTKKAGKTGPMKTLLVRVMTPDLRERLENLRKKPENIPQPISNTSRANLNKLLTDYTEMKKAILHVYWEEFQKDPVGLMSRVAQPASKKIDQNKLKPEMDEKGNLTTAGFACSQCGQPLFVYKLEQVSEKGKAYTNYFGRCNVAEHEKLILLAQLKPEKDSDEAVTYSLGKFGQRALDFYSIHVTKESTHPVKPLAQIAGNRYASYPVGKALSDACMGTIASFLSKYQDIIIEHQKVVKGNQKRLESLRELAGKENLEYPSVTLPPQPHTKEGVDAYNEVIARVRMWVNLNLWQKLKLSRDDAKPLLRLKGFPSFPLVERQANEVDWWDMVCNVKKLINEKKEDGKVFWQNLAGYKRQEALRPYLSSEEDRKKGKKFARYQLGDLLLHLEKKHGEDWGKVYDEAWERIDKKVEGLSKHIKLEEERRSEDAQSKAALTDWLRAKASFVIEGLKEADKDEFCRCELKLQKWYGDLRGKPFAIEAENSILDISGFSKQYNCAFIWQKDGVKKLNLYLIINYFKGGKLRFKKIKPEAFEANRFYTVINKKSGEIVPMEVNFNFDDPNLIILPLAFGKRQGREFIWNDLLSLETGSLKLANGRVIEKTLYNRRTRQDEPALFVALTFERREVLDSSNIKPMNLIGVDRGENIPAVIALTDPEGCPLSRFKDSLGNPTHILRIGERYKEKQRTIQAKKEVEQRRAGGYSRKYASKAKNLADDMVRNTARDLLYYAVTQDAMLIFENLSRGFGRQGKRTFMAERQYTRMEDWLTAKLAYNGLPSKTYLSKTLAQYTSKTCSNCGFTITSADYDRVLEKLKKTATGWMTTINGKELKVEGQITYYNRYKRQNVVKDLSVELDRLSEESVNNDISSWTKGRSGEALSLLKKRFSHRPVQEKFVCLNCGFETHADEQAALNIARSWLFLRSQEYKKYQTNKTTGNTDKRAFVETWQSFYRKKLKEVWKPAV

SEQ ID NO: 48393 - protein, 978 aa, synthetic construct
  REGION 1..978: note = engineered CasX variant
QEIKRINKIRRRLVKDSNTKKAGKTGPMKTLLVRVMTPDLRERLENLRKKPENIPQPISNTSRANLNKLLTDYTEMKKAILHVYWEEFQKDPVGLMSRVAQPASKKIDQNKLKPEMDEKGNLTTAGFACSQCGQPLFVYKLEQVSEKGKAYTNYFGRCNVAEHEKLILLAQLKPEKDSDEAVTYSLGKFGQRALDFYSIHVTKESTHPVKPLAQIAGNRYASHPVGKALSDACMGTIASFLSKYQDIIIEHQKVVKGNQKRLESLRELAGKENLEYPSVTLPPQPHTKEGVDAYNEVIARVRMWVNLNLWQKLKLSRDDAKPLLRLKGFPSFPLVERQANEVDWWDMVCNVKKLINEKKEDGKVFWQNLAGYKRQEALRPYLSSEEDRKKGKKFARYQLGDLLLHLEKKHGEDWGKVYDEAWERIDKKVEGLSKHIKLEEERRSEDAQSKAALTDWLRAKASFVIEGLKEADKDEFCRCELKLQKWYGDLRGKPFAIEAENSILDISGFSKQYNCAFIWQKDGVKKLNLYLIINYFKGGKLRFKKIKPEAFEANRFYTVINKKSGEIVPMEVNFNFDDPNLIILPLAFGKRQGREFIWNDLLSLETGSLKLANGRVIEKTLYNRRTRQDEPALFVALTFERREVLDSSNIKPMNLIGVDRGENIPAVIALTDPEGCPLSRFKDSLGNPTHILRIGERYKEKQRTIQAKKEVEQRRAGGYSRKYASKAKNLADDMVRNTARDLLYYAVTQDAMLIFENLSRGFGRQGKRTFMAERQYTRMEDWLTAKLAYNGLPSKTYLSKTLAQYTSKTCSNCGFTITSADYDRVLEKLKKTATGWMTTINGKELKVEGQITYYNRYKRQNVVKDLSVELDRLSEESVNNDISSWTKGRSGEALSLLKKRFSHRPVQEKFVCLNCGFETHADEQAALNIARSWLFLRSQEYKKYQTNKTTGNTDKRAFVETWQSFYRKKLKEVWKPAV

SEQ ID NO: 48394 - protein, 978 aa, synthetic construct
  REGION 1..978: note = engineered CasX variant
QEIKRINKIRRRLVKDSNTKKAGKTGPMKTLLVRVMTPDLRERLENLRKKPENIPQPISNTSRANLNKLLTDYTEMKKAILHVYWEEFQKDPVGLMSRVAQPASKKIDQNKLKPEMDEKGNLTTAGFACSQCGQPLFVYKLEQVSEKGKAYTNYFGRCNVAEHEKLILLAQLKPEKDSDEAVTYSLGKFGQRALDFYSIHVTKESTHPVKPLAQIAGNRYASSPVGKALSDACMGTIASFLSKYQDIIIEHQKVVKGNQKRLESLRELAGKENLEYPSVTLPPQPHTKEGVDAYNEVIARVRMWVNLNLWQKLKLSRDDAKPLLRLKGFPSFPLVERQANEVDWWDMVCNVKKLINEKKEDGKVFWQNLAGYKRQEALRPYLSSEEDRKKGKKFARYQLGDLLLHLEKKHGEDWGKVYDEAWERIDKKVEGLSKHIKLEEERRSEDAQSKAALTDWLRAKASFVIEGLKEADKDEFCRCELKLQKWYGDLRGKPFAIEAENSILDISGFSKQYNCAFIWQKDGVKKLNLYLIINYFKGGKLRFKKIKPEAFEANRFYTVINKKSGEIVPMEVNFNFDDPNLIILPLAFGKRQGREFIWNDLLSLETGSLKLANGRVIEKTLYNRRTRQDEPALFVALTFERREVLDSSNIKPMNLIGVDRGENIPAVIALTDPEGCPLSRFKDSLGNPTHILRIGERYKEKQRTIQAKKEVEQRRAGGYSRKYASKAKNLADDMVRNTARDLLYYAVTQDAMLIFENLSRGFGRQGKRTFMAERQYTRMEDWLTAKLAYNGLPSKTYLSKTLAQYTSKTCSNCGFTITSADYDRVLEKLKKTATGWMTTINGKELKVEGQITYYNRYKRQNVVKDLSVELDRLSEESVNNDISSWTKGRSGEALSLLKKRFSHRPVQEKFVCLNCGFETHADEQAALNIARSWLFLRSQEYKKYQTNKTTGNTDKRAFVETWQSFYRKKLKEVWKPAV

SEQ ID NO: 48395 - protein, 978 aa, synthetic construct
  REGION 1..978: note = engineered CasX variant
QEIKRINKIRRRLVKDSNTKKAGKTGPMKTLLVRVMTPDLRERLENLRKKPENIPQPISNTSRANLNKLLTDYTEMKKAILHVYWEEFQKDPVGLMSRVAQPASKKIDQNKLKPEMDEKGNLTTAGFACSQCGQPLFVYKLEQVSEKGKAYTNYFGRCNVAEHEKLILLAQLKPEKDSDEAVTYSLGKFGQRALDFYSIHVTKESTHPVKPLAQIAGNRYASTPVGKALSDACMGTIASFLSKYQDIIIEHQKVVKGNQKRLESLRELAGKENLEYPSVTLPPQPHTKEGVDAYNEVIARVRMWVNLNLWQKLKLSRDDAKPLLRLKGFPSFPLVERQANEVDWWDMVCNVKKLINEKKEDGKVFWQNLAGYKRQEALRPYLSSEEDRKKGKKFARYQLGDLLLHLEKKHGEDWGKVYDEAWERIDKKVEGLSKHIKLEEERRSEDAQSKAALTDWLRAKASFVIEGLKEADKDEFCRCELKLQKWYGDLRGKPFAIEAENSILDISGFSKQYNCAFIWQKDGVKKLNLYLIINYFKGGKLRFKKIKPEAFEANRFYTVINKKSGEIVPMEVNFNFDDPNLIILPLAFGKRQGREFIWNDLLSLETGSLKLANGRVIEKTLYNRRTRQDEPALFVALTFERREVLDSSNIKPMNLIGVDRGENIPAVIALTDPEGCPLSRFKDSLGNPTHILRIGERYKEKQRTIQAKKEVEQRRAGGYSRKYASKAKNLADDMVRNTARDLLYYAVTQDAMLIFENLSRGFGRQGKRTFMAERQYTRMEDWLTAKLAYNGLPSKTYLSKTLAQYTSKTCSNCGFTITSADYDRVLEKLKKTATGWMTTINGKELKVEGQITYYNRYKRQNVVKDLSVELDRLSEESVNNDISSWTKGRSGEALSLLKKRFSHRPVQEKFVCLNCGFETHADEQAALNIARSWLFLRSQEYKKYQTNKTTGNTDKRAFVETWQSFYRKKLKEVWKPAV

SEQ ID NO: 48396 - protein, 978 aa, synthetic construct
  REGION 1..978: note = engineered CasX variant
QEIKRINKIRRRLVKDSNTKKAGKTGPMKTLLVRVMTPDLRERLENLRKKPENIPQPISNTSRANLNKLLTDYTEMKKAILHVYWEEFQKDPVGLMSRVAQPASKKIDQNKLKPEMDEKGNLTTAGFACSQCGQPLFVYKLEQVSEKGKAYTNYFGRCNVAEHEKLILLAQLKPEKDSDEAVTYSLGKFGQRALDFYSIHVTKESTHPVKPLAQIAGNRYASAPVGKALSDACMGTIASFLSKYQDIIIEHQKVVKGNQKRLESLRELAGKENLEYPSVTLPPQPHTKEGVDAYNEVIARVRMWVNLNLWQKLKLSRDDAKPLLRLKGFPSFPLVERQANEVDWWDMVCNVKKLINEKKEDGKVFWQNLAGYKRQEALRPYLSSEEDRKKGKKFARYQLGDLLLHLEKKHGEDWGKVYDEAWERIDKKVEGLSKHIKLEEERRSEDAQSKAALTDWLRAKASFVIEGLKEADKDEFCRCELKLQKWYGDLRGKPFAIEAENSILDISGFSKQYNCAFIWQKDGVKKLNLYLIINYFKGGKLRFKKIKPEAFEANRFYTVINKKSGEIVPMEVNFNFDDPNLIILPLAFGKRQGREFIWNDLLSLETGSLKLANGRVIEKTLYNRRTRQDEPALFVALTFERREVLDSSNIKPMNLIGVDRGENIPAVIALTDPEGCPLSRFKDSLGNPTHILRIGERYKEKQRTIQAKKEVEQRRAGGYSRKYASKAKNLADDMVRNTARDLLYYAVTQDAMLIFENLSRGFGRQGKRTFMAERQYTRMEDWLTAKLAYNGLPSKTYLSKTLAQYTSKTCSNCGFTITSADYDRVLEKLKKTATGWMTTINGKELKVEGQITYYNRYKRQNVVKDLSVELDRLSEESVNNDISSWTKGRSGEALSLLKKRFSHRPVQEKFVCLNCGFETHADEQAALNIARSWLFLRSQEYKKYQTNKTTGNTDKRAFVETWQSFYRKKLKEVWKPAV

SEQ ID NO: 48397 - protein, 978 aa, synthetic construct
  REGION 1..978: note = engineered CasX variant
QEIKRINKIRRRLVKDSNTKKAGKTGPMKTLLVRVMTPDLRERLENLRKKPENIPQPISNTSRANLNKLLTDYTEMKKAILHVYWEEFQKDPVGLMSRVAQPASKKIDQNKLKPEMDEKGNLTTAGFACSQCGQPLFVYKLEQVSEKGKAYTNYFGRCNVAEHEKLILLAQLKPEKDSDEAVTYSLGKFGQRALDFYSIHVTKESTHPVKPLAQIAGNRYASVPVGKALSDACMGTIASFLSKYQDIIIEHQKVVKGNQKRLESLRELAGKENLEYPSVTLPPQPHTKEGVDAYNEVIARVRMWVNLNLWQKLKLSRDDAKPLLRLKGFPSFPLVERQANEVDWWDMVCNVKKLINEKKEDGKVFWQNLAGYKRQEALRPYLSSEEDRKKGKKFARYQLGDLLLHLEKKHGEDWGKVYDEAWERIDKKVEGLSKHIKLEEERRSEDAQSKAALTDWLRAKASFVIEGLKEADKDEFCRCELKLQKWYGDLRGKPFAIEAENSILDISGFSKQYNCAFIWQKDGVKKLNLYLIINYFKGGKLRFKKIKPEAFEANRFYTVINKKSGEIVPMEVNFNFDDPNLIILPLAFGKRQGREFIWNDLLSLETGSLKLANGRVIEKTLYNRRTRQDEPALFVALTFERREVLDSSNIKPMNLIGVDRGENIPAVIALTDPEGCPLSRFKDSLGNPTHILRIGERYKEKQRTIQAKKEVEQRRAGGYSRKYASKAKNLADDMVRNTARDLLYYAVTQDAMLIFENLSRGFGRQGKRTFMAERQYTRMEDWLTAKLAYNGLPSKTYLSKTLAQYTSKTCSNCGFTITSADYDRVLEKLKKTATGWMTTINGKELKVEGQITYYNRYKRQNVVKDLSVELDRLSEESVNNDISSWTKGRSGEALSLLKKRFSHRPVQEKFVCLNCGFETHADEQAALNIARSWLFLRSQEYKKYQTNKTTGNTDKRAFVETWQSFYRKKLKEVWKPAV

SEQ ID NO: 48398 - protein, 978 aa, synthetic construct
  REGION 1..978: note = engineered CasX variant
QEIKRINKIRRRLVKDSNTKKAGKTGPMKTLLVRVMTPDLRERLENLRKKPENIPQPISNTSRANLNKLLTDYTEMKKAILHVYWEEFQKDPVGLMSRVAQPASKKIDQNKLKPEMDEKGNLTTAGFACSQCGQPLFVYKLEQVSEKGKAYTNYFGRCNVAEHEKLIKLAQLKPEKDSDEAVTYSLGKFGQRALDFYSIHVTKESTHPVKPLAQIAGNRYASGPVGKALSDACMGTIASFLSKYQDIIIEHQKVVKGNQKRLESLRELAGKENLEYPSVTLPPQPHTKEGVDAYNEVIARVRMWVNLNLWQKLKLSRDDAKPLLRLKGFPSFPLVERQANEVDWWDMVCNVKKLINEKKEDGKVFWQNLAGYKRQEALRPYLSSEEDRKKGKKFARYQLGDLLLHLEKKHGEDWGKVYDEAWERIDKKVEGLSKHIKLEEERRSEDAQSKAALTDWLRAKASFVIEGLKEADKDEFCRCELKLQKWYGDLRGKPFAIEAENSILDISGFSKQYNCAFIWQKDGVKKLNLYLIINYFKGGKLRFKKIKPEAFEANRFYTVINKKSGEIVPMEVNFNFDDPNLIILPLAFGKRQGREFIWNDLLSLETGSLKLANGRVIEKTLYNRRTRQDEPALFVALTFERREVLDSSNIKPMNLIGVDRGENIPAVIALTDPEGCPLSRFKDSLGNPTHILRIGERYKEKQRTIQAKKEVEQRRAGGYSRKYASKAKNLADDMVRNTARDLLYYAVTQDAMLIFENLSRGFGRQGKRTFMAERQYTRMEDWLTAKLAYNGLPSKTYLSKTLAQYTSKTCSNCGFTITSADYDRVLEKLKKTATGWMTTINGKELKVEGQITYYNRYKRQNVVKDLSVELDRLSEESVNNDISSWTKGRSGEALSLLKKRFSHRPVQEKFVCLNCGFETHADEQAALNIARSWLFLRSQEYKKYQTNKTTGNTDKRAFVETWQSFYRKKLKEVWKPAV

SEQ ID NO: 48399 - protein, 977 aa, synthetic construct
  REGION 1..977: note = engineered CasX variant
QEIKRINKIRRRLVKDSNTKKAGKTGPMKTLLVRVMTPDLRERLENLRKKPENIPQPISNTSRANLNKLLTDYTEMKKAILHVYWEEFQKDPVGLMSRVAQPASKKIDQNKLKPEMDEKGNLTTAGFACSQCGQPLFVYKLEQVSEKGKAYTNYFGRCNVAEHEKLILLAQLKPEKDSDEAVTYSLGKFGQRALDFYSIHVTKESTHPVKPLAQIAGNRYASPVGKALSDACMGTIASFLSKYQDIIIEHQKVVKGNQKRLESLRELAGKENLEYPSVTLPPQPHTKEGVDAYNEVIARVRMWVNLNLWQKLKLSRDDAKPLLRLKGFPSFPLVERQANEVDWWDMVCNVKKLINEKKEDGKVFWQNLAGYKRQEALRPYLSSEEDRKKGKKFARYQLGDLLLHLEKKHGEDWGKVYDEAWERIDKKVEGLSKHIKLEEERRSEDAQSKAALTDWLRAKASFVIEGLKEADKDEFCRCELKLQKWYGDLRGKPFAIEAENSILDISGFSKQYNCAFIWQKDGVKKLNLYLIINYFKGGKLRFKKIKPEAFEANRFYTVINKKSGEIVPMEVNFNFDDPNLIILPLAFGKRQGREFIWNDLLSLETGSLKLANGRVIEKTLYNRRTRQDEPALFVALTFERREVLDSSNIKPMNLIGVDRGENIPAVIALTDPEGCPLSRFKDSLGNPTHILRIGERYKEKQRTIQAKKEVEQRRAGGYSRKYASKAKNLADDMVRNTARDLLYYAVTQDAMLIFENLSRGFGRQGKRTFMAERQYTRMEDWLTAKLAYNGLPSKTYLSKTLAQYTSKTCSNCGFTITSADYDRVLEKLKKTATGWMTTINGKELKVEGQITYYNRYKRQNVVKDLSVELDRLSEESVNNDISSWTKGRSGEALSLLKKRFSHRPVQEKFVCLNCGFETHADEQAALNIARSWLFLRSQEYKKYQTNKTTGNTDKRAFVETWQSFYRKKLKEVWKPAV

SEQ ID NO: 48400 - protein, 978 aa, synthetic construct
  REGION 1..978: note = engineered CasX variant
QEIKRINKIRRRLVKDSNTKKAGKTGPMKTLLVRVMTPDLRERLENLRKKPENIPQPISNTSRANLNKLLTDYTEMKKAILHVYWEEFQKDPVGLMSRVAQPASKKIDQNKLKPEMDEKGNLTTAGFACSQCGQPLFVYKLEQVSEKGKAYTNYFGRCNVAEHEKLIQLAQLKPEKDSDEAVTYSLGKFGQRALDFYSIHVTKESTHPVKPLAQIAGNRYASYPVGKALSDACMGTIASFLSKYQDIIIEHQKVVKGNQKRLESLRELAGKENLEYPSVTLPPQPHTKEGVDAYNEVIARVRMWVNLNLWQKLKLSRDDAKPLLRLKGFPSFPLVERQANEVDWWDMVCNVKKLINEKKEDGKVFWQNLAGYKRQEALRPYLSSEEDRKKGKKFARYQLGDLLLHLEKKHGEDWGKVYDEAWERIDKKVEGLSKHIKLEEERRSEDAQSKAALTDWLRAKASFVIEGLKEADKDEFCRCELKLQKWYGDLRGKPFAIEAENSILDISGFSKQYNCAFIWQKDGVKKLNLYLIINYFKGGKLRFKKIKPEAFEANRFYTVINKKSGEIVPMEVNFNFDDPNLIILPLAFGKRQGREFIWNDLLSLETGSLKLANGRVIEKTLYNRRTRQDEPALFVALTFERREVLDSSNIKPMNLIGVDRGENIPAVIALTDPEGCPLSRFKDSLGNPTHILRIGERYKEKQRTIQAKKEVEQRRAGGYSRKYASKAKNLADDMVRNTARDLLYYAVTQDAMLIFENLSRGFGRQGKRTFMAERQYTRMEDWLTAKLAYEGLPSKTYLSKTLAQYTSKTCSNCGFTITSADYDRVLEKLKKTATGWMTTINGKELKVEGQITYYNRYKRQNVVKDLSVELDRLSEESVNNDISSWTKGRSGEALSLLKKRFSHRPVQEKFVCLNCGFETHADEQAALNIARSWLFLRSQEYKKYQTNKTTGNTDKRAFVETWQSFYRKKLKEVWKPAV

SEQ ID NO: 48401 - protein, 978 aa, synthetic construct
  REGION 1..978: note = engineered CasX variant
QEIKRINKIRRRLVKDSNTKKAGKTGPMKTLLVRVMTPDLRERLENLRKKPENIPQPISNTSRANLNKLLTDYTEMKKAILHVYWEEFQKDPVGLMSRVAQPASKKIDQNKLKPEMDEKGNLTTAGFACSQCGQPLFVYKLEQVSEKGKAYTNYFGRCNVAEHEKLIQLAQLKPEKDSDEAVTYSLGKFGQRALDFYSIHVTKESTHPVKPLAQIAGNRYASHPVGKALSDACMGTIASFLSKYQDIIIEHQKVVKGNQKRLESLRELAGKENLEYPSVTLPPQPHTKEGVDAYNEVIARVRMWVNLNLWQKLKLSRDDAKPLLRLKGFPSFPLVERQANEVDWWDMVCNVKKLINEKKEDGKVFWQNLAGYKRQEALRPYLSSEEDRKKGKKFARYQLGDLLLHLEKKHGEDWGKVYDEAWERIDKKVEGLSKHIKLEEERRSEDAQSKAALTDWLRAKASFVIEGLKEADKDEFCRCELKLQKWYGDLRGKPFAIEAENSILDISGFSKQYNCAFIWQKDGVKKLNLYLIINYFKGGKLRFKKIKPEAFEANRFYTVINKKSGEIVPMEVNFNFDDPNLIILPLAFGKRQGREFIWNDLLSLETGSLKLANGRVIEKTLYNRRTRQDEPALFVALTFERREVLDSSNIKPMNLIGVDRGENIPAVIALTDPEGCPLSRFKDSLGNPTHILRIGERYKEKQRTIQAKKEVEQRRAGGYSRKYASKAKNLADDMVRNTARDLLYYAVTQDAMLIFENLSRGFGRQGKRTFMAERQYTRMEDWLTAKLAYEGLPSKTYLSKTLAQYTSKTCSNCGFTITSADYDRVLEKLKKTATGWMTTINGKELKVEGQITYYNRYKRQNVVKDLSVELDRLSEESVNNDISSWTKGRSGEALSLLKKRFSHRPVQEKFVCLNCGFETHADEQAALNIARSWLFLRSQEYKKYQTNKTTGNTDKRAFVETWQSFYRKKLKEVWKPAV

SEQ ID NO: 48402 - protein, 978 aa, synthetic construct
  REGION 1..978: note = engineered CasX variant
QEIKRINKIRRRLVKDSNTKKAGKTGPMKTLLVRVMTPDLRERLENLRKKPENIPQPISNTSRANLNKLLTDYTEMKKAILHVYWEEFQKDPVGLMSRVAQPASKKIDQNKLKPEMDEKGNLTTAGFACSQCGQPLFVYKLEQVSEKGKAYTNYFGRCNVAEHEKLIQLAQLKPEKDSDEAVTYSLGKFGQRALDFYSIHVTKESTHPVKPLAQIAGNRYASSPVGKALSDACMGTIASFLSKYQDIIIEHQKVVKGNQKRLESLRELAGKENLEYPSVTLPPQPHTKEGVDAYNEVIARVRMWVNLNLWQKLKLSRDDAKPLLRLKGFPSFPLVERQANEVDWWDMVCNVKKLINEKKEDGKVFWQNLAGYKRQEALRPYLSSEEDRKKGKKFARYQLGDLLLHLEKKHGEDWGKVYDEAWERIDKKVEGLSKHIKLEEERRSEDAQSKAALTDWLRAKASFVIEGLKEADKDEFCRCELKLQKWYGDLRGKPFAIEAENSILDISGFSKQYNCAFIWQKDGVKKLNLYLIINYFKGGKLRFKKIKPEAFEANRFYTVINKKSGEIVPMEVNFNFDDPNLIILPLAFGKRQGREFIWNDLLSLETGSLKLANGRVIEKTLYNRRTRQDEPALFVALTFERREVLDSSNIKPMNLIGVDRGENIPAVIALTDPEGCPLSRFKDSLGNPTHILRIGERYKEKQRTIQAKKEVEQRRAGGYSRKYASKAKNLADDMVRNTARDLLYYAVTQDAMLIFENLSRGFGRQGKRTFMAERQYTRMEDWLTAKLAYEGLPSKTYLSKTLAQYTSKTCSNCGFTITSADYDRVLEKLKKTATGWMTTINGKELKVEGQITYYNRYKRQNVVKDLSVELDRLSEESVNNDISSWTKGRSGEALSLLKKRFSHRPVQEKFVCLNCGFETHADEQAALNIARSWLFLRSQEYKKYQTNKTTGNTDKRAFVETWQSFYRKKLKEVWKPAV

SEQ ID NO: 48403 - protein, 978 aa, synthetic construct
  REGION 1..978: note = engineered CasX variant
QEIKRINKIRRRLVKDSNTKKAGKTGPMKTLLVRVMTPDLRERLENLRKKPENIPQPISNTSRANLNKLLTDYTEMKKAILHVYWEEFQKDPVGLMSRVAQPASKKIDQNKLKPEMDEKGNLTTAGFACSQCGQPLFVYKLEQVSEKGKAYTNYFGRCNVAEHEKLIQLAQLKPEKDSDEAVTYSLGKFGQRALDFYSIHVTKESTHPVKPLAQIAGNRYASTPVGKALSDACMGTIASFLSKYQDIIIEHQKVVKGNQKRLESLRELAGKENLEYPSVTLPPQPHTKEGVDAYNEVIARVRMWVNLNLWQKLKLSRDDAKPLLRLKGFPSFPLVERQANEVDWWDMVCNVKKLINEKKEDGKVFWQNLAGYKRQEALRPYLSSEEDRKKGKKFARYQLGDLLLHLEKKHGEDWGKVYDEAWERIDKKVEGLSKHIKLEEERRSEDAQSKAALTDWLRAKASFVIEGLKEADKDEFCRCELKLQKWYGDLRGKPFAIEAENSILDISGFSKQYNCAFIWQKDGVKKLNLYLIINYFKGGKLRFKKIKPEAFEANRFYTVINKKSGEIVPMEVNFNFDDPNLIILPLAFGKRQGREFIWNDLLSLETGSLKLANGRVIEKTLYNRRTRQDEPALFVALTFERREVLDSSNIKPMNLIGVDRGENIPAVIALTDPEGCPLSRFKDSLGNPTHILRIGERYKEKQRTIQAKKEVEQRRAGGYSRKYASKAKNLADDMVRNTARDLLYYAVTQDAMLIFENLSRGFGRQGKRTFMAERQYTRMEDWLTAKLAYEGLPSKTYLSKTLAQYTSKTCSNCGFTITSADYDRVLEKLKKTATGWMTTINGKELKVEGQITYYNRYKRQNVVKDLSVELDRLSEESVNNDISSWTKGRSGEALSLLKKRFSHRPVQEKFVCLNCGFETHADEQAALNIARSWLFLRSQEYKKYQTNKTTGNTDKRAFVETWQSFYRKKLKEVWKPAV

SEQ ID NO: 48404 - protein, 978 aa, synthetic construct
  REGION 1..978: note = engineered CasX variant
QEIKRINKIRRRLVKDSNTKKAGKTGPMKTLLVRVMTPDLRERLENLRKKPENIPQPISNTSRANLNKLLTDYTEMKKAILHVYWEEFQKDPVGLMSRVAQPASKKIDQNKLKPEMDEKGNLTTAGFACSQCGQPLFVYKLEQVSEKGKAYTNYFGRCNVAEHEKLIQLAQLKPEKDSDEAVTYSLGKFGQRALDFYSIHVTKESTHPVKPLAQIAGNRYASAPVGKALSDACMGTIASFLSKYQDIIIEHQKVVKGNQKRLESLRELAGKENLEYPSVTLPPQPHTKEGVDAYNEVIARVRMWVNLNLWQKLKLSRDDAKPLLRLKGFPSFPLVERQANEVDWWDMVCNVKKLINEKKEDGKVFWQNLAGYKRQEALRPYLSSEEDRKKGKKFARYQLGDLLLHLEKKHGEDWGKVYDEAWERIDKKVEGLSKHIKLEEERRSEDAQSKAALTDWLRAKASFVIEGLKEADKDEFCRCELKLQKWYGDLRGKPFAIEAENSILDISGFSKQYNCAFIWQKDGVKKLNLYLIINYFKGGKLRFKKIKPEAFEANRFYTVINKKSGEIVPMEVNFNFDDPNLIILPLAFGKRQGREFIWNDLLSLETGSLKLANGRVIEKTLYNRRTRQDEPALFVALTFERREVLDSSNIKPMNLIGVDRGENIPAVIALTDPEGCPLSRFKDSLGNPTHILRIGERYKEKQRTIQAKKEVEQRRAGGYSRKYASKAKNLADDMVRNTARDLLYYAVTQDAMLIFENLSRGFGRQGKRTFMAERQYTRMEDWLTAKLAYEGLPSKTYLSKTLAQYTSKTCSNCGFTITSADYDRVLEKLKKTATGWMTTINGKELKVEGQITYYNRYKRQNVVKDLSVELDRLSEESVNNDISSWTKGRSGEALSLLKKRFSHRPVQEKFVCLNCGFETHADEQAALNIARSWLFLRSQEYKKYQTNKTTGNTDKRAFVETWQSFYRKKLKEVWKPAV

SEQ ID NO: 48405 - protein, 978 aa, synthetic construct
  REGION 1..978: note = engineered CasX variant
QEIKRINKIRRRLVKDSNTKKAGKTGPMKTLLVRVMTPDLRERLENLRKKPENIPQPISNTSRANLNKLLTDYTEMKKAILHVYWEEFQKDPVGLMSRVAQPASKKIDQNKLKPEMDEKGNLTTAGFACSQCGQPLFVYKLEQVSEKGKAYTNYFGRCNVAEHEKLIQLAQLKPEKDSDEAVTYSLGKFGQRALDFYSIHVTKESTHPVKPLAQIAGNRYASVPVGKALSDACMGTIASFLSKYQDIIIEHQKVVKGNQKRLESLRELAGKENLEYPSVTLPPQPHTKEGVDAYNEVIARVRMWVNLNLWQKLKLSRDDAKPLLRLKGFPSFPLVERQANEVDWWDMVCNVKKLINEKKEDGKVFWQNLAGYKRQEALRPYLSSEEDRKKGKKFARYQLGDLLLHLEKKHGEDWGKVYDEAWERIDKKVEGLSKHIKLEEERRSEDAQSKAALTDWLRAKASFVIEGLKEADKDEFCRCELKLQKWYGDLRGKPFAIEAENSILDISGFSKQYNCAFIWQKDGVKKLNLYLIINYFKGGKLRFKKIKPEAFEANRFYTVINKKSGEIVPMEVNFNFDDPNLIILPLAFGKRQGREFIWNDLLSLETGSLKLANGRVIEKTLYNRRTRQDEPALFVALTFERREVLDSSNIKPMNLIGVDRGENIPAVIALTDPEGCPLSRFKDSLGNPTHILRIGERYKEKQRTIQAKKEVEQRRAGGYSRKYASKAKNLADDMVRNTARDLLYYAVTQDAMLIFENLSRGFGRQGKRTFMAERQYTRMEDWLTAKLAYEGLPSKTYLSKTLAQYTSKTCSNCGFTITSADYDRVLEKLKKTATGWMTTINGKELKVEGQITYYNRYKRQNVVKDLSVELDRLSEESVNNDISSWTKGRSGEALSLLKKRFSHRPVQEKFVCLNCGFETHADEQAALNIARSWLFLRSQEYKKYQTNKTTGNTDKRAFVETWQSFYRKKLKEVWKPAV

SEQ ID NO: 48406 - protein, 979 aa, synthetic construct
  REGION 1..979: note = engineered CasX variant
QEIKRINKIRRRLVKDSNTKKAGKTGPMKTLLVRVMTPDLRERLENLRKKPENIPQPISNTSRANLNKLLTDYTEMKKAILHVYWEEFQKDPVGLMSRVAQPASKKIDQNKLKPEMDEKGNLTTAGFACSQCGQPLFVYKLEQVSEKGKAYTNYFGRCNVAEHEKLIQKLAQLKPEKDSDEAVTYSLGKFGQRALDFYSIHVTKESTHPVKPLAQIAGNRYASGPVGKALSDACMGTIASFLSKYQDIIIEHQKVVKGNQKRLESLRELAGKENLEYPSVTLPPQPHTKEGVDAYNEVIARVRMWVNLNLWQKLKLSRDDAKPLLRLKGFPSFPLVERQANEVDWWDMVCNVKKLINEKKEDGKVFWQNLAGYKRQEALRPYLSSEEDRKKGKKFARYQLGDLLLHLEKKHGEDWGKVYDEAWERIDKKVEGLSKHIKLEEERRSEDAQSKAALTDWLRAKASFVIEGLKEADKDEFCRCELKLQKWYGDLRGKPFAIEAENSILDISGFSKQYNCAFIWQKDGVKKLNLYLIINYFKGGKLRFKKIKPEAFEANRFYTVINKKSGEIVPMEVNFNFDDPNLIILPLAFGKRQGREFIWNDLLSLETGSLKLANGRVIEKTLYNRRTRQDEPALFVALTFERREVLDSSNIKPMNLIGVDRGENIPAVIALTDPEGCPLSRFKDSLGNPTHILRIGERYKEKQRTIQAKKEVEQRRAGGYSRKYASKAKNLADDMVRNTARDLLYYAVTQDAMLIFENLSRGFGRQGKRTFMAERQYTRMEDWLTAKLAYEGLPSKTYLSKTLAQYTSKTCSNCGFTITSADYDRVLEKLKKTATGWMTTINGKELKVEGQITYYNRYKRQNVVKDLSVELDRLSEESVNNDISSWTKGRSGEALSLLKKRFSHRPVQEKFVCLNCGFETHADEQAALNIARSWLFLRSQEYKKYQTNKTTGNTDKRAFVETWQSFYRKKLKEVWKPAV

SEQ ID NO: 48407 - protein, 977 aa, synthetic construct
  REGION 1..977: note = engineered CasX variant
QEIKRINKIRRRLVKDSNTKKAGKTGPMKTLLVRVMTPDLRERLENLRKKPENIPQPISNTSRANLNKLLTDYTEMKKAILHVYWEEFQKDPVGLMSRVAQPASKKIDQNKLKPEMDEKGNLTTAGFACSQCGQPLFVYKLEQVSEKGKAYTNYFGRCNVAEHEKLIQLAQLKPEKDSDEAVTYSLGKFGQRALDFYSIHVTKESTHPVKPLAQIAGNRYASPVGKALSDACMGTIASFLSKYQDIIIEHQKVVKGNQKRLESLRELAGKENLEYPSVTLPPQPHTKEGVDAYNEVIARVRMWVNLNLWQKLKLSRDDAKPLLRLKGFPSFPLVERQANEVDWWDMVCNVKKLINEKKEDGKVFWQNLAGYKRQEALRPYLSSEEDRKKGKKFARYQLGDLLLHLEKKHGEDWGKVYDEAWERIDKKVEGLSKHIKLEEERRSEDAQSKAALTDWLRAKASFVIEGLKEADKDEFCRCELKLQKWYGDLRGKPFAIEAENSILDISGFSKQYNCAFIWQKDGVKKLNLYLIINYFKGGKLRFKKIKPEAFEANRFYTVINKKSGEIVPMEVNFNFDDPNLIILPLAFGKRQGREFIWNDLLSLETGSLKLANGRVIEKTLYNRRTRQDEPALFVALTFERREVLDSSNIKPMNLIGVDRGENIPAVIALTDPEGCPLSRFKDSLGNPTHILRIGERYKEKQRTIQAKKEVEQRRAGGYSRKYASKAKNLADDMVRNTARDLLYYAVTQDAMLIFENLSRGFGRQGKRTFMAERQYTRMEDWLTAKLAYEGLPSKTYLSKTLAQYTSKTCSNCGFTITSADYDRVLEKLKKTATGWMTTINGKELKVEGQITYYNRYKRQNVVKDLSVELDRLSEESVNNDISSWTKGRSGEALSLLKKRFSHRPVQEKFVCLNCGFETHADEQAALNIARSWLFLRSQEYKKYQTNKTTGNTDKRAFVETWQSFYRKKLKEVWKPAV

SEQ ID NO: 48408 - protein, 978 aa, synthetic construct
  REGION 1..978: note = engineered CasX variant
QEIKRINKIRRRLVKDSNTKKAGKTGPMKTLLVRVMTPDLRERLENLRKKPENIPQPISNTSRANLNKLLTDYTEMKKAILHVYWEEFQKDPVGLMSRVAQPASKKIDQNKLKPEMDEKGNLTTAGFACSQCGQPLFVYKLEQVSEKGKAYTNYFGRCNVAEHEKLILLAQLKPEKDSDEAVTYSLGKFGQRALDFYSIHVTKESTHPVKPLAQIAGNRYASYPVGKALSDACMGTIASFLSKYQDIIIEHQKVVKGNQKRLESLRELAGKENLEYPSVTLPPQPHTKEGVDAYNEVIARVRMWVNLNLWQKLKLSRDDAKPLLRLKGFPSFPLVERQANEVDWWDMVCNVKKLINEKKEDGKVFWQNLAIYKRQEALRPYLSSEEDRKKGKKFARYQLGDLLLHLEKKHGEDWGKVYDEAWERIDKKVEGLSKHIKLEEERRSEDAQSKAALTDWLRAKASFVIEGLKEADKDEFCRCELKLQKWYGDLRGKPFAIEAENSILDISGFSKQYNCAFIWQKDGVKKLNLYLIINYFKGGKLRFKKIKPEAFEANRFYTVINKKSGEIVPMEVNFNFDDPNLIILPLAFGKRQGREFIWNDLLSLETGSLKLANGRVIEKTLYNRRTRQDEPALFVALTFERREVLDSSNIKPMNLIGVDRGENIPAVIALTDPEGCPLSRFKDSLGNPTHILRIGERYKEKQRTIQAKKEVEQRRAGGYSRKYASKAKNLADDMVRNTARDLLYYAVTQDAMLIFENLSRGFGRQGKRTFMAERQYTRMEDWLTAKLAYEGLPSKTYLSKTLAQYTSKTCSNCGFTITSADYDRVLEKLKKTATGWMTTINGKELKVEGQITYYNRYKRQNVVKDLSVELDRLSEESVNNDISSWTKGRSGEALSLLKKRFSHRPVQEKFVCLNCGFETHADEQAALNIARSWLFLRSQEYKKYQTNKTTGNTDKRAFVETWQSFYRKKLKEVWKPAV

SEQ ID NO: 48409 - protein, 978 aa, synthetic construct
  REGION 1..978: note = engineered CasX variant
QEIKRINKIRRRLVKDSNTKKAGKTGPMKTLLVRVMTPDLRERLENLRKKPENIPQPISNTSRANLNKLLTDYTEMKKAILHVYWEEFQKDPVGLMSRVAQPASKKIDQNKLKPEMDEKGNLTTAGFACSQCGQPLFVYKLEQVSEKGKAYTNYFGRCNVAEHEKLILLAQLKPEKDSDEAVTYSLGKFGQRALDFYSIHVTKESTHPVKPLAQIAGNRYASHPVGKALSDACMGTIASFLSKYQDIIIEHQKVVKGNQKRLESLRELAGKENLEYPSVTLPPQPHTKEGVDAYNEVIARVRMWVNLNLWQKLKLSRDDAKPLLRLKGFPSFPLVERQANEVDWWDMVCNVKKLINEKKEDGKVFWQNLAIYKRQEALRPYLSSEEDRKKGKKFARYQLGDLLLHLEKKHGEDWGKVYDEAWERIDKKVEGLSKHIKLEEERRSEDAQSKAALTDWLRAKASFVIEGLKEADKDEFCRCELKLQKWYGDLRGKPFAIEAENSILDISGFSKQYNCAFIWQKDGVKKLNLYLIINYFKGGKLRFKKIKPEAFEANRFYTVINKKSGEIVPMEVNFNFDDPNLIILPLAFGKRQGREFIWNDLLSLETGSLKLANGRVIEKTLYNRRTRQDEPALFVALTFERREVLDSSNIKPMNLIGVDRGENIPAVIALTDPEGCPLSRFKDSLGNPTHILRIGERYKEKQRTIQAKKEVEQRRAGGYSRKYASKAKNLADDMVRNTARDLLYYAVTQDAMLIFENLSRGFGRQGKRTFMAERQYTRMEDWLTAKLAYEGLPSKTYLSKTLAQYTSKTCSNCGFTITSADYDRVLEKLKKTATGWMTTINGKELKVEGQITYYNRYKRQNVVKDLSVELDRLSEESVNNDISSWTKGRSGEALSLLKKRFSHRPVQEKFVCLNCGFETHADEQAALNIARSWLFLRSQEYKKYQTNKTTGNTDKRAFVETWQSFYRKKLKEVWKPAV

SEQ ID NO: 48410 - protein, 978 aa, synthetic construct
  REGION 1..978: note = engineered CasX variant
QEIKRINKIRRRLVKDSNTKKAGKTGPMKTLLVRVMTPDLRERLENLRKKPENIPQPISNTSRANLNKLLTDYTEMKKAILHVYWEEFQKDPVGLMSRVAQPASKKIDQNKLKPEMDEKGNLTTAGFACSQCGQPLFVYKLEQVSEKGKAYTNYFGRCNVAEHEKLILLAQLKPEKDSDEAVTYSLGKFGQRALDFYSIHVTKESTHPVKPLAQIAGNRYASSPVGKALSDACMGTIASFLSKYQDIIIEHQKVVKGNQKRLESLRELAGKENLEYPSVTLPPQPHTKEGVDAYNEVIARVRMWVNLNLWQKLKLSRDDAKPLLRLKGFPSFPLVERQANEVDWWDMVCNVKKLINEKKEDGKVFWQNLAIYKRQEALRPYLSSEEDRKKGKKFARYQLGDLLLHLEKKHGEDWGKVYDEAWERIDKKVEGLSKHIKLEEERRSEDAQSKAALTDWLRAKASFVIEGLKEADKDEFCRCELKLQKWYGDLRGKPFAIEAENSILDISGFSKQYNCAFIWQKDGVKKLNLYLIINYFKGGKLRFKKIKPEAFEANRFYTVINKKSGEIVPMEVNFNFDDPNLIILPLAFGKRQGREFIWNDLLSLETGSLKLANGRVIEKTLYNRRTRQDEPALFVALTFERREVLDSSNIKPMNLIGVDRGENIPAVIALTDPEGCPLSRFKDSLGNPTHILRIGERYKEKQRTIQAKKEVEQRRAGGYSRKYASKAKNLADDMVRNTARDLLYYAVTQDAMLIFENLSRGFGRQGKRTFMAERQYTRMEDWLTAKLAYEGLPSKTYLSKTLAQYTSKTCSNCGFTITSADYDRVLEKLKKTATGWMTTINGKELKVEGQITYYNRYKRQNVVKDLSVELDRLSEESVNNDISSWTKGRSGEALSLLKKRFSHRPVQEKFVCLNCGFETHADEQAALNIARSWLFLRSQEYKKYQTNKTTGNTDKRAFVETWQSFYRKKLKEVWKPAV

SEQ ID NO: 48411 - protein, 978 aa, synthetic construct
  REGION 1..978: note = engineered CasX variant
QEIKRINKIRRRLVKDSNTKKAGKTGPMKTLLVRVMTPDLRERLENLRKKPENIPQPISNTSRANLNKLLTDYTEMKKAILHVYWEEFQKDPVGLMSRVAQPASKKIDQNKLKPEMDEKGNLTTAGFACSQCGQPLFVYKLEQVSEKGKAYTNYFGRCNVAEHEKLILLAQLKPEKDSDEAVTYSLGKFGQRALDFYSIHVTKESTHPVKPLAQIAGNRYASTPVGKALSDACMGTIASFLSKYQDIIIEHQKVVKGNQKRLESLRELAGKENLEYPSVTLPPQPHTKEGVDAYNEVIARVRMWVNLNLWQKLKLSRDDAKPLLRLKGFPSFPLVERQANEVDWWDMVCNVKKLINEKKEDGKVFWQNLAIYKRQEALRPYLSSEEDRKKGKKFARYQLGDLLLHLEKKHGEDWGKVYDEAWERIDKKVEGLSKHIKLEEERRSEDAQSKAALTDWLRAKASFVIEGLKEADKDEFCRCELKLQKWYGDLRGKPFAIEAENSILDISGFSKQYNCAFIWQKDGVKKLNLYLIINYFKGGKLRFKKIKPEAFEANRFYTVINKKSGEIVPMEVNFNFDDPNLIILPLAFGKRQGREFIWNDLLSLETGSLKLANGRVIEKTLYNRRTRQDEPALFVALTFERREVLDSSNIKPMNLIGVDRGENIPAVIALTDPEGCPLSRFKDSLGNPTHILRIGERYKEKQRTIQAKKEVEQRRAGGYSRKYASKAKNLADDMVRNTARDLLYYAVTQDAMLIFENLSRGFGRQGKRTFMAERQYTRMEDWLTAKLAYEGLPSKTYLSKTLAQYTSKTCSNCGFTITSADYDRVLEKLKKTATGWMTTINGKELKVEGQITYYNRYKRQNVVKDLSVELDRLSEESVNNDISSWTKGRSGEALSLLKKRFSHRPVQEKFVCLNCGFETHADEQAALNIARSWLFLRSQEYKKYQTNKTTGNTDKRAFVETWQSFYRKKLKEVWKPAV

SEQ ID NO: 48412 - protein, 978 aa, synthetic construct
  REGION 1..978: note = engineered CasX variant
QEIKRINKIRRRLVKDSNTKKAGKTGPMKTLLVRVMTPDLRERLENLRKKPENIPQPISNTSRANLNKLLTDYTEMKKAILHVYWEEFQKDPVGLMSRVAQPASKKIDQNKLKPEMDEKGNLTTAGFACSQCGQPLFVYKLEQVSEKGKAYTNYFGRCNVAEHEKLILLAQLKPEKDSDEAVTYSLGKFGQRALDFYSIHVTKESTHPVKPLAQIAGNRYASAPVGKALSDACMGTIASFLSKYQDIIIEHQKVVKGNQKRLESLRELAGKENLEYPSVTLPPQPHTKEGVDAYNEVIARVRMWVNLNLWQKLKLSRDDAKPLLRLKGFPSFPLVERQANEVDWWDMVCNVKKLINEKKEDGKVFWQNLAIYKRQEALRPYLSSEEDRKKGKKFARYQLGDLLLHLEKKHGEDWGKVYDEAWERIDKKVEGLSKHIKLEEERRSEDAQSKAALTDWLRAKASFVIEGLKEADKDEFCRCELKLQKWYGDLRGKPFAIEAENSILDISGFSKQYNCAFIWQKDGVKKLNLYLIINYFKGGKLRFKKIKPEAFEANRFYTVINKKSGEIVPMEVNFNFDDPNLIILPLAFGKRQGREFIWNDLLSLETGSLKLANGRVIEKTLYNRRTRQDEPALFVALTFERREVLDSSNIKPMNLIGVDRGENIPAVIALTDPEGCPLSRFKDSLGNPTHILRIGERYKEKQRTIQAKKEVEQRRAGGYSRKYASKAKNLADDMVRNTARDLLYYAVTQDAMLIFENLSRGFGRQGKRTFMAERQYTRMEDWLTAKLAYEGLPSKTYLSKTLAQYTSKTCSNCGFTITSADYDRVLEKLKKTATGWMTTINGKELKVEGQITYYNRYKRQNVVKDLSVELDRLSEESVNNDISSWTKGRSGEALSLLKKRFSHRPVQEKFVCLNCGFETHADEQAALNIARSWLFLRSQEYKKYQTNKTTGNTDKRAFVETWQSFYRKKLKEVWKPAV

SEQ ID NO: 48413 - protein, 978 aa, synthetic construct
  REGION 1..978: note = engineered CasX variant
QEIKRINKIRRRLVKDSNTKKAGKTGPMKTLLVRVMTPDLRERLENLRKKPENIPQPISNTSRANLNKLLTDYTEMKKAILHVYWEEFQKDPVGLMSRVAQPASKKIDQNKLKPEMDEKGNLTTAGFACSQCGQPLFVYKLEQVSEKGKAYTNYFGRCNVAEHEKLILLAQLKPEKDSDEAVTYSLGKFGQRALDFYSIHVTKESTHPVKPLAQIAGNRYASVPVGKALSDACMGTIASFLSKYQDIIIEHQKVVKGNQKRLESLRELAGKENLEYPSVTLPPQPHTKEGVDAYNEVIARVRMWVNLNLWQKLKLSRDDAKPLLRLKGFPSFPLVERQANEVDWWDMVCNVKKLINEKKEDGKVFWQNLAIYKRQEALRPYLSSEEDRKKGKKFARYQLGDLLLHLEKKHGEDWGKVYDEAWERIDKKVEGLSKHIKLEEERRSEDAQSKAALTDWLRAKASFVIEGLKEADKDEFCRCELKLQKWYGDLRGKPFAIEAENSILDISGFSKQYNCAFIWQKDGVKKLNLYLIINYFKGGKLRFKKIKPEAFEANRFYTVINKKSGEIVPMEVNFNFDDPNLIILPLAFGKRQGREFIWNDLLSLETGSLKLANGRVIEKTLYNRRTRQDEPALFVALTFERREVLDSSNIKPMNLIGVDRGENIPAVIALTDPEGCPLSRFKDSLGNPTHILRIGERYKEKQRTIQAKKEVEQRRAGGYSRKYASKAKNLADDMVRNTARDLLYYAVTQDAMLIFENLSRGFGRQGKRTFMAERQYTRMEDWLTAKLAYEGLPSKTYLSKTLAQYTSKTCSNCGFTITSADYDRVLEKLKKTATGWMTTINGKELKVEGQITYYNRYKRQNVVKDLSVELDRLSEESVNNDISSWTKGRSGEALSLLKKRFSHRPVQEKFVCLNCGFETHADEQAALNIARSWLFLRSQEYKKYQTNKTTGNTDKRAFVETWQSFYRKKLKEVWKPAV

SEQ ID NO: 48414 - protein, 978 aa, synthetic construct
  REGION 1..978: note = engineered CasX variant
QEIKRINKIRRRLVKDSNTKKAGKTGPMKTLLVRVMTPDLRERLENLRKKPENIPQPISNTSRANLNKLLTDYTEMKKAILHVYWEEFQKDPVGLMSRVAQPASKKIDQNKLKPEMDEKGNLTTAGFACSQCGQPLFVYKLEQVSEKGKAYTNYFGRCNVAEHEKLIKLAQLKPEKDSDEAVTYSLGKFGQRALDFYSIHVTKESTHPVKPLAQIAGNRYASGPVGKALSDACMGTIASFLSKYQDIIIEHQKVVKGNQKRLESLRELAGKENLEYPSVTLPPQPHTKEGVDAYNEVIARVRMWVNLNLWQKLKLSRDDAKPLLRLKGFPSFPLVERQANEVDWWDMVCNVKKLINEKKEDGKVFWQNLAIYKRQEALRPYLSSEEDRKKGKKFARYQLGDLLLHLEKKHGEDWGKVYDEAWERIDKKVEGLSKHIKLEEERRSEDAQSKAALTDWLRAKASFVIEGLKEADKDEFCRCELKLQKWYGDLRGKPFAIEAENSILDISGFSKQYNCAFIWQKDGVKKLNLYLIINYFKGGKLRFKKIKPEAFEANRFYTVINKKSGEIVPMEVNFNFDDPNLIILPLAFGKRQGREFIWNDLLSLETGSLKLANGRVIEKTLYNRRTRQDEPALFVALTFERREVLDSSNIKPMNLIGVDRGENIPAVIALTDPEGCPLSRFKDSLGNPTHILRIGERYKEKQRTIQAKKEVEQRRAGGYSRKYASKAKNLADDMVRNTARDLLYYAVTQDAMLIFENLSRGFGRQGKRTFMAERQYTRMEDWLTAKLAYEGLPSKTYLSKTLAQYTSKTCSNCGFTITSADYDRVLEKLKKTATGWMTTINGKELKVEGQITYYNRYKRQNVVKDLSVELDRLSEESVNNDISSWTKGRSGEALSLLKKRFSHRPVQEKFVCLNCGFETHADEQAALNIARSWLFLRSQEYKKYQTNKTTGNTDKRAFVETWQSFYRKKLKEVWKPAV

SEQ ID NO: 48415 - protein, 977 aa, synthetic construct
  REGION 1..977: note = engineered CasX variant
QEIKRINKIRRRLVKDSNTKKAGKTGPMKTLLVRVMTPDLRERLENLRKKPENIPQPISNTSRANLNKLLTDYTEMKKAILHVYWEEFQKDPVGLMSRVAQPASKKIDQNKLKPEMDEKGNLTTAGFACSQCGQPLFVYKLEQVSEKGKAYTNYFGRCNVAEHEKLILLAQLKPEKDSDEAVTYSLGKFGQRALDFYSIHVTKESTHPVKPLAQIAGNRYASPVGKALSDACMGTIASFLSKYQDIIIEHQKVVKGNQKRLESLRELAGKENLEYPSVTLPPQPHTKEGVDAYNEVIARVRMWVNLNLWQKLKLSRDDAKPLLRLKGFPSFPLVERQANEVDWWDMVCNVKKLINEKKEDGKVFWQNLAIYKRQEALRPYLSSEEDRKKGKKFARYQLGDLLLHLEKKHGEDWGKVYDEAWERIDKKVEGLSKHIKLEEERRSEDAQSKAALTDWLRAKASFVIEGLKEADKDEFCRCELKLQKWYGDLRGKPFAIEAENSILDISGFSKQYNCAFIWQKDGVKKLNLYLIINYFKGGKLRFKKIKPEAFEANRFYTVINKKSGEIVPMEVNFNFDDPNLIILPLAFGKRQGREFIWNDLLSLETGSLKLANGRVIEKTLYNRRTRQDEPALFVALTFERREVLDSSNIKPMNLIGVDRGENIPAVIALTDPEGCPLSRFKDSLGNPTHILRIGERYKEKQRTIQAKKEVEQRRAGGYSRKYASKAKNLADDMVRNTARDLLYYAVTQDAMLIFENLSRGFGRQGKRTFMAERQYTRMEDWLTAKLAYEGLPSKTYLSKTLAQYTSKTCSNCGFTITSADYDRVLEKLKKTATGWMTTINGKELKVEGQITYYNRYKRQNVVKDLSVELDRLSEESVNNDISSWTKGRSGEALSLLKKRFSHRPVQEKFVCLNCGFETHADEQAALNIARSWLFLRSQEYKKYQTNKTTGNTDKRAFVETWQSFYRKKLKEVWKPAV

SEQ ID NO: 48416 - protein, 978 aa, synthetic construct
  REGION 1..978: note = engineered CasX variant
QEIKRINKIRRRLVKDSNTKKAGKTGPMKTLLVRVMTPDLRERLENLRKKPENIPQPISNTSRANLNKLLTDYTEMKKAILHVYWEEFQKDPVGLMSRVAQPASKKIDQNKLKPEMDEKGNLTTAGFACSQCGQPLFVYKLEQVSEKGKAYTNYFGRCNVAEHEKLILLAQLKPEKDSDEAVTYSLGKFGQRALDFYSIHVTKESTHPVKPLAQIAGNRYASYPVGKALSDACMGTIASFLSKYQDIIIEHQKVVKGNQKRLESLRELAGKENLEYPSVTLPPQPHTKEGVDAYNEVIARVRMWVNLNLWQKLKLSRDDAKPLLRLKGFPSFPLVERQANEVDWWDMVCNVKKLINEKKEDGKVFWQNLAGYKRQEALRPYLSSEEDREKGKKFARYQLGDLLLHLEKKHGEDWGKVYDEAWERIDKKVEGLSKHIKLEEERRSEDAQSKAALTDWLRAKASFVIEGLKEADKDEFCRCELKLQKWYGDLRGKPFAIEAENSILDISGFSKQYNCAFIWQKDGVKKLNLYLIINYFKGGKLRFKKIKPEAFEANRFYTVINKKSGEIVPMEVNFNFDDPNLIILPLAFGKRQGREFIWNDLLSLETGSLKLANGRVIEKTLYNRRTRQDEPALFVALTFERREVLDSSNIKPMNLIGVDRGENIPAVIALTDPEGCPLSRFKDSLGNPTHILRIGERYKEKQRTIQAKKEVEQRRAGGYSRKYASKAKNLADDMVRNTARDLLYYAVTQDAMLIFENLSRGFGRQGKRTFMAERQYTRMEDWLTAKLAYEGLPSKTYLSKTLAQYTSKTCSNCGFTITSADYDRVLEKLKKTATGWMTTINGKELKVEGQITYYNRYKRQNVVKDLSVELDRLSEESVNNDISSWTKGRSGEALSLLKKRFSHRPVQEKFVCLNCGFETHADEQAALNIARSWLFLRSQEYKKYQTNKTTGNTDKRAFVETWQSFYRKKLKEVWKPAV

SEQ ID NO: 48417 - protein, 978 aa, synthetic construct
  REGION 1..978: note = engineered CasX variant
QEIKRINKIRRRLVKDSNTKKAGKTGPMKTLLVRVMTPDLRERLENLRKKPENIPQPISNTSRANLNKLLTDYTEMKKAILHVYWEEFQKDPVGLMSRVAQPASKKIDQNKLKPEMDEKGNLTTAGFACSQCGQPLFVYKLEQVSEKGKAYTNYFGRCNVAEHEKLILLAQLKPEKDSDEAVTYSLGKFGQRALDFYSIHVTKESTHPVKPLAQIAGNRYASHPVGKALSDACMGTIASFLSKYQDIIIEHQKVVKGNQKRLESLRELAGKENLEYPSVTLPPQPHTKEGVDAYNEVIARVRMWVNLNLWQKLKLSRDDAKPLLRLKGFPSFPLVERQANEVDWWDMVCNVKKLINEKKEDGKVFWQNLAGYKRQEALRPYLSSEEDREKGKKFARYQLGDLLLHLEKKHGEDWGKVYDEAWERIDKKVEGLSKHIKLEEERRSEDAQSKAALTDWLRAKASFVIEGLKEADKDEFCRCELKLQKWYGDLRGKPFAIEAENSILDISGFSKQYNCAFIWQKDGVKKLNLYLIINYFKGGKLRFKKIKPEAFEANRFYTVINKKSGEIVPMEVNFNFDDPNLIILPLAFGKRQGREFIWNDLLSLETGSLKLANGRVIEKTLYNRRTRQDEPALFVALTFERREVLDSSNIKPMNLIGVDRGENIPAVIALTDPEGCPLSRFKDSLGNPTHILRIGERYKEKQRTIQAKKEVEQRRAGGYSRKYASKAKNLADDMVRNTARDLLYYAVTQDAMLIFENLSRGFGRQGKRTFMAERQYTRMEDWLTAKLAYEGLPSKTYLSKTLAQYTSKTCSNCGFTITSADYDRVLEKLKKTATGWMTTINGKELKVEGQITYYNRYKRQNVVKDLSVELDRLSEESVNNDISSWTKGRSGEALSLLKKRFSHRPVQEKFVCLNCGFETHADEQAALNIARSWLFLRSQEYKKYQTNKTTGNTDKRAFVETWQSFYRKKLKEVWKPAV

SEQ ID NO: 48418 - protein, 978 aa, synthetic construct
  REGION 1..978: note = engineered CasX variant
QEIKRINKIRRRLVKDSNTKKAGKTGPMKTLLVRVMTPDLRERLENLRKKPENIPQPISNTSRANLNKLLTDYTEMKKAILHVYWEEFQKDPVGLMSRVAQPASKKIDQNKLKPEMDEKGNLTTAGFACSQCGQPLFVYKLEQVSEKGKAYTNYFGRCNVAEHEKLILLAQLKPEKDSDEAVTYSLGKFGQRALDFYSIHVTKESTHPVKPLAQIAGNRYASSPVGKALSDACMGTIASFLSKYQDIIIEHQKVVKGNQKRLESLRELAGKENLEYPSVTLPPQPHTKEGVDAYNEVIARVRMWVNLNLWQKLKLSRDDAKPLLRLKGFPSFPLVERQANEVDWWDMVCNVKKLINEKKEDGKVFWQNLAGYKRQEALRPYLSSEEDREKGKKFARYQLGDLLLHLEKKHGEDWGKVYDEAWERIDKKVEGLSKHIKLEEERRSEDAQSKAALTDWLRAKASFVIEGLKEADKDEFCRCELKLQKWYGDLRGKPFAIEAENSILDISGFSKQYNCAFIWQKDGVKKLNLYLIINYFKGGKLRFKKIKPEAFEANRFYTVINKKSGEIVPMEVNFNFDDPNLIILPLAFGKRQGREFIWNDLLSLETGSLKLANGRVIEKTLYNRRTRQDEPALFVALTFERREVLDSSNIKPMNLIGVDRGENIPAVIALTDPEGCPLSRFKDSLGNPTHILRIGERYKEKQRTIQAKKEVEQRRAGGYSRKYASKAKNLADDMVRNTARDLLYYAVTQDAMLIFENLSRGFGRQGKRTFMAERQYTRMEDWLTAKLAYEGLPSKTYLSKTLAQYTSKTCSNCGFTITSADYDRVLEKLKKTATGWMTTINGKELKVEGQITYYNRYKRQNVVKDLSVELDRLSEESVNNDISSWTKGRSGEALSLLKKRFSHRPVQEKFVCLNCGFETHADEQAALNIARSWLFLRSQEYKKYQTNKTTGNTDKRAFVETWQSFYRKKLKEVWKPAV

SEQ ID NO: 48419 - protein, 978 aa, synthetic construct
  REGION 1..978: note = engineered CasX variant
QEIKRINKIRRRLVKDSNTKKAGKTGPMKTLLVRVMTPDLRERLENLRKKPENIPQPISNTSRANLNKLLTDYTEMKKAILHVYWEEFQKDPVGLMSRVAQPASKKIDQNKLKPEMDEKGNLTTAGFACSQCGQPLFVYKLEQVSEKGKAYTNYFGRCNVAEHEKLILLAQLKPEKDSDEAVTYSLGKFGQRALDFYSIHVTKESTHPVKPLAQIAGNRYASTPVGKALSDACMGTIASFLSKYQDIIIEHQKVVKGNQKRLESLRELAGKENLEYPSVTLPPQPHTKEGVDAYNEVIARVRMWVNLNLWQKLKLSRDDAKPLLRLKGFPSFPLVERQANEVDWWDMVCNVKKLINEKKEDGKVFWQNLAGYKRQEALRPYLSSEEDREKGKKFARYQLGDLLLHLEKKHGEDWGKVYDEAWERIDKKVEGLSKHIKLEEERRSEDAQSKAALTDWLRAKASFVIEGLKEADKDEFCRCELKLQKWYGDLRGKPFAIEAENSILDISGFSKQYNCAFIWQKDGVKKLNLYLIINYFKGGKLRFKKIKPEAFEANRFYTVINKKSGEIVPMEVNFNFDDPNLIILPLAFGKRQGREFIWNDLLSLETGSLKLANGRVIEKTLYNRRTRQDEPALFVALTFERREVLDSSNIKPMNLIGVDRGENIPAVIALTDPEGCPLSRFKDSLGNPTHILRIGERYKEKQRTIQAKKEVEQRRAGGYSRKYASKAKNLADDMVRNTARDLLYYAVTQDAMLIFENLSRGFGRQGKRTFMAERQYTRMEDWLTAKLAYEGLPSKTYLSKTLAQYTSKTCSNCGFTITSADYDRVLEKLKKTATGWMTTINGKELKVEGQITYYNRYKRQNVVKDLSVELDRLSEESVNNDISSWTKGRSGEALSLLKKRFSHRPVQEKFVCLNCGFETHADEQAALNIARSWLFLRSQEYKKYQTNKTTGNTDKRAFVETWQSFYRKKLKEVWKPAV

SEQ ID NO: 48420 - protein, 978 aa, synthetic construct
  REGION 1..978: note = engineered CasX variant
QEIKRINKIRRRLVKDSNTKKAGKTGPMKTLLVRVMTPDLRERLENLRKKPENIPQPISNTSRANLNKLLTDYTEMKKAILHVYWEEFQKDPVGLMSRVAQPASKKIDQNKLKPEMDEKGNLTTAGFACSQCGQPLFVYKLEQVSEKGKAYTNYFGRCNVAEHEKLILLAQLKPEKDSDEAVTYSLGKFGQRALDFYSIHVTKESTHPVKPLAQIAGNRYASAPVGKALSDACMGTIASFLSKYQDIIIEHQKVVKGNQKRLESLRELAGKENLEYPSVTLPPQPHTKEGVDAYNEVIARVRMWVNLNLWQKLKLSRDDAKPLLRLKGFPSFPLVERQANEVDWWDMVCNVKKLINEKKEDGKVFWQNLAGYKRQEALRPYLSSEEDREKGKKFARYQLGDLLLHLEKKHGEDWGKVYDEAWERIDKKVEGLSKHIKLEEERRSEDAQSKAALTDWLRAKASFVIEGLKEADKDEFCRCELKLQKWYGDLRGKPFAIEAENSILDISGFSKQYNCAFIWQKDGVKKLNLYLIINYFKGGKLRFKKIKPEAFEANRFYTVINKKSGEIVPMEVNFNFDDPNLIILPLAFGKRQGREFIWNDLLSLETGSLKLANGRVIEKTLYNRRTRQDEPALFVALTFERREVLDSSNIKPMNLIGVDRGENIPAVIALTDPEGCPLSRFKDSLGNPTHILRIGERYKEKQRTIQAKKEVEQRRAGGYSRKYASKAKNLADDMVRNTARDLLYYAVTQDAMLIFENLSRGFGRQGKRTFMAERQYTRMEDWLTAKLAYEGLPSKTYLSKTLAQYTSKTCSNCGFTITSADYDRVLEKLKKTATGWMTTINGKELKVEGQITYYNRYKRQNVVKDLSVELDRLSEESVNNDISSWTKGRSGEALSLLKKRFSHRPVQEKFVCLNCGFETHADEQAALNIARSWLFLRSQEYKKYQTNKTTGNTDKRAFVETWQSFYRKKLKEVWKPAV

SEQ ID NO: 48421 - protein, 978 aa, synthetic construct
  REGION 1..978: note = engineered CasX variant
QEIKRINKIRRRLVKDSNTKKAGKTGPMKTLLVRVMTPDLRERLENLRKKPENIPQPISNTSRANLNKLLTDYTEMKKAILHVYWEEFQKDPVGLMSRVAQPASKKIDQNKLKPEMDEKGNLTTAGFACSQCGQPLFVYKLEQVSEKGKAYTNYFGRCNVAEHEKLILLAQLKPEKDSDEAVTYSLGKFGQRALDFYSIHVTKESTHPVKPLAQIAGNRYASVPVGKALSDACMGTIASFLSKYQDIIIEHQKVVKGNQKRLESLRELAGKENLEYPSVTLPPQPHTKEGVDAYNEVIARVRMWVNLNLWQKLKLSRDDAKPLLRLKGFPSFPLVERQANEVDWWDMVCNVKKLINEKKEDGKVFWQNLAGYKRQEALRPYLSSEEDREKGKKFARYQLGDLLLHLEKKHGEDWGKVYDEAWERIDKKVEGLSKHIKLEEERRSEDAQSKAALTDWLRAKASFVIEGLKEADKDEFCRCELKLQKWYGDLRGKPFAIEAENSILDISGFSKQYNCAFIWQKDGVKKLNLYLIINYFKGGKLRFKKIKPEAFEANRFYTVINKKSGEIVPMEVNFNFDDPNLIILPLAFGKRQGREFIWNDLLSLETGSLKLANGRVIEKTLYNRRTRQDEPALFVALTFERREVLDSSNIKPMNLIGVDRGENIPAVIALTDPEGCPLSRFKDSLGNPTHILRIGERYKEKQRTIQAKKEVEQRRAGGYSRKYASKAKNLADDMVRNTARDLLYYAVTQDAMLIFENLSRGFGRQGKRTFMAERQYTRMEDWLTAKLAYEGLPSKTYLSKTLAQYTSKTCSNCGFTITSADYDRVLEKLKKTATGWMTTINGKELKVEGQITYYNRYKRQNVVKDLSVELDRLSEESVNNDISSWTKGRSGEALSLLKKRFSHRPVQEKFVCLNCGFETHADEQAALNIARSWLFLRSQEYKKYQTNKTTGNTDKRAFVETWQSFYRKKLKEVWKPAV

SEQ ID NO: 48422 - protein, 978 aa, synthetic construct
  REGION 1..978: note = engineered CasX variant
QEIKRINKIRRRLVKDSNTKKAGKTGPMKTLLVRVMTPDLRERLENLRKKPENIPQPISNTSRANLNKLLTDYTEMKKAILHVYWEEFQKDPVGLMSRVAQPASKKIDQNKLKPEMDEKGNLTTAGFACSQCGQPLFVYKLEQVSEKGKAYTNYFGRCNVAEHEKLIKLAQLKPEKDSDEAVTYSLGKFGQRALDFYSIHVTKESTHPVKPLAQIAGNRYASGPVGKALSDACMGTIASFLSKYQDIIIEHQKVVKGNQKRLESLRELAGKENLEYPSVTLPPQPHTKEGVDAYNEVIARVRMWVNLNLWQKLKLSRDDAKPLLRLKGFPSFPLVERQANEVDWWDMVCNVKKLINEKKEDGKVFWQNLAGYKRQEALRPYLSSEEDREKGKKFARYQLGDLLLHLEKKHGEDWGKVYDEAWERIDKKVEGLSKHIKLEEERRSEDAQSKAALTDWLRAKASFVIEGLKEADKDEFCRCELKLQKWYGDLRGKPFAIEAENSILDISGFSKQYNCAFIWQKDGVKKLNLYLIINYFKGGKLRFKKIKPEAFEANRFYTVINKKSGEIVPMEVNFNFDDPNLIILPLAFGKRQGREFIWNDLLSLETGSLKLANGRVIEKTLYNRRTRQDEPALFVALTFERREVLDSSNIKPMNLIGVDRGENIPAVIALTDPEGCPLSRFKDSLGNPTHILRIGERYKEKQRTIQAKKEVEQRRAGGYSRKYASKAKNLADDMVRNTARDLLYYAVTQDAMLIFENLSRGFGRQGKRTFMAERQYTRMEDWLTAKLAYEGLPSKTYLSKTLAQYTSKTCSNCGFTITSADYDRVLEKLKKTATGWMTTINGKELKVEGQITYYNRYKRQNVVKDLSVELDRLSEESVNNDISSWTKGRSGEALSLLKKRFSHRPVQEKFVCLNCGFETHADEQAALNIARSWLFLRSQEYKKYQTNKTTGNTDKRAFVETWQSFYRKKLKEVWKPAV

SEQ ID NO: 48423 - protein, 977 aa, synthetic construct
  REGION 1..977: note = engineered CasX variant
QEIKRINKIRRRLVKDSNTKKAGKTGPMKTLLVRVMTPDLRERLENLRKKPENIPQPISNTSRANLNKLLTDYTEMKKAILHVYWEEFQKDPVGLMSRVAQPASKKIDQNKLKPEMDEKGNLTTAGFACSQCGQPLFVYKLEQVSEKGKAYTNYFGRCNVAEHEKLILLAQLKPEKDSDEAVTYSLGKFGQRALDFYSIHVTKESTHPVKPLAQIAGNRYASPVGKALSDACMGTIASFLSKYQDIIIEHQKVVKGNQKRLESLRELAGKENLEYPSVTLPPQPHTKEGVDAYNEVIARVRMWVNLNLWQKLKLSRDDAKPLLRLKGFPSFPLVERQANEVDWWDMVCNVKKLINEKKEDGKVFWQNLAGYKRQEALRPYLSSEEDREKGKKFARYQLGDLLLHLEKKHGEDWGKVYDEAWERIDKKVEGLSKHIKLEEERRSEDAQSKAALTDWLRAKASFVIEGLKEADKDEFCRCELKLQKWYGDLRGKPFAIEAENSILDISGFSKQYNCAFIWQKDGVKKLNLYLIINYFKGGKLRFKKIKPEAFEANRFYTVINKKSGEIVPMEVNFNFDDPNLIILPLAFGKRQGREFIWNDLLSLETGSLKLANGRVIEKTLYNRRTRQDEPALFVALTFERREVLDSSNIKPMNLIGVDRGENIPAVIALTDPEGCPLSRFKDSLGNPTHILRIGERYKEKQRTIQAKKEVEQRRAGGYSRKYASKAKNLADDMVRNTARDLLYYAVTQDAMLIFENLSRGFGRQGKRTFMAERQYTRMEDWLTAKLAYEGLPSKTYLSKTLAQYTSKTCSNCGFTITSADYDRVLEKLKKTATGWMTTINGKELKVEGQITYYNRYKRQNVVKDLSVELDRLSEESVNNDISSWTKGRSGEALSLLKKRFSHRPVQEKFVCLNCGFETHADEQAALNIARSWLFLRSQEYKKYQTNKTTGNTDKRAFVETWQSFYRKKLKEVWKPAV

SEQ ID NO: 48424 - protein, 978 aa, synthetic construct
  REGION 1..978: note = engineered CasX variant
QEIKRINKIRRRLVKDSNTKKAGKTGPMKTLLVRVMTPDLRERLENLRKKPENIPQPISNTSRANLNKLLTDYTEMKKAILHVYWEEFQKDPVGLMSRVAQPASKKIDQNKLKPEMDEKGNLTTAGFACSQCGQPLFVYKLEQVSEKGKAYTNYFGRCNVAEHEKLILLAQLKPEKDSDEAVTYSLGKFGQRALDFYSIHVTKESTHPVKPLAQIAGNRYASYPVGKALSDACMGTIASFLSKYQDIIIEHQKVVKGNQKRLESLRELAGKENLEYPSVTLPPQPHTKEGVDAYNEVIARVRMWVNLNLWQKLKLSRDDAKPLLRLKGFPSFPLVERQANEVDWWDMVCNVKKLINEKKEDGKVFWQNLAGYKRQEALRPYLSSEEDRKKGKKFARYQLGDLLLHLEKKHGEDWGKVYDEAWERIDKKVEGLSKHIKLEEERRSEDAQSKAALTDWLRAKASFVIEGLKEADKDEFCRCELKLQKWYGDLRGKPFAIEAENSILDISGFSKQYNCAFIWQKDGVKKLNLYLIINYFKGGKLRFKKIKPEAFEANRFYTVINKKSGEIVIMEVNFNFDDPNLIILPLAFGKRQGREFIWNDLLSLETGSLKLANGRVIEKTLYNRRTRQDEPALFVALTFERREVLDSSNIKPMNLIGVDRGENIPAVIALTDPEGCPLSRFKDSLGNPTHILRIGERYKEKQRTIQAKKEVEQRRAGGYSRKYASKAKNLADDMVRNTARDLLYYAVTQDAMLIFENLSRGFGRQGKRTFMAERQYTRMEDWLTAKLAYEGLPSKTYLSKTLAQYTSKTCSNCGFTITSADYDRVLEKLKKTATGWMTTINGKELKVEGQITYYNRYKRQNVVKDLSVELDRLSEESVNNDISSWTKGRSGEALSLLKKRFSHRPVQEKFVCLNCGFETHADEQAALNIARSWLFLRSQEYKKYQTNKTTGNTDKRAFVETWQSFYRKKLKEVWKPAV

SEQ ID NO: 48425 - protein, 978 aa, synthetic construct
  REGION 1..978: note = engineered CasX variant
QEIKRINKIRRRLVKDSNTKKAGKTGPMKTLLVRVMTPDLRERLENLRKKPENIPQPISNTSRANLNKLLTDYTEMKKAILHVYWEEFQKDPVGLMSRVAQPASKKIDQNKLKPEMDEKGNLTTAGFACSQCGQPLFVYKLEQVSEKGKAYTNYFGRCNVAEHEKLILLAQLKPEKDSDEAVTYSLGKFGQRALDFYSIHVTKESTHPVKPLAQIAGNRYASHPVGKALSDACMGTIASFLSKYQDIIIEHQKVVKGNQKRLESLRELAGKENLEYPSVTLPPQPHTKEGVDAYNEVIARVRMWVNLNLWQKLKLSRDDAKPLLRLKGFPSFPLVERQANEVDWWDMVCNVKKLINEKKEDGKVFWQNLAGYKRQEALRPYLSSEEDRKKGKKFARYQLGDLLLHLEKKHGEDWGKVYDEAWERIDKKVEGLSKHIKLEEERRSEDAQSKAALTDWLRAKASFVIEGLKEADKDEFCRCELKLQKWYGDLRGKPFAIEAENSILDISGFSKQYNCAFIWQKDGVKKLNLYLIINYFKGGKLRFKKIKPEAFEANRFYTVINKKSGEIVIMEVNFNFDDPNLIILPLAFGKRQGREFIWNDLLSLETGSLKLANGRVIEKTLYNRRTRQDEPALFVALTFERREVLDSSNIKPMNLIGVDRGENIPAVIALTDPEGCPLSRFKDSLGNPTHILRIGERYKEKQRTIQAKKEVEQRRAGGYSRKYASKAKNLADDMVRNTARDLLYYAVTQDAMLIFENLSRGFGRQGKRTFMAERQYTRMEDWLTAKLAYEGLPSKTYLSKTLAQYTSKTCSNCGFTITSADYDRVLEKLKKTATGWMTTINGKELKVEGQITYYNRYKRQNVVKDLSVELDRLSEESVNNDISSWTKGRSGEALSLLKKRFSHRPVQEKFVCLNCGFETHADEQAALNIARSWLFLRSQEYKKYQTNKTTGNTDKRAFVETWQSFYRKKLKEVWKPAV

SEQ ID NO: 48426 - protein, 978 aa, synthetic construct
  REGION 1..978: note = engineered CasX variant
QEIKRINKIRRRLVKDSNTKKAGKTGPMKTLLVRVMTPDLRERLENLRKKPENIPQPISNTSRANLNKLLTDYTEMKKAILHVYWEEFQKDPVGLMSRVAQPASKKIDQNKLKPEMDEKGNLTTAGFACSQCGQPLFVYKLEQVSEKGKAYTNYFGRCNVAEHEKLILLAQLKPEKDSDEAVTYSLGKFGQRALDFYSIHVTKESTHPVKPLAQIAGNRYASSPVGKALSDACMGTIASFLSKYQDIIIEHQKVVKGNQKRLESLRELAGKENLEYPSVTLPPQPHTKEGVDAYNEVIARVRMWVNLNLWQKLKLSRDDAKPLLRLKGFPSFPLVERQANEVDWWDMVCNVKKLINEKKEDGKVFWQNLAGYKRQEALRPYLSSEEDRKKGKKFARYQLGDLLLHLEKKHGEDWGKVYDEAWERIDKKVEGLSKHIKLEEERRSEDAQSKAALTDWLRAKASFVIEGLKEADKDEFCRCELKLQKWYGDLRGKPFAIEAENSILDISGFSKQYNCAFIWQKDGVKKLNLYLIINYFKGGKLRFKKIKPEAFEANRFYTVINKKSGEIVIMEVNFNFDDPNLIILPLAFGKRQGREFIWNDLLSLETGSLKLANGRVIEKTLYNRRTRQDEPALFVALTFERREVLDSSNIKPMNLIGVDRGENIPAVIALTDPEGCPLSRFKDSLGNPTHILRIGERYKEKQRTIQAKKEVEQRRAGGYSRKYASKAKNLADDMVRNTARDLLYYAVTQDAMLIFENLSRGFGRQGKRTFMAERQYTRMEDWLTAKLAYEGLPSKTYLSKTLAQYTSKTCSNCGFTITSADYDRVLEKLKKTATGWMTTINGKELKVEGQITYYNRYKRQNVVKDLSVELDRLSEESVNNDISSWTKGRSGEALSLLKKRFSHRPVQEKFVCLNCGFETHADEQAALNIARSWLFLRSQEYKKYQTNKTTGNTDKRAFVETWQSFYRKKLKEVWKPAV

SEQ ID NO: 48427 - protein, 978 aa, synthetic construct
  REGION 1..978: note = engineered CasX variant
QEIKRINKIRRRLVKDSNTKKAGKTGPMKTLLVRVMTPDLRERLENLRKKPENIPQPISNTSRANLNKLLTDYTEMKKAILHVYWEEFQKDPVGLMSRVAQPASKKIDQNKLKPEMDEKGNLTTAGFACSQCGQPLFVYKLEQVSEKGKAYTNYFGRCNVAEHEKLILLAQLKPEKDSDEAVTYSLGKFGQRALDFYSIHVTKESTHPVKPLAQIAGNRYASTPVGKALSDACMGTIASFLSKYQDIIIEHQKVVKGNQKRLESLRELAGKENLEYPSVTLPPQPHTKEGVDAYNEVIARVRMWVNLNLWQKLKLSRDDAKPLLRLKGFPSFPLVERQANEVDWWDMVCNVKKLINEKKEDGKVFWQNLAGYKRQEALRPYLSSEEDRKKGKKFARYQLGDLLLHLEKKHGEDWGKVYDEAWERIDKKVEGLSKHIKLEEERRSEDAQSKAALTDWLRAKASFVIEGLKEADKDEFCRCELKLQKWYGDLRGKPFAIEAENSILDISGFSKQYNCAFIWQKDGVKKLNLYLIINYFKGGKLRFKKIKPEAFEANRFYTVINKKSGEIVIMEVNFNFDDPNLIILPLAFGKRQGREFIWNDLLSLETGSLKLANGRVIEKTLYNRRTRQDEPALFVALTFERREVLDSSNIKPMNLIGVDRGENIPAVIALTDPEGCPLSRFKDSLGNPTHILRIGERYKEKQRTIQAKKEVEQRRAGGYSRKYASKAKNLADDMVRNTARDLLYYAVTQDAMLIFENLSRGFGRQGKRTFMAERQYTRMEDWLTAKLAYEGLPSKTYLSKTLAQYTSKTCSNCGFTITSADYDRVLEKLKKTATGWMTTINGKELKVEGQITYYNRYKRQNVVKDLSVELDRLSEESVNNDISSWTKGRSGEALSLLKKRFSHRPVQEKFVCLNCGFETHADEQAALNIARSWLFLRSQEYKKYQTNKTTGNTDKRAFVETWQSFYRKKLKEVWKPAV

SEQ ID NO: 48428 - protein, 978 aa, synthetic construct
  REGION 1..978: note = engineered CasX variant
QEIKRINKIRRRLVKDSNTKKAGKTGPMKTLLVRVMTPDLRERLENLRKKPENIPQPISNTSRANLNKLLTDYTEMKKAILHVYWEEFQKDPVGLMSRVAQPASKKIDQNKLKPEMDEKGNLTTAGFACSQCGQPLFVYKLEQVSEKGKAYTNYFGRCNVAEHEKLILLAQLKPEKDSDEAVTYSLGKFGQRALDFYSIHVTKESTHPVKPLAQIAGNRYASAPVGKALSDACMGTIASFLSKYQDIIIEHQKVVKGNQKRLESLRELAGKENLEYPSVTLPPQPHTKEGVDAYNEVIARVRMWVNLNLWQKLKLSRDDAKPLLRLKGFPSFPLVERQANEVDWWDMVCNVKKLINEKKEDGKVFWQNLAGYKRQEALRPYLSSEEDRKKGKKFARYQLGDLLLHLEKKHGEDWGKVYDEAWERIDKKVEGLSKHIKLEEERRSEDAQSKAALTDWLRAKASFVIEGLKEADKDEFCRCELKLQKWYGDLRGKPFAIEAENSILDISGFSKQYNCAFIWQKDGVKKLNLYLIINYFKGGKLRFKKIKPEAFEANRFYTVINKKSGEIVIMEVNFNFDDPNLIILPLAFGKRQGREFIWNDLLSLETGSLKLANGRVIEKTLYNRRTRQDEPALFVALTFERREVLDSSNIKPMNLIGVDRGENIPAVIALTDPEGCPLSRFKDSLGNPTHILRIGERYKEKQRTIQAKKEVEQRRAGGYSRKYASKAKNLADDMVRNTARDLLYYAVTQDAMLIFENLSRGFGRQGKRTFMAERQYTRMEDWLTAKLAYEGLPSKTYLSKTLAQYTSKTCSNCGFTITSADYDRVLEKLKKTATGWMTTINGKELKVEGQITYYNRYKRQNVVKDLSVELDRLSEESVNNDISSWTKGRSGEALSLLKKRFSHRPVQEKFVCLNCGFETHADEQAALNIARSWLFLRSQEYKKYQTNKTTGNTDKRAFVETWQSFYRKKLKEVWKPAV

SEQ ID NO: 48429 - protein, 978 aa, synthetic construct
  REGION 1..978: note = engineered CasX variant
QEIKRINKIRRRLVKDSNTKKAGKTGPMKTLLVRVMTPDLRERLENLRKKPENIPQPISNTSRANLNKLLTDYTEMKKAILHVYWEEFQKDPVGLMSRVAQPASKKIDQNKLKPEMDEKGNLTTAGFACSQCGQPLFVYKLEQVSEKGKAYTNYFGRCNVAEHEKLILLAQLKPEKDSDEAVTYSLGKFGQRALDFYSIHVTKESTHPVKPLAQIAGNRYASVPVGKALSDACMGTIASFLSKYQDIIIEHQKVVKGNQKRLESLRELAGKENLEYPSVTLPPQPHTKEGVDAYNEVIARVRMWVNLNLWQKLKLSRDDAKPLLRLKGFPSFPLVERQANEVDWWDMVCNVKKLINEKKEDGKVFWQNLAGYKRQEALRPYLSSEEDRKKGKKFARYQLGDLLLHLEKKHGEDWGKVYDEAWERIDKKVEGLSKHIKLEEERRSEDAQSKAALTDWLRAKASFVIEGLKEADKDEFCRCELKLQKWYGDLRGKPFAIEAENSILDISGFSKQYNCAFIWQKDGVKKLNLYLIINYFKGGKLRFKKIKPEAFEANRFYTVINKKSGEIVIMEVNFNFDDPNLIILPLAFGKRQGREFIWNDLLSLETGSLKLANGRVIEKTLYNRRTRQDEPALFVALTFERREVLDSSNIKPMNLIGVDRGENIPAVIALTDPEGCPLSRFKDSLGNPTHILRIGERYKEKQRTIQAKKEVEQRRAGGYSRKYASKAKNLADDMVRNTARDLLYYAVTQDAMLIFENLSRGFGRQGKRTFMAERQYTRMEDWLTAKLAYEGLPSKTYLSKTLAQYTSKTCSNCGFTITSADYDRVLEKLKKTATGWMTTINGKELKVEGQITYYNRYKRQNVVKDLSVELDRLSEESVNNDISSWTKGRSGEALSLLKKRFSHRPVQEKFVCLNCGFETHADEQAALNIARSWLFLRSQEYKKYQTNKTTGNTDKRAFVETWQSFYRKKLKEVWKPAV

SEQ ID NO: 48430 - protein, 978 aa, synthetic construct
  REGION 1..978: note = engineered CasX variant
QEIKRINKIRRRLVKDSNTKKAGKTGPMKTLLVRVMTPDLRERLENLRKKPENIPQPISNTSRANLNKLLTDYTEMKKAILHVYWEEFQKDPVGLMSRVAQPASKKIDQNKLKPEMDEKGNLTTAGFACSQCGQPLFVYKLEQVSEKGKAYTNYFGRCNVAEHEKLIKLAQLKPEKDSDEAVTYSLGKFGQRALDFYSIHVTKESTHPVKPLAQIAGNRYASGPVGKALSDACMGTIASFLSKYQDIIIEHQKVVKGNQKRLESLRELAGKENLEYPSVTLPPQPHTKEGVDAYNEVIARVRMWVNLNLWQKLKLSRDDAKPLLRLKGFPSFPLVERQANEVDWWDMVCNVKKLINEKKEDGKVFWQNLAGYKRQEALRPYLSSEEDRKKGKKFARYQLGDLLLHLEKKHGEDWGKVYDEAWERIDKKVEGLSKHIKLEEERRSEDAQSKAALTDWLRAKASFVIEGLKEADKDEFCRCELKLQKWYGDLRGKPFAIEAENSILDISGFSKQYNCAFIWQKDGVKKLNLYLIINYFKGGKLRFKKIKPEAFEANRFYTVINKKSGEIVIMEVNFNFDDPNLIILPLAFGKRQGREFIWNDLLSLETGSLKLANGRVIEKTLYNRRTRQDEPALFVALTFERREVLDSSNIKPMNLIGVDRGENIPAVIALTDPEGCPLSRFKDSLGNPTHILRIGERYKEKQRTIQAKKEVEQRRAGGYSRKYASKAKNLADDMVRNTARDLLYYAVTQDAMLIFENLSRGFGRQGKRTFMAERQYTRMEDWLTAKLAYEGLPSKTYLSKTLAQYTSKTCSNCGFTITSADYDRVLEKLKKTATGWMTTINGKELKVEGQITYYNRYKRQNVVKDLSVELDRLSEESVNNDISSWTKGRSGEALSLLKKRFSHRPVQEKFVCLNCGFETHADEQAALNIARSWLFLRSQEYKKYQTNKTTGNTDKRAFVETWQSFYRKKLKEVWKPAV

SEQ ID NO: 48431 - protein, 977 aa, synthetic construct
  REGION 1..977: note = engineered CasX variant
QEIKRINKIRRRLVKDSNTKKAGKTGPMKTLLVRVMTPDLRERLENLRKKPENIPQPISNTSRANLNKLLTDYTEMKKAILHVYWEEFQKDPVGLMSRVAQPASKKIDQNKLKPEMDEKGNLTTAGFACSQCGQPLFVYKLEQVSEKGKAYTNYFGRCNVAEHEKLILLAQLKPEKDSDEAVTYSLGKFGQRALDFYSIHVTKESTHPVKPLAQIAGNRYASPVGKALSDACMGTIASFLSKYQDIIIEHQKVVKGNQKRLESLRELAGKENLEYPSVTLPPQPHTKEGVDAYNEVIARVRMWVNLNLWQKLKLSRDDAKPLLRLKGFPSFPLVERQANEVDWWDMVCNVKKLINEKKEDGKVFWQNLAGYKRQEALRPYLSSEEDRKKGKKFARYQLGDLLLHLEKKHGEDWGKVYDEAWERIDKKVEGLSKHIKLEEERRSEDAQSKAALTDWLRAKASFVIEGLKEADKDEFCRCELKLQKWYGDLRGKPFAIEAENSILDISGFSKQYNCAFIWQKDGVKKLNLYLIINYFKGGKLRFKKIKPEAFEANRFYTVINKKSGEIVIMEVNFNFDDPNLIILPLAFGKRQGREFIWNDLLSLETGSLKLANGRVIEKTLYNRRTRQDEPALFVALTFERREVLDSSNIKPMNLIGVDRGENIPAVIALTDPEGCPLSRFKDSLGNPTHILRIGERYKEKQRTIQAKKEVEQRRAGGYSRKYASKAKNLADDMVRNTARDLLYYAVTQDAMLIFENLSRGFGRQGKRTFMAERQYTRMEDWLTAKLAYEGLPSKTYLSKTLAQYTSKTCSNCGFTITSADYDRVLEKLKKTATGWMTTINGKELKVEGQITYYNRYKRQNVVKDLSVELDRLSEESVNNDISSWTKGRSGEALSLLKKRFSHRPVQEKFVCLNCGFETHADEQAALNIARSWLFLRSQEYKKYQTNKTTGNTDKRAFVETWQSFYRKKLKEVWKPAV

SEQ ID NO: 48432 - protein, 978 aa, synthetic construct
  REGION 1..978: note = engineered CasX variant
QEIKRINKIRRRLVKDSNTKKAGKTGPMKTLLVRVMTPDLRERLENLRKKPENIPQPISNTSRANLNKLLTDYTEMKKAILHVYWEEFQKDPVGLMSRVAQPASKKIDQNKLKPEMDEKGNLTTAGFACSQCGQPLFVYKLEQVSEKGKAYTNYFGRCNVAEHEKLILLAQLKPEKDSDEAVTYSLGKFGQRALDFYSIHVTKESTHPVKPLAQIAGNRYASYPVGKALSGACMGTIASFLSKYQDIIIEHQKVVKGNQKRLESLRELAGKENLEYPSVTLPPQPHTKEGVDAYNEVIARVRMWVNLNLWQKLKLSRDDAKPLLRLKGFPSFPLVERQANEVDWWDMVCNVKKLINEKKEDGKVFWQNLAGYKRQEALRPYLSSEEDRKKGKKFARYQLGDLLLHLEKKHGEDWGKVYDEAWERIDKKVEGLSKHIKLEEERRSEDAQSKAALTDWLRAKASFVIEGLKEADKDEFCRCELKLQKWYGDLRGKPFAIEAENSILDISGFSKQYNCAFIWQKDGVKKLNLYLIINYFKGGKLRFKKIKPEAFEANRFYTVINKKSGEIVPMEVNFNFDDPNLIILPLAFGKRQGREFIWNDLLSLETGSLQLANGRVIEKTLYNRRTRQDEPALFVALTFERREVLDSSNIKPMNLIGVDRGENIPAVIALTDPEGCPLSRFKDSLGNPTHILRIGESYKEKQRTIQAKKEVEQRRAGGYSRKYASKAKNLADDMVRNTARDLLYYAVTQDAMLIFENLSRGFGRQGKRTFMAERQYTRMEDWLTAKLAYEGLPSKTYLSKTLAQYTSKTCSNCGFTITSADYDRVLEKLKKTATGWMTTINGKELKVEGQITYYNRYKRQNVVKDLSVELDRLSEESVNNDISSWTKGRSGEALSLLKKRFSHRPVQEKFVCLNCGFETHADEQAALNIARSWLFLRSQEYKKYQTNKTTGNTDKRAFVETWQSFYRKKLKEVWKPAV

SEQ ID NO: 48433 - protein, 978 aa, synthetic construct
  REGION 1..978: note = engineered CasX variant
QEIKRINKIRRRLVKDSNTKKAGKTGPMKTLLVRVMTPDLRERLENLRKKPENIPQPISNTSRANLNKLLTDYTEMKKAILHVYWEEFQKDPVGLMSRVAQPASKKIDQNKLKPEMDEKGNLTTAGFACSQCGQPLFVYKLEQVSEKGKAYTNYFGRCNVAEHEKLILLAQLKPEKDSDEAVTYSLGKFGQRALDFYSIHVTKESTHPVKPLAQIAGNRYASHPVGKALSGACMGTIASFLSKYQDIIIEHQKVVKGNQKRLESLRELAGKENLEYPSVTLPPQPHTKEGVDAYNEVIARVRMWVNLNLWQKLKLSRDDAKPLLRLKGFPSFPLVERQANEVDWWDMVCNVKKLINEKKEDGKVFWQNLAGYKRQEALRPYLSSEEDRKKGKKFARYQLGDLLLHLEKKHGEDWGKVYDEAWERIDKKVEGLSKHIKLEEERRSEDAQSKAALTDWLRAKASFVIEGLKEADKDEFCRCELKLQKWYGDLRGKPFAIEAENSILDISGFSKQYNCAFIWQKDGVKKLNLYLIINYFKGGKLRFKKIKPEAFEANRFYTVINKKSGEIVPMEVNFNFDDPNLIILPLAFGKRQGREFIWNDLLSLETGSLQLANGRVIEKTLYNRRTRQDEPALFVALTFERREVLDSSNIKPMNLIGVDRGENIPAVIALTDPEGCPLSRFKDSLGNPTHILRIGESYKEKQRTIQAKKEVEQRRAGGYSRKYASKAKNLADDMVRNTARDLLYYAVTQDAMLIFENLSRGFGRQGKRTFMAERQYTRMEDWLTAKLAYEGLPSKTYLSKTLAQYTSKTCSNCGFTITSADYDRVLEKLKKTATGWMTTINGKELKVEGQITYYNRYKRQNVVKDLSVELDRLSEESVNNDISSWTKGRSGEALSLLKKRFSHRPVQEKFVCLNCGFETHADEQAALNIARSWLFLRSQEYKKYQTNKTTGNTDKRAFVETWQSFYRKKLKEVWKPAV

SEQ ID NO: 48434 - protein, 978 aa, synthetic construct
  REGION 1..978: note = engineered CasX variant
QEIKRINKIRRRLVKDSNTKKAGKTGPMKTLLVRVMTPDLRERLENLRKKPENIPQPISNTSRANLNKLLTDYTEMKKAILHVYWEEFQKDPVGLMSRVAQPASKKIDQNKLKPEMDEKGNLTTAGFACSQCGQPLFVYKLEQVSEKGKAYTNYFGRCNVAEHEKLILLAQLKPEKDSDEAVTYSLGKFGQRALDFYSIHVTKESTHPVKPLAQIAGNRYASSPVGKALSGACMGTIASFLSKYQDIIIEHQKVVKGNQKRLESLRELAGKENLEYPSVTLPPQPHTKEGVDAYNEVIARVRMWVNLNLWQKLKLSRDDAKPLLRLKGFPSFPLVERQANEVDWWDMVCNVKKLINEKKEDGKVFWQNLAGYKRQEALRPYLSSEEDRKKGKKFARYQLGDLLLHLEKKHGEDWGKVYDEAWERIDKKVEGLSKHIKLEEERRSEDAQSKAALTDWLRAKASFVIEGLKEADKDEFCRCELKLQKWYGDLRGKPFAIEAENSILDISGFSKQYNCAFIWQKDGVKKLNLYLIINYFKGGKLRFKKIKPEAFEANRFYTVINKKSGEIVPMEVNFNFDDPNLIILPLAFGKRQGREFIWNDLLSLETGSLQLANGRVIEKTLYNRRTRQDEPALFVALTFERREVLDSSNIKPMNLIGVDRGENIPAVIALTDPEGCPLSRFKDSLGNPTHILRIGESYKEKQRTIQAKKEVEQRRAGGYSRKYASKAKNLADDMVRNTARDLLYYAVTQDAMLIFENLSRGFGRQGKRTFMAERQYTRMEDWLTAKLAYEGLPSKTYLSKTLAQYTSKTCSNCGFTITSADYDRVLEKLKKTATGWMTTINGKELKVEGQITYYNRYKRQNVVKDLSVELDRLSEESVNNDISSWTKGRSGEALSLLKKRFSHRPVQEKFVCLNCGFETHADEQAALNIARSWLFLRSQEYKKYQTNKTTGNTDKRAFVETWQSFYRKKLKEVWKPAV

SEQ ID NO: 48435 - protein, 978 aa, synthetic construct
  REGION 1..978: note = engineered CasX variant
QEIKRINKIRRRLVKDSNTKKAGKTGPMKTLLVRVMTPDLRERLENLRKKPENIPQPISNTSRANLNKLLTDYTEMKKAILHVYWEEFQKDPVGLMSRVAQPASKKIDQNKLKPEMDEKGNLTTAGFACSQCGQPLFVYKLEQVSEKGKAYTNYFGRCNVAEHEKLILLAQLKPEKDSDEAVTYSLGKFGQRALDFYSIHVTKESTHPVKPLAQIAGNRYASTPVGKALSGACMGTIASFLSKYQDIIIEHQKVVKGNQKRLESLRELAGKENLEYPSVTLPPQPHTKEGVDAYNEVIARVRMWVNLNLWQKLKLSRDDAKPLLRLKGFPSFPLVERQANEVDWWDMVCNVKKLINEKKEDGKVFWQNLAGYKRQEALRPYLSSEEDRKKGKKFARYQLGDLLLHLEKKHGEDWGKVYDEAWERIDKKVEGLSKHIKLEEERRSEDAQSKAALTDWLRAKASFVIEGLKEADKDEFCRCELKLQKWYGDLRGKPFAIEAENSILDISGFSKQYNCAFIWQKDGVKKLNLYLIINYFKGGKLRFKKIKPEAFEANRFYTVINKKSGEIVPMEVNFNFDDPNLIILPLAFGKRQGREFIWNDLLSLETGSLQLANGRVIEKTLYNRRTRQDEPALFVALTFERREVLDSSNIKPMNLIGVDRGENIPAVIALTDPEGCPLSRFKDSLGNPTHILRIGESYKEKQRTIQAKKEVEQRRAGGYSRKYASKAKNLADDMVRNTARDLLYYAVTQDAMLIFENLSRGFGRQGKRTFMAERQYTRMEDWLTAKLAYEGLPSKTYLSKTLAQYTSKTCSNCGFTITSADYDRVLEKLKKTATGWMTTINGKELKVEGQITYYNRYKRQNVVKDLSVELDRLSEESVNNDISSWTKGRSGEALSLLKKRFSHRPVQEKFVCLNCGFETHADEQAALNIARSWLFLRSQEYKKYQTNKTTGNTDKRAFVETWQSFYRKKLKEVWKPAV

SEQ ID NO: 48436 - protein, 978 aa, synthetic construct
  REGION 1..978: note = engineered CasX variant
QEIKRINKIRRRLVKDSNTKKAGKTGPMKTLLVRVMTPDLRERLENLRKKPENIPQPISNTSRANLNKLLTDYTEMKKAILHVYWEEFQKDPVGLMSRVAQPASKKIDQNKLKPEMDEKGNLTTAGFACSQCGQPLFVYKLEQVSEKGKAYTNYFGRCNVAEHEKLILLAQLKPEKDSDEAVTYSLGKFGQRALDFYSIHVTKESTHPVKPLAQIAGNRYASAPVGKALSGACMGTIASFLSKYQDIIIEHQKVVKGNQKRLESLRELAGKENLEYPSVTLPPQPHTKEGVDAYNEVIARVRMWVNLNLWQKLKLSRDDAKPLLRLKGFPSFPLVERQANEVDWWDMVCNVKKLINEKKEDGKVFWQNLAGYKRQEALRPYLSSEEDRKKGKKFARYQLGDLLLHLEKKHGEDWGKVYDEAWERIDKKVEGLSKHIKLEEERRSEDAQSKAALTDWLRAKASFVIEGLKEADKDEFCRCELKLQKWYGDLRGKPFAIEAENSILDISGFSKQYNCAFIWQKDGVKKLNLYLIINYFKGGKLRFKKIKPEAFEANRFYTVINKKSGEIVPMEVNFNFDDPNLIILPLAFGKRQGREFIWNDLLSLETGSLQLANGRVIEKTLYNRRTRQDEPALFVALTFERREVLDSSNIKPMNLIGVDRGENIPAVIALTDPEGCPLSRFKDSLGNPTHILRIGESYKEKQRTIQAKKEVEQRRAGGYSRKYASKAKNLADDMVRNTARDLLYYAVTQDAMLIFENLSRGFGRQGKRTFMAERQYTRMEDWLTAKLAYEGLPSKTYLSKTLAQYTSKTCSNCGFTITSADYDRVLEKLKKTATGWMTTINGKELKVEGQITYYNRYKRQNVVKDLSVELDRLSEESVNNDISSWTKGRSGEALSLLKKRFSHRPVQEKFVCLNCGFETHADEQAALNIARSWLFLRSQEYKKYQTNKTTGNTDKRAFVETWQSFYRKKLKEVWKPAV

SEQ ID NO: 48437 - protein, 978 aa, synthetic construct
  REGION 1..978: note = engineered CasX variant
QEIKRINKIRRRLVKDSNTKKAGKTGPMKTLLVRVMTPDLRERLENLRKKPENIPQPISNTSRANLNKLLTDYTEMKKAILHVYWEEFQKDPVGLMSRVAQPASKKIDQNKLKPEMDEKGNLTTAGFACSQCGQPLFVYKLEQVSEKGKAYTNYFGRCNVAEHEKLILLAQLKPEKDSDEAVTYSLGKFGQRALDFYSIHVTKESTHPVKPLAQIAGNRYASVPVGKALSGACMGTIASFLSKYQDIIIEHQKVVKGNQKRLESLRELAGKENLEYPSVTLPPQPHTKEGVDAYNEVIARVRMWVNLNLWQKLKLSRDDAKPLLRLKGFPSFPLVERQANEVDWWDMVCNVKKLINEKKEDGKVFWQNLAGYKRQEALRPYLSSEEDRKKGKKFARYQLGDLLLHLEKKHGEDWGKVYDEAWERIDKKVEGLSKHIKLEEERRSEDAQSKAALTDWLRAKASFVIEGLKEADKDEFCRCELKLQKWYGDLRGKPFAIEAENSILDISGFSKQYNCAFIWQKDGVKKLNLYLIINYFKGGKLRFKKIKPEAFEANRFYTVINKKSGEIVPMEVNFNFDDPNLIILPLAFGKRQGREFIWNDLLSLETGSLQLANGRVIEKTLYNRRTRQDEPALFVALTFERREVLDSSNIKPMNLIGVDRGENIPAVIALTDPEGCPLSRFKDSLGNPTHILRIGESYKEKQRTIQAKKEVEQRRAGGYSRKYASKAKNLADDMVRNTARDLLYYAVTQDAMLIFENLSRGFGRQGKRTFMAERQYTRMEDWLTAKLAYEGLPSKTYLSKTLAQYTSKTCSNCGFTITSADYDRVLEKLKKTATGWMTTINGKELKVEGQITYYNRYKRQNVVKDLSVELDRLSEESVNNDISSWTKGRSGEALSLLKKRFSHRPVQEKFVCLNCGFETHADEQAALNIARSWLFLRSQEYKKYQTNKTTGNTDKRAFVETWQSFYRKKLKEVWKPAV

SEQ ID NO: 48438 - protein, 978 aa, synthetic construct
  REGION 1..978: note = engineered CasX variant
QEIKRINKIRRRLVKDSNTKKAGKTGPMKTLLVRVMTPDLRERLENLRKKPENIPQPISNTSRANLNKLLTDYTEMKKAILHVYWEEFQKDPVGLMSRVAQPASKKIDQNKLKPEMDEKGNLTTAGFACSQCGQPLFVYKLEQVSEKGKAYTNYFGRCNVAEHEKLIKLAQLKPEKDSDEAVTYSLGKFGQRALDFYSIHVTKESTHPVKPLAQIAGNRYASGPVGKALSGACMGTIASFLSKYQDIIIEHQKVVKGNQKRLESLRELAGKENLEYPSVTLPPQPHTKEGVDAYNEVIARVRMWVNLNLWQKLKLSRDDAKPLLRLKGFPSFPLVERQANEVDWWDMVCNVKKLINEKKEDGKVFWQNLAGYKRQEALRPYLSSEEDRKKGKKFARYQLGDLLLHLEKKHGEDWGKVYDEAWERIDKKVEGLSKHIKLEEERRSEDAQSKAALTDWLRAKASFVIEGLKEADKDEFCRCELKLQKWYGDLRGKPFAIEAENSILDISGFSKQYNCAFIWQKDGVKKLNLYLIINYFKGGKLRFKKIKPEAFEANRFYTVINKKSGEIVPMEVNFNFDDPNLIILPLAFGKRQGREFIWNDLLSLETGSLQLANGRVIEKTLYNRRTRQDEPALFVALTFERREVLDSSNIKPMNLIGVDRGENIPAVIALTDPEGCPLSRFKDSLGNPTHILRIGESYKEKQRTIQAKKEVEQRRAGGYSRKYASKAKNLADDMVRNTARDLLYYAVTQDAMLIFENLSRGFGRQGKRTFMAERQYTRMEDWLTAKLAYEGLPSKTYLSKTLAQYTSKTCSNCGFTITSADYDRVLEKLKKTATGWMTTINGKELKVEGQITYYNRYKRQNVVKDLSVELDRLSEESVNNDISSWTKGRSGEALSLLKKRFSHRPVQEKFVCLNCGFETHADEQAALNIARSWLFLRSQEYKKYQTNKTTGNTDKRAFVETWQSFYRKKLKEVWKPAV

SEQ ID NO: 48439 - protein, 977 aa, synthetic construct
  REGION 1..977: note = engineered CasX variant
QEIKRINKIRRRLVKDSNTKKAGKTGPMKTLLVRVMTPDLRERLENLRKKPENIPQPISNTSRANLNKLLTDYTEMKKAILHVYWEEFQKDPVGLMSRVAQPASKKIDQNKLKPEMDEKGNLTTAGFACSQCGQPLFVYKLEQVSEKGKAYTNYFGRCNVAEHEKLILLAQLKPEKDSDEAVTYSLGKFGQRALDFYSIHVTKESTHPVKPLAQIAGNRYASPVGKALSGACMGTIASFLSKYQDIIIEHQKVVKGNQKRLESLRELAGKENLEYPSVTLPPQPHTKEGVDAYNEVIARVRMWVNLNLWQKLKLSRDDAKPLLRLKGFPSFPLVERQANEVDWWDMVCNVKKLINEKKEDGKVFWQNLAGYKRQEALRPYLSSEEDRKKGKKFARYQLGDLLLHLEKKHGEDWGKVYDEAWERIDKKVEGLSKHIKLEEERRSEDAQSKAALTDWLRAKASFVIEGLKEADKDEFCRCELKLQKWYGDLRGKPFAIEAENSILDISGFSKQYNCAFIWQKDGVKKLNLYLIINYFKGGKLRFKKIKPEAFEANRFYTVINKKSGEIVPMEVNFNFDDPNLIILPLAFGKRQGREFIWNDLLSLETGSLQLANGRVIEKTLYNRRTRQDEPALFVALTFERREVLDSSNIKPMNLIGVDRGENIPAVIALTDPEGCPLSRFKDSLGNPTHILRIGESYKEKQRTIQAKKEVEQRRAGGYSRKYASKAKNLADDMVRNTARDLLYYAVTQDAMLIFENLSRGFGRQGKRTFMAERQYTRMEDWLTAKLAYEGLPSKTYLSKTLAQYTSKTCSNCGFTITSADYDRVLEKLKKTATGWMTTINGKELKVEGQITYYNRYKRQNVVKDLSVELDRLSEESVNNDISSWTKGRSGEALSLLKKRFSHRPVQEKFVCLNCGFETHADEQAALNIARSWLFLRSQEYKKYQTNKTTGNTDKRAFVETWQSFYRKKLKEVWKPAV

SEQ ID NO: 48440 - protein, 978 aa, synthetic construct
  REGION 1..978: note = engineered CasX variant
QEIKRINKIRRRLVKDSNTKKAGKTGPMKTLLVRVMTPDLRERLENLRKKPENIPQPISNTSRANLNKLLTDYTEMKKAILHVYWEEFQKDPVGLMSRVAQPASKKIDQNKLKPEMDEKGNLTTAGFACSQCGQPLFVYKLEQVSEKGKAYTNYFGRCNVAEHEKLILLAQLKPEKDSDEAVTYSLGKFGQRALDFYSIHVTKESTHPVKPLAQIAGNRYASYPVGKALSDACMGTIASFLSKYQDIIIEHQKVVKGNQKRLESLRELAGKENLEYPSVTLPPQPHTKEGVDAYNEVIARVRMWVNLNLWQKLKLSRDDAKPLLRLKNFPSFPLVERQANEVDWWDMVCNVKKLINEKKEDGKVFWQNLAGYKRQEALRPYLSSEEDRKKGKKFARYQLGDLLLHLEKKHGEDWGKVYDEAWERIDKKVEGLSKHIKLEEERRSEDAQSKAALTDWLRAKASFVIEGLKEADKDEFCRCELKLQKWYGDLRGKPFAIEAENSILDISGFSKQYNCAFIWQKDGVKKLNLYLIINYFKGGKLRFKKIKPEAFEANRFYTVINKKSGEIVPMEVNFNFDDPNLIILPLAFGKRQGREFIWNDLLSLETGSLQLANGRVIEKTLYNRRTRQDEPALFVALTFERREVLDSSNIKPMNLIGVDRGENIPAVIALTDPEGCPLSRFKDSLGNPTHILRIGESYKEKQRTIQAKKEVEQRRAGGYSRKYASKAKNLADDMVRNTARDLLYYAVTQDAMLIFENLSRGFGRQGKRTFMAERQYTRMEDWLTAKLAYEGLPSKTYLSKTLAQYTSKTCSNCGFTITSADYDRVLEKLKKTATGWMTTINGKELKVEGQITYYNRYKRQNVVKDLSVELDRLSEESVNNDISSWTKGRSGEALSLLKKRFSHRPVQEKFVCLNCGFETHADEQAALNIARSWLFLRSQEYKKYQTNKTTGNTDKRAFVETWQSFYRKKLKEVWKPAV

SEQ ID NO: 48441 - protein, 978 aa, synthetic construct
  REGION 1..978: note = engineered CasX variant
QEIKRINKIRRRLVKDSNTKKAGKTGPMKTLLVRVMTPDLRERLENLRKKPENIPQPISNTSRANLNKLLTDYTEMKKAILHVYWEEFQKDPVGLMSRVAQPASKKIDQNKLKPEMDEKGNLTTAGFACSQCGQPLFVYKLEQVSEKGKAYTNYFGRCNVAEHEKLILLAQLKPEKDSDEAVTYSLGKFGQRALDFYSIHVTKESTHPVKPLAQIAGNRYASHPVGKALSDACMGTIASFLSKYQDIIIEHQKVVKGNQKRLESLRELAGKENLEYPSVTLPPQPHTKEGVDAYNEVIARVRMWVNLNLWQKLKLSRDDAKPLLRLKNFPSFPLVERQANEVDWWDMVCNVKKLINEKKEDGKVFWQNLAGYKRQEALRPYLSSEEDRKKGKKFARYQLGDLLLHLEKKHGEDWGKVYDEAWERIDKKVEGLSKHIKLEEERRSEDAQSKAALTDWLRAKASFVIEGLKEADKDEFCRCELKLQKWYGDLRGKPFAIEAENSILDISGFSKQYNCAFIWQKDGVKKLNLYLIINYFKGGKLRFKKIKPEAFEANRFYTVINKKSGEIVPMEVNFNFDDPNLIILPLAFGKRQGREFIWNDLLSLETGSLQLANGRVIEKTLYNRRTRQDEPALFVALTFERREVLDSSNIKPMNLIGVDRGENIPAVIALTDPEGCPLSRFKDSLGNPTHILRIGESYKEKQRTIQAKKEVEQRRAGGYSRKYASKAKNLADDMVRNTARDLLYYAVTQDAMLIFENLSRGFGRQGKRTFMAERQYTRMEDWLTAKLAYEGLPSKTYLSKTLAQYTSKTCSNCGFTITSADYDRVLEKLKKTATGWMTTINGKELKVEGQITYYNRYKRQNVVKDLSVELDRLSEESVNNDISSWTKGRSGEALSLLKKRFSHRPVQEKFVCLNCGFETHADEQAALNIARSWLFLRSQEYKKYQTNKTTGNTDKRAFVETWQSFYRKKLKEVWKPAV

SEQ ID NO: 48442 - protein, 978 aa, synthetic construct
  REGION 1..978: note = engineered CasX variant
QEIKRINKIRRRLVKDSNTKKAGKTGPMKTLLVRVMTPDLRERLENLRKKPENIPQPISNTSRANLNKLLTDYTEMKKAILHVYWEEFQKDPVGLMSRVAQPASKKIDQNKLKPEMDEKGNLTTAGFACSQCGQPLFVYKLEQVSEKGKAYTNYFGRCNVAEHEKLILLAQLKPEKDSDEAVTYSLGKFGQRALDFYSIHVTKESTHPVKPLAQIAGNRYASSPVGKALSDACMGTIASFLSKYQDIIIEHQKVVKGNQKRLESLRELAGKENLEYPSVTLPPQPHTKEGVDAYNEVIARVRMWVNLNLWQKLKLSRDDAKPLLRLKNFPSFPLVERQANEVDWWDMVCNVKKLINEKKEDGKVFWQNLAGYKRQEALRPYLSSEEDRKKGKKFARYQLGDLLLHLEKKHGEDWGKVYDEAWERIDKKVEGLSKHIKLEEERRSEDAQSKAALTDWLRAKASFVIEGLKEADKDEFCRCELKLQKWYGDLRGKPFAIEAENSILDISGFSKQYNCAFIWQKDGVKKLNLYLIINYFKGGKLRFKKIKPEAFEANRFYTVINKKSGEIVPMEVNFNFDDPNLIILPLAFGKRQGREFIWNDLLSLETGSLQLANGRVIEKTLYNRRTRQDEPALFVALTFERREVLDSSNIKPMNLIGVDRGENIPAVIALTDPEGCPLSRFKDSLGNPTHILRIGESYKEKQRTIQAKKEVEQRRAGGYSRKYASKAKNLADDMVRNTARDLLYYAVTQDAMLIFENLSRGFGRQGKRTFMAERQYTRMEDWLTAKLAYEGLPSKTYLSKTLAQYTSKTCSNCGFTITSADYDRVLEKLKKTATGWMTTINGKELKVEGQITYYNRYKRQNVVKDLSVELDRLSEESVNNDISSWTKGRSGEALSLLKKRFSHRPVQEKFVCLNCGFETHADEQAALNIARSWLFLRSQEYKKYQTNKTTGNTDKRAFVETWQSFYRKKLKEVWKPAV

SEQ ID NO: 48443 - protein, 978 aa, synthetic construct
  REGION 1..978: note = engineered CasX variant
QEIKRINKIRRRLVKDSNTKKAGKTGPMKTLLVRVMTPDLRERLENLRKKPENIPQPISNTSRANLNKLLTDYTEMKKAILHVYWEEFQKDPVGLMSRVAQPASKKIDQNKLKPEMDEKGNLTTAGFACSQCGQPLFVYKLEQVSEKGKAYTNYFGRCNVAEHEKLILLAQLKPEKDSDEAVTYSLGKFGQRALDFYSIHVTKESTHPVKPLAQIAGNRYASTPVGKALSDACMGTIASFLSKYQDIIIEHQKVVKGNQKRLESLRELAGKENLEYPSVTLPPQPHTKEGVDAYNEVIARVRMWVNLNLWQKLKLSRDDAKPLLRLKNFPSFPLVERQANEVDWWDMVCNVKKLINEKKEDGKVFWQNLAGYKRQEALRPYLSSEEDRKKGKKFARYQLGDLLLHLEKKHGEDWGKVYDEAWERIDKKVEGLSKHIKLEEERRSEDAQSKAALTDWLRAKASFVIEGLKEADKDEFCRCELKLQKWYGDLRGKPFAIEAENSILDISGFSKQYNCAFIWQKDGVKKLNLYLIINYFKGGKLRFKKIKPEAFEANRFYTVINKKSGEIVPMEVNFNFDDPNLIILPLAFGKRQGREFIWNDLLSLETGSLQLANGRVIEKTLYNRRTRQDEPALFVALTFERREVLDSSNIKPMNLIGVDRGENIPAVIALTDPEGCPLSRFKDSLGNPTHILRIGESYKEKQRTIQAKKEVEQRRAGGYSRKYASKAKNLADDMVRNTARDLLYYAVTQDAMLIFENLSRGFGRQGKRTFMAERQYTRMEDWLTAKLAYEGLPSKTYLSKTLAQYTSKTCSNCGFTITSADYDRVLEKLKKTATGWMTTINGKELKVEGQITYYNRYKRQNVVKDLSVELDRLSEESVNNDISSWTKGRSGEALSLLKKRFSHRPVQEKFVCLNCGFETHADEQAALNIARSWLFLRSQEYKKYQTNKTTGNTDKRAFVETWQSFYRKKLKEVWKPAV

SEQ ID NO: 48444 - protein, 978 aa, synthetic construct
  REGION 1..978: note = engineered CasX variant
QEIKRINKIRRRLVKDSNTKKAGKTGPMKTLLVRVMTPDLRERLENLRKKPENIPQPISNTSRANLNKLLTDYTEMKKAILHVYWEEFQKDPVGLMSRVAQPASKKIDQNKLKPEMDEKGNLTTAGFACSQCGQPLFVYKLEQVSEKGKAYTNYFGRCNVAEHEKLILLAQLKPEKDSDEAVTYSLGKFGQRALDFYSIHVTKESTHPVKPLAQIAGNRYASAPVGKALSDACMGTIASFLSKYQDIIIEHQKVVKGNQKRLESLRELAGKENLEYPSVTLPPQPHTKEGVDAYNEVIARVRMWVNLNLWQKLKLSRDDAKPLLRLKNFPSFPLVERQANEVDWWDMVCNVKKLINEKKEDGKVFWQNLAGYKRQEALRPYLSSEEDRKKGKKFARYQLGDLLLHLEKKHGEDWGKVYDEAWERIDKKVEGLSKHIKLEEERRSEDAQSKAALTDWLRAKASFVIEGLKEADKDEFCRCELKLQKWYGDLRGKPFAIEAENSILDISGFSKQYNCAFIWQKDGVKKLNLYLIINYFKGGKLRFKKIKPEAFEANRFYTVINKKSGEIVPMEVNFNFDDPNLIILPLAFGKRQGREFIWNDLLSLETGSLQLANGRVIEKTLYNRRTRQDEPALFVALTFERREVLDSSNIKPMNLIGVDRGENIPAVIALTDPEGCPLSRFKDSLGNPTHILRIGESYKEKQRTIQAKKEVEQRRAGGYSRKYASKAKNLADDMVRNTARDLLYYAVTQDAMLIFENLSRGFGRQGKRTFMAERQYTRMEDWLTAKLAYEGLPSKTYLSKTLAQYTSKTCSNCGFTITSADYDRVLEKLKKTATGWMTTINGKELKVEGQITYYNRYKRQNVVKDLSVELDRLSEESVNNDISSWTKGRSGEALSLLKKRFSHRPVQEKFVCLNCGFETHADEQAALNIARSWLFLRSQEYKKYQTNKTTGNTDKRAFVETWQSFYRKKLKEVWKPAV

SEQ ID NO: 48445 - protein, 978 aa, synthetic construct
  REGION 1..978: note = engineered CasX variant
QEIKRINKIRRRLVKDSNTKKAGKTGPMKTLLVRVMTPDLRERLENLRKKPENIPQPISNTSRANLNKLLTDYTEMKKAILHVYWEEFQKDPVGLMSRVAQPASKKIDQNKLKPEMDEKGNLTTAGFACSQCGQPLFVYKLEQVSEKGKAYTNYFGRCNVAEHEKLILLAQLKPEKDSDEAVTYSLGKFGQRALDFYSIHVTKESTHPVKPLAQIAGNRYASVPVGKALSDACMGTIASFLSKYQDIIIEHQKVVKGNQKRLESLRELAGKENLEYPSVTLPPQPHTKEGVDAYNEVIARVRMWVNLNLWQKLKLSRDDAKPLLRLKNFPSFPLVERQANEVDWWDMVCNVKKLINEKKEDGKVFWQNLAGYKRQEALRPYLSSEEDRKKGKKFARYQLGDLLLHLEKKHGEDWGKVYDEAWERIDKKVEGLSKHIKLEEERRSEDAQSKAALTDWLRAKASFVIEGLKEADKDEFCRCELKLQKWYGDLRGKPFAIEAENSILDISGFSKQYNCAFIWQKDGVKKLNLYLIINYFKGGKLRFKKIKPEAFEANRFYTVINKKSGEIVPMEVNFNFDDPNLIILPLAFGKRQGREFIWNDLLSLETGSLQLANGRVIEKTLYNRRTRQDEPALFVALTFERREVLDSSNIKPMNLIGVDRGENIPAVIALTDPEGCPLSRFKDSLGNPTHILRIGESYKEKQRTIQAKKEVEQRRAGGYSRKYASKAKNLADDMVRNTARDLLYYAVTQDAMLIFENLSRGFGRQGKRTFMAERQYTRMEDWLTAKLAYEGLPSKTYLSKTLAQYTSKTCSNCGFTITSADYDRVLEKLKKTATGWMTTINGKELKVEGQITYYNRYKRQNVVKDLSVELDRLSEESVNNDISSWTKGRSGEALSLLKKRFSHRPVQEKFVCLNCGFETHADEQAALNIARSWLFLRSQEYKKYQTNKTTGNTDKRAFVETWQSFYRKKLKEVWKPAV

SEQ ID NO: 48446 - protein, 978 aa, synthetic construct
  REGION 1..978: note = engineered CasX variant
QEIKRINKIRRRLVKDSNTKKAGKTGPMKTLLVRVMTPDLRERLENLRKKPENIPQPISNTSRANLNKLLTDYTEMKKAILHVYWEEFQKDPVGLMSRVAQPASKKIDQNKLKPEMDEKGNLTTAGFACSQCGQPLFVYKLEQVSEKGKAYTNYFGRCNVAEHEKLIKLAQLKPEKDSDEAVTYSLGKFGQRALDFYSIHVTKESTHPVKPLAQIAGNRYASGPVGKALSDACMGTIASFLSKYQDIIIEHQKVVKGNQKRLESLRELAGKENLEYPSVTLPPQPHTKEGVDAYNEVIARVRMWVNLNLWQKLKLSRDDAKPLLRLKNFPSFPLVERQANEVDWWDMVCNVKKLINEKKEDGKVFWQNLAGYKRQEALRPYLSSEEDRKKGKKFARYQLGDLLLHLEKKHGEDWGKVYDEAWERIDKKVEGLSKHIKLEEERRSEDAQSKAALTDWLRAKASFVIEGLKEADKDEFCRCELKLQKWYGDLRGKPFAIEAENSILDISGFSKQYNCAFIWQKDGVKKLNLYLIINYFKGGKLRFKKIKPEAFEANRFYTVINKKSGEIVPMEVNFNFDDPNLIILPLAFGKRQGREFIWNDLLSLETGSLQLANGRVIEKTLYNRRTRQDEPALFVALTFERREVLDSSNIKPMNLIGVDRGENIPAVIALTDPEGCPLSRFKDSLGNPTHILRIGESYKEKQRTIQAKKEVEQRRAGGYSRKYASKAKNLADDMVRNTARDLLYYAVTQDAMLIFENLSRGFGRQGKRTFMAERQYTRMEDWLTAKLAYEGLPSKTYLSKTLAQYTSKTCSNCGFTITSADYDRVLEKLKKTATGWMTTINGKELKVEGQITYYNRYKRQNVVKDLSVELDRLSEESVNNDISSWTKGRSGEALSLLKKRFSHRPVQEKFVCLNCGFETHADEQAALNIARSWLFLRSQEYKKYQTNKTTGNTDKRAFVETWQSFYRKKLKEVWKPAV

SEQ ID NO: 48447 - protein, 977 aa, synthetic construct
  REGION 1..977: note = engineered CasX variant
QEIKRINKIRRRLVKDSNTKKAGKTGPMKTLLVRVMTPDLRERLENLRKKPENIPQPISNTSRANLNKLLTDYTEMKKAILHVYWEEFQKDPVGLMSRVAQPASKKIDQNKLKPEMDEKGNLTTAGFACSQCGQPLFVYKLEQVSEKGKAYTNYFGRCNVAEHEKLILLAQLKPEKDSDEAVTYSLGKFGQRALDFYSIHVTKESTHPVKPLAQIAGNRYASPVGKALSDACMGTIASFLSKYQDIIIEHQKVVKGNQKRLESLRELAGKENLEYPSVTLPPQPHTKEGVDAYNEVIARVRMWVNLNLWQKLKLSRDDAKPLLRLKNFPSFPLVERQANEVDWWDMVCNVKKLINEKKEDGKVFWQNLAGYKRQEALRPYLSSEEDRKKGKKFARYQLGDLLLHLEKKHGEDWGKVYDEAWERIDKKVEGLSKHIKLEEERRSEDAQSKAALTDWLRAKASFVIEGLKEADKDEFCRCELKLQKWYGDLRGKPFAIEAENSILDISGFSKQYNCAFIWQKDGVKKLNLYLIINYFKGGKLRFKKIKPEAFEANRFYTVINKKSGEIVPMEVNFNFDDPNLIILPLAFGKRQGREFIWNDLLSLETGSLQLANGRVIEKTLYNRRTRQDEPALFVALTFERREVLDSSNIKPMNLIGVDRGENIPAVIALTDPEGCPLSRFKDSLGNPTHILRIGESYKEKQRTIQAKKEVEQRRAGGYSRKYASKAKNLADDMVRNTARDLLYYAVTQDAMLIFENLSRGFGRQGKRTFMAERQYTRMEDWLTAKLAYEGLPSKTYLSKTLAQYTSKTCSNCGFTITSADYDRVLEKLKKTATGWMTTINGKELKVEGQITYYNRYKRQNVVKDLSVELDRLSEESVNNDISSWTKGRSGEALSLLKKRFSHRPVQEKFVCLNCGFETHADEQAALNIARSWLFLRSQEYKKYQTNKTTGNTDKRAFVETWQSFYRKKLKEVWKPAV

SEQ ID NO: 48448 - protein, 978 aa, synthetic construct
  REGION 1..978: note = engineered CasX variant
QEIKRINKIRRRLVKDSNTKKAGKTGPMKTLLVRVMTPDLRERLENLRKKPENIPQPISNTSRANLNKLLTDYTEMKKAILHVYWEEFQKDPVGLMSRVAQPASKKIDQNKLKPEMDEKGNLTTAGFACSQCGQPLFVYKLEQVSEKGKAYTNYFGRCNVAEHEKLILLAQLKPEKDSDEAVTYSLGKFGQRALDFYSIHVTKESTHPVKPLAQIAGNRYASYPVGKALSDACMGTIASFLSKYQDIIIEHQKVVKGNQKRLESLRELAGKENLEYPSVTLPPQPHTKEGVDAYNEVIARVRMWVNLNLWQKLKLSRDDAKPLLRLKGFPSFPLVERQANEVDWWDMVCNVKKLINEKKEDGKVFWQNLAGYKRQEALRPYLSSEEDRKKGKKFARYQLGDLLNHLEKKHGEDWGKVYDEAWERIDKKVEGLSKHIKLEEERRSEDAQSKAALTDWLRAKASFVIEGLKEADKDEFCRCELKLQKWYGDLRGKPFAIEAENSILDISGFSKQYNCAFIWQKDGVKKLNLYLIINYFKGGKLRFKKIKPEAFEANRFYTVINKKSGEIVPMEVNFNFDDPNLIILPLAFGKRQGREFIWNDLLSLETGSLQLANGRVIEKTLYNRRTRQDEPALFVALTFERREVLDSSNIKPMNLIGVDRGENIPAVIALTDPEGCPLSRFKDSLGNPTHILRIGESYKEKQRTIQAKKEVEQRRAGGYSRKYASKAKNLADDMVRNTARDLLYYAVTQDAMLIFENLSRGFGRQGKRTFMAERQYTRMEDWLTAKLAYEGLPSKTYLSKTLAQYTSKTCSNCGFTITSADYDRVLEKLKKTATGWMTTINGKELKVEGQITYYNRYKRQNVVKDLSVELDRLSEESVNNDISSWTKGRSGEALSLLKKRFSHRPVQEKFVCLNCGFETHADEQAALNIARSWLFLRSQEYKKYQTNKTTGNTDKRAFVETWQSFYRKKLKEVWKPAV

SEQ ID NO: 48449 - protein, 978 aa, synthetic construct
  REGION 1..978: note = engineered CasX variant
QEIKRINKIRRRLVKDSNTKKAGKTGPMKTLLVRVMTPDLRERLENLRKKPENIPQPISNTSRANLNKLLTDYTEMKKAILHVYWEEFQKDPVGLMSRVAQPASKKIDQNKLKPEMDEKGNLTTAGFACSQCGQPLFVYKLEQVSEKGKAYTNYFGRCNVAEHEKLILLAQLKPEKDSDEAVTYSLGKFGQRALDFYSIHVTKESTHPVKPLAQIAGNRYASHPVGKALSDACMGTIASFLSKYQDIIIEHQKVVKGNQKRLESLRELAGKENLEYPSVTLPPQPHTKEGVDAYNEVIARVRMWVNLNLWQKLKLSRDDAKPLLRLKGFPSFPLVERQANEVDWWDMVCNVKKLINEKKEDGKVFWQNLAGYKRQEALRPYLSSEEDRKKGKKFARYQLGDLLNHLEKKHGEDWGKVYDEAWERIDKKVEGLSKHIKLEEERRSEDAQSKAALTDWLRAKASFVIEGLKEADKDEFCRCELKLQKWYGDLRGKPFAIEAENSILDISGFSKQYNCAFIWQKDGVKKLNLYLIINYFKGGKLRFKKIKPEAFEANRFYTVINKKSGEIVPMEVNFNFDDPNLIILPLAFGKRQGREFIWNDLLSLETGSLQLANGRVIEKTLYNRRTRQDEPALFVALTFERREVLDSSNIKPMNLIGVDRGENIPAVIALTDPEGCPLSRFKDSLGNPTHILRIGESYKEKQRTIQAKKEVEQRRAGGYSRKYASKAKNLADDMVRNTARDLLYYAVTQDAMLIFENLSRGFGRQGKRTFMAERQYTRMEDWLTAKLAYEGLPSKTYLSKTLAQYTSKTCSNCGFTITSADYDRVLEKLKKTATGWMTTINGKELKVEGQITYYNRYKRQNVVKDLSVELDRLSEESVNNDISSWTKGRSGEALSLLKKRFSHRPVQEKFVCLNCGFETHADEQAALNIARSWLFLRSQEYKKYQTNKTTGNTDKRAFVETWQSFYRKKLKEVWKPAV

SEQ ID NO: 48450 - protein, 978 aa, synthetic construct
  REGION 1..978: note = engineered CasX variant
QEIKRINKIRRRLVKDSNTKKAGKTGPMKTLLVRVMTPDLRERLENLRKKPENIPQPISNTSRANLNKLLTDYTEMKKAILHVYWEEFQKDPVGLMSRVAQPASKKIDQNKLKPEMDEKGNLTTAGFACSQCGQPLFVYKLEQVSEKGKAYTNYFGRCNVAEHEKLILLAQLKPEKDSDEAVTYSLGKFGQRALDFYSIHVTKESTHPVKPLAQIAGNRYASSPVGKALSDACMGTIASFLSKYQDIIIEHQKVVKGNQKRLESLRELAGKENLEYPSVTLPPQPHTKEGVDAYNEVIARVRMWVNLNLWQKLKLSRDDAKPLLRLKGFPSFPLVERQANEVDWWDMVCNVKKLINEKKEDGKVFWQNLAGYKRQEALRPYLSSEEDRKKGKKFARYQLGDLLNHLEKKHGEDWGKVYDEAWERIDKKVEGLSKHIKLEEERRSEDAQSKAALTDWLRAKASFVIEGLKEADKDEFCRCELKLQKWYGDLRGKPFAIEAENSILDISGFSKQYNCAFIWQKDGVKKLNLYLIINYFKGGKLRFKKIKPEAFEANRFYTVINKKSGEIVPMEVNFNFDDPNLIILPLAFGKRQGREFIWNDLLSLETGSLQLANGRVIEKTLYNRRTRQDEPALFVALTFERREVLDSSNIKPMNLIGVDRGENIPAVIALTDPEGCPLSRFKDSLGNPTHILRIGESYKEKQRTIQAKKEVEQRRAGGYSRKYASKAKNLADDMVRNTARDLLYYAVTQDAMLIFENLSRGFGRQGKRTFMAERQYTRMEDWLTAKLAYEGLPSKTYLSKTLAQYTSKTCSNCGFTITSADYDRVLEKLKKTATGWMTTINGKELKVEGQITYYNRYKRQNVVKDLSVELDRLSEESVNNDISSWTKGRSGEALSLLKKRFSHRPVQEKFVCLNCGFETHADEQAALNIARSWLFLRSQEYKKYQTNKTTGNTDKRAFVETWQSFYRKKLKEVWKPAV

SEQ ID NO: 48451 - protein, 978 aa, synthetic construct
  REGION 1..978: note = engineered CasX variant
QEIKRINKIRRRLVKDSNTKKAGKTGPMKTLLVRVMTPDLRERLENLRKKPENIPQPISNTSRANLNKLLTDYTEMKKAILHVYWEEFQKDPVGLMSRVAQPASKKIDQNKLKPEMDEKGNLTTAGFACSQCGQPLFVYKLEQVSEKGKAYTNYFGRCNVAEHEKLILLAQLKPEKDSDEAVTYSLGKFGQRALDFYSIHVTKESTHPVKPLAQIAGNRYASTPVGKALSDACMGTIASFLSKYQDIIIEHQKVVKGNQKRLESLRELAGKENLEYPSVTLPPQPHTKEGVDAYNEVIARVRMWVNLNLWQKLKLSRDDAKPLLRLKGFPSFPLVERQANEVDWWDMVCNVKKLINEKKEDGKVFWQNLAGYKRQEALRPYLSSEEDRKKGKKFARYQLGDLLNHLEKKHGEDWGKVYDEAWERIDKKVEGLSKHIKLEEERRSEDAQSKAALTDWLRAKASFVIEGLKEADKDEFCRCELKLQKWYGDLRGKPFAIEAENSILDISGFSKQYNCAFIWQKDGVKKLNLYLIINYFKGGKLRFKKIKPEAFEANRFYTVINKKSGEIVPMEVNFNFDDPNLIILPLAFGKRQGREFIWNDLLSLETGSLQLANGRVIEKTLYNRRTRQDEPALFVALTFERREVLDSSNIKPMNLIGVDRGENIPAVIALTDPEGCPLSRFKDSLGNPTHILRIGESYKEKQRTIQAKKEVEQRRAGGYSRKYASKAKNLADDMVRNTARDLLYYAVTQDAMLIFENLSRGFGRQGKRTFMAERQYTRMEDWLTAKLAYEGLPSKTYLSKTLAQYTSKTCSNCGFTITSADYDRVLEKLKKTATGWMTTINGKELKVEGQITYYNRYKRQNVVKDLSVELDRLSEESVNNDISSWTKGRSGEALSLLKKRFSHRPVQEKFVCLNCGFETHADEQAALNIARSWLFLRSQEYKKYQTNKTTGNTDKRAFVETWQSFYRKKLKEVWKPAV

SEQ ID NO: 48452 - protein, 978 aa, synthetic construct
  REGION 1..978: note = engineered CasX variant
QEIKRINKIRRRLVKDSNTKKAGKTGPMKTLLVRVMTPDLRERLENLRKKPENIPQPISNTSRANLNKLLTDYTEMKKAILHVYWEEFQKDPVGLMSRVAQPASKKIDQNKLKPEMDEKGNLTTAGFACSQCGQPLFVYKLEQVSEKGKAYTNYFGRCNVAEHEKLILLAQLKPEKDSDEAVTYSLGKFGQRALDFYSIHVTKESTHPVKPLAQIAGNRYASAPVGKALSDACMGTIASFLSKYQDIIIEHQKVVKGNQKRLESLRELAGKENLEYPSVTLPPQPHTKEGVDAYNEVIARVRMWVNLNLWQKLKLSRDDAKPLLRLKGFPSFPLVERQANEVDWWDMVCNVKKLINEKKEDGKVFWQNLAGYKRQEALRPYLSSEEDRKKGKKFARYQLGDLLNHLEKKHGEDWGKVYDEAWERIDKKVEGLSKHIKLEEERRSEDAQSKAALTDWLRAKASFVIEGLKEADKDEFCRCELKLQKWYGDLRGKPFAIEAENSILDISGFSKQYNCAFIWQKDGVKKLNLYLIINYFKGGKLRFKKIKPEAFEANRFYTVINKKSGEIVPMEVNFNFDDPNLIILPLAFGKRQGREFIWNDLLSLETGSLQLANGRVIEKTLYNRRTRQDEPALFVALTFERREVLDSSNIKPMNLIGVDRGENIPAVIALTDPEGCPLSRFKDSLGNPTHILRIGESYKEKQRTIQAKKEVEQRRAGGYSRKYASKAKNLADDMVRNTARDLLYYAVTQDAMLIFENLSRGFGRQGKRTFMAERQYTRMEDWLTAKLAYEGLPSKTYLSKTLAQYTSKTCSNCGFTITSADYDRVLEKLKKTATGWMTTINGKELKVEGQITYYNRYKRQNVVKDLSVELDRLSEESVNNDISSWTKGRSGEALSLLKKRFSHRPVQEKFVCLNCGFETHADEQAALNIARSWLFLRSQEYKKYQTNKTTGNTDKRAFVETWQSFYRKKLKEVWKPAV

SEQ ID NO: 48453 - protein, 978 aa, synthetic construct
  REGION 1..978: note = engineered CasX variant
QEIKRINKIRRRLVKDSNTKKAGKTGPMKTLLVRVMTPDLRERLENLRKKPENIPQPISNTSRANLNKLLTDYTEMKKAILHVYWEEFQKDPVGLMSRVAQPASKKIDQNKLKPEMDEKGNLTTAGFACSQCGQPLFVYKLEQVSEKGKAYTNYFGRCNVAEHEKLILLAQLKPEKDSDEAVTYSLGKFGQRALDFYSIHVTKESTHPVKPLAQIAGNRYASVPVGKALSDACMGTIASFLSKYQDIIIEHQKVVKGNQKRLESLRELAGKENLEYPSVTLPPQPHTKEGVDAYNEVIARVRMWVNLNLWQKLKLSRDDAKPLLRLKGFPSFPLVERQANEVDWWDMVCNVKKLINEKKEDGKVFWQNLAGYKRQEALRPYLSSEEDRKKGKKFARYQLGDLLNHLEKKHGEDWGKVYDEAWERIDKKVEGLSKHIKLEEERRSEDAQSKAALTDWLRAKASFVIEGLKEADKDEFCRCELKLQKWYGDLRGKPFAIEAENSILDISGFSKQYNCAFIWQKDGVKKLNLYLIINYFKGGKLRFKKIKPEAFEANRFYTVINKKSGEIVPMEVNFNFDDPNLIILPLAFGKRQGREFIWNDLLSLETGSLQLANGRVIEKTLYNRRTRQDEPALFVALTFERREVLDSSNIKPMNLIGVDRGENIPAVIALTDPEGCPLSRFKDSLGNPTHILRIGESYKEKQRTIQAKKEVEQRRAGGYSRKYASKAKNLADDMVRNTARDLLYYAVTQDAMLIFENLSRGFGRQGKRTFMAERQYTRMEDWLTAKLAYEGLPSKTYLSKTLAQYTSKTCSNCGFTITSADYDRVLEKLKKTATGWMTTINGKELKVEGQITYYNRYKRQNVVKDLSVELDRLSEESVNNDISSWTKGRSGEALSLLKKRFSHRPVQEKFVCLNCGFETHADEQAALNIARSWLFLRSQEYKKYQTNKTTGNTDKRAFVETWQSFYRKKLKEVWKPAV

SEQ ID NO: 48454 - protein, 978 aa, synthetic construct
  REGION 1..978: note = engineered CasX variant
QEIKRINKIRRRLVKDSNTKKAGKTGPMKTLLVRVMTPDLRERLENLRKKPENIPQPISNTSRANLNKLLTDYTEMKKAILHVYWEEFQKDPVGLMSRVAQPASKKIDQNKLKPEMDEKGNLTTAGFACSQCGQPLFVYKLEQVSEKGKAYTNYFGRCNVAEHEKLIKLAQLKPEKDSDEAVTYSLGKFGQRALDFYSIHVTKESTHPVKPLAQIAGNRYASGPVGKALSDACMGTIASFLSKYQDIIIEHQKVVKGNQKRLESLRELAGKENLEYPSVTLPPQPHTKEGVDAYNEVIARVRMWVNLNLWQKLKLSRDDAKPLLRLKGFPSFPLVERQANEVDWWDMVCNVKKLINEKKEDGKVFWQNLAGYKRQEALRPYLSSEEDRKKGKKFARYQLGDLLNHLEKKHGEDWGKVYDEAWERIDKKVEGLSKHIKLEEERRSEDAQSKAALTDWLRAKASFVIEGLKEADKDEFCRCELKLQKWYGDLRGKPFAIEAENSILDISGFSKQYNCAFIWQKDGVKKLNLYLIINYFKGGKLRFKKIKPEAFEANRFYTVINKKSGEIVPMEVNFNFDDPNLIILPLAFGKRQGREFIWNDLLSLETGSLQLANGRVIEKTLYNRRTRQDEPALFVALTFERREVLDSSNIKPMNLIGVDRGENIPAVIALTDPEGCPLSRFKDSLGNPTHILRIGESYKEKQRTIQAKKEVEQRRAGGYSRKYASKAKNLADDMVRNTARDLLYYAVTQDAMLIFENLSRGFGRQGKRTFMAERQYTRMEDWLTAKLAYEGLPSKTYLSKTLAQYTSKTCSNCGFTITSADYDRVLEKLKKTATGWMTTINGKELKVEGQITYYNRYKRQNVVKDLSVELDRLSEESVNNDISSWTKGRSGEALSLLKKRFSHRPVQEKFVCLNCGFETHADEQAALNIARSWLFLRSQEYKKYQTNKTTGNTDKRAFVETWQSFYRKKLKEVWKPAV

SEQ ID NO: 48455 - protein, 977 aa, synthetic construct
  REGION 1..977: note = engineered CasX variant
QEIKRINKIRRRLVKDSNTKKAGKTGPMKTLLVRVMTPDLRERLENLRKKPENIPQPISNTSRANLNKLLTDYTEMKKAILHVYWEEFQKDPVGLMSRVAQPASKKIDQNKLKPEMDEKGNLTTAGFACSQCGQPLFVYKLEQVSEKGKAYTNYFGRCNVAEHEKLILLAQLKPEKDSDEAVTYSLGKFGQRALDFYSIHVTKESTHPVKPLAQIAGNRYASPVGKALSDACMGTIASFLSKYQDIIIEHQKVVKGNQKRLESLRELAGKENLEYPSVTLPPQPHTKEGVDAYNEVIARVRMWVNLNLWQKLKLSRDDAKPLLRLKGFPSFPLVERQANEVDWWDMVCNVKKLINEKKEDGKVFWQNLAGYKRQEALRPYLSSEEDRKKGKKFARYQLGDLLNHLEKKHGEDWGKVYDEAWERIDKKVEGLSKHIKLEEERRSEDAQSKAALTDWLRAKASFVIEGLKEADKDEFCRCELKLQKWYGDLRGKPFAIEAENSILDISGFSKQYNCAFIWQKDGVKKLNLYLIINYFKGGKLRFKKIKPEAFEANRFYTVINKKSGEIVPMEVNFNFDDPNLIILPLAFGKRQGREFIWNDLLSLETGSLQLANGRVIEKTLYNRRTRQDEPALFVALTFERREVLDSSNIKPMNLIGVDRGENIPAVIALTDPEGCPLSRFKDSLGNPTHILRIGESYKEKQRTIQAKKEVEQRRAGGYSRKYASKAKNLADDMVRNTARDLLYYAVTQDAMLIFENLSRGFGRQGKRTFMAERQYTRMEDWLTAKLAYEGLPSKTYLSKTLAQYTSKTCSNCGFTITSADYDRVLEKLKKTATGWMTTINGKELKVEGQITYYNRYKRQNVVKDLSVELDRLSEESVNNDISSWTKGRSGEALSLLKKRFSHRPVQEKFVCLNCGFETHADEQAALNIARSWLFLRSQEYKKYQTNKTTGNTDKRAFVETWQSFYRKKLKEVWKPAV

SEQ ID NO: 48456 - protein, 978 aa, synthetic construct
  REGION 1..978: note = engineered CasX variant
QEIKRINKIRRRLVKDSNTKKAGKTGPMKTLLVRVMTPDLRERLENLRKKPENIPQPISNTSRANLNKLLTDYTEMKKAILHVYWEEFQKDPVGLMSRVAQPASKKIDQNKLKPEMDEKGNLTTAGFACSQCGQPLFVYKLEQVSEKGKAYTNYFGRCNVAEHEKLILLAQLKPEKDSDEAVTYSLGKFGQRALDFYSIHVTKESTHPVKPLAQIAGNRYASYPVGKALSDACMGTIASFLSKYQDIIIEHQKVVKGNQKRLESLRELAGKENLEYPSVTLPPQPHTKEGVDAYNEVIARVRMWVNLNLWQKLKLSRDDAKPLLRLKGFPSFPLVERQANEVDWWDMVCNVKKLINEKKEDGKVFWQNLAGYKRQEALRPYLSSEEDRKKGKKFARYQLGDLLWHLEKKHGEDWGKVYDEAWERIDKKVEGLSKHIKLEEERRSEDAQSKAALTDWLRAKASFVIEGLKEADKDEFCRCELKLQKWYGDLRGKPFAIEAENSILDISGFSKQYNCAFIWQKDGVKKLNLYLIINYFKGGKLRFKKIKPEAFEANRFYTVINKKSGEIVPMEVNFNFDDPNLIILPLAFGKRQGREFIWNDLLSLETGSLQLANGRVIEKTLYNRRTRQDEPALFVALTFERREVLDSSNIKPMNLIGVDRGENIPAVIALTDPEGCPLSRFKDSLGNPTHILRIGESYKEKQRTIQAKKEVEQRRAGGYSRKYASKAKNLADDMVRNTARDLLYYAVTQDAMLIFENLSRGFGRQGKRTFMAERQYTRMEDWLTAKLAYEGLPSKTYLSKTLAQYTSKTCSNCGFTITSADYDRVLEKLKKTATGWMTTINGKELKVEGQITYYNRYKRQNVVKDLSVELDRLSEESVNNDISSWTKGRSGEALSLLKKRFSHRPVQEKFVCLNCGFETHADEQAALNIARSWLFLRSQEYKKYQTNKTTGNTDKRAFVETWQSFYRKKLKEVWKPAV

SEQ ID NO: 48457 - protein, 978 aa, synthetic construct
  REGION 1..978: note = engineered CasX variant
QEIKRINKIRRRLVKDSNTKKAGKTGPMKTLLVRVMTPDLRERLENLRKKPENIPQPISNTSRANLNKLLTDYTEMKKAILHVYWEEFQKDPVGLMSRVAQPASKKIDQNKLKPEMDEKGNLTTAGFACSQCGQPLFVYKLEQVSEKGKAYTNYFGRCNVAEHEKLILLAQLKPEKDSDEAVTYSLGKFGQRALDFYSIHVTKESTHPVKPLAQIAGNRYASHPVGKALSDACMGTIASFLSKYQDIIIEHQKVVKGNQKRLESLRELAGKENLEYPSVTLPPQPHTKEGVDAYNEVIARVRMWVNLNLWQKLKLSRDDAKPLLRLKGFPSFPLVERQANEVDWWDMVCNVKKLINEKKEDGKVFWQNLAGYKRQEALRPYLSSEEDRKKGKKFARYQLGDLLWHLEKKHGEDWGKVYDEAWERIDKKVEGLSKHIKLEEERRSEDAQSKAALTDWLRAKASFVIEGLKEADKDEFCRCELKLQKWYGDLRGKPFAIEAENSILDISGFSKQYNCAFIWQKDGVKKLNLYLIINYFKGGKLRFKKIKPEAFEANRFYTVINKKSGEIVPMEVNFNFDDPNLIILPLAFGKRQGREFIWNDLLSLETGSLQLANGRVIEKTLYNRRTRQDEPALFVALTFERREVLDSSNIKPMNLIGVDRGENIPAVIALTDPEGCPLSRFKDSLGNPTHILRIGESYKEKQRTIQAKKEVEQRRAGGYSRKYASKAKNLADDMVRNTARDLLYYAVTQDAMLIFENLSRGFGRQGKRTFMAERQYTRMEDWLTAKLAYEGLPSKTYLSKTLAQYTSKTCSNCGFTITSADYDRVLEKLKKTATGWMTTINGKELKVEGQITYYNRYKRQNVVKDLSVELDRLSEESVNNDISSWTKGRSGEALSLLKKRFSHRPVQEKFVCLNCGFETHADEQAALNIARSWLFLRSQEYKKYQTNKTTGNTDKRAFVETWQSFYRKKLKEVWKPAV

SEQ ID NO: 48458 - protein, 978 aa, synthetic construct
  REGION 1..978: note = engineered CasX variant
QEIKRINKIRRRLVKDSNTKKAGKTGPMKTLLVRVMTPDLRERLENLRKKPENIPQPISNTSRANLNKLLTDYTEMKKAILHVYWEEFQKDPVGLMSRVAQPASKKIDQNKLKPEMDEKGNLTTAGFACSQCGQPLFVYKLEQVSEKGKAYTNYFGRCNVAEHEKLILLAQLKPEKDSDEAVTYSLGKFGQRALDFYSIHVTKESTHPVKPLAQIAGNRYASSPVGKALSDACMGTIASFLSKYQDIIIEHQKVVKGNQKRLESLRELAGKENLEYPSVTLPPQPHTKEGVDAYNEVIARVRMWVNLNLWQKLKLSRDDAKPLLRLKGFPSFPLVERQANEVDWWDMVCNVKKLINEKKEDGKVFWQNLAGYKRQEALRPYLSSEEDRKKGKKFARYQLGDLLWHLEKKHGEDWGKVYDEAWERIDKKVEGLSKHIKLEEERRSEDAQSKAALTDWLRAKASFVIEGLKEADKDEFCRCELKLQKWYGDLRGKPFAIEAENSILDISGFSKQYNCAFIWQKDGVKKLNLYLIINYFKGGKLRFKKIKPEAFEANRFYTVINKKSGEIVPMEVNFNFDDPNLIILPLAFGKRQGREFIWNDLLSLETGSLQLANGRVIEKTLYNRRTRQDEPALFVALTFERREVLDSSNIKPMNLIGVDRGENIPAVIALTDPEGCPLSRFKDSLGNPTHILRIGESYKEKQRTIQAKKEVEQRRAGGYSRKYASKAKNLADDMVRNTARDLLYYAVTQDAMLIFENLSRGFGRQGKRTFMAERQYTRMEDWLTAKLAYEGLPSKTYLSKTLAQYTSKTCSNCGFTITSADYDRVLEKLKKTATGWMTTINGKELKVEGQITYYNRYKRQNVVKDLSVELDRLSEESVNNDISSWTKGRSGEALSLLKKRFSHRPVQEKFVCLNCGFETHADEQAALNIARSWLFLRSQEYKKYQTNKTTGNTDKRAFVETWQSFYRKKLKEVWKPAV

SEQ ID NO: 48459 - protein, 978 aa, synthetic construct
  REGION 1..978: note = engineered CasX variant
QEIKRINKIRRRLVKDSNTKKAGKTGPMKTLLVRVMTPDLRERLENLRKKPENIPQPISNTSRANLNKLLTDYTEMKKAILHVYWEEFQKDPVGLMSRVAQPASKKIDQNKLKPEMDEKGNLTTAGFACSQCGQPLFVYKLEQVSEKGKAYTNYFGRCNVAEHEKLILLAQLKPEKDSDEAVTYSLGKFGQRALDFYSIHVTKESTHPVKPLAQIAGNRYASTPVGKALSDACMGTIASFLSKYQDIIIEHQKVVKGNQKRLESLRELAGKENLEYPSVTLPPQPHTKEGVDAYNEVIARVRMWVNLNLWQKLKLSRDDAKPLLRLKGFPSFPLVERQANEVDWWDMVCNVKKLINEKKEDGKVFWQNLAGYKRQEALRPYLSSEEDRKKGKKFARYQLGDLLWHLEKKHGEDWGKVYDEAWERIDKKVEGLSKHIKLEEERRSEDAQSKAALTDWLRAKASFVIEGLKEADKDEFCRCELKLQKWYGDLRGKPFAIEAENSILDISGFSKQYNCAFIWQKDGVKKLNLYLIINYFKGGKLRFKKIKPEAFEANRFYTVINKKSGEIVPMEVNFNFDDPNLIILPLAFGKRQGREFIWNDLLSLETGSLQLANGRVIEKTLYNRRTRQDEPALFVALTFERREVLDSSNIKPMNLIGVDRGENIPAVIALTDPEGCPLSRFKDSLGNPTHILRIGESYKEKQRTIQAKKEVEQRRAGGYSRKYASKAKNLADDMVRNTARDLLYYAVTQDAMLIFENLSRGFGRQGKRTFMAERQYTRMEDWLTAKLAYEGLPSKTYLSKTLAQYTSKTCSNCGFTITSADYDRVLEKLKKTATGWMTTINGKELKVEGQITYYNRYKRQNVVKDLSVELDRLSEESVNNDISSWTKGRSGEALSLLKKRFSHRPVQEKFVCLNCGFETHADEQAALNIARSWLFLRSQEYKKYQTNKTTGNTDKRAFVETWQSFYRKKLKEVWKPAV

SEQ ID NO: 48460 - protein, 978 aa, synthetic construct
  REGION 1..978: note = engineered CasX variant
QEIKRINKIRRRLVKDSNTKKAGKTGPMKTLLVRVMTPDLRERLENLRKKPENIPQPISNTSRANLNKLLTDYTEMKKAILHVYWEEFQKDPVGLMSRVAQPASKKIDQNKLKPEMDEKGNLTTAGFACSQCGQPLFVYKLEQVSEKGKAYTNYFGRCNVAEHEKLILLAQLKPEKDSDEAVTYSLGKFGQRALDFYSIHVTKESTHPVKPLAQIAGNRYASAPVGKALSDACMGTIASFLSKYQDIIIEHQKVVKGNQKRLESLRELAGKENLEYPSVTLPPQPHTKEGVDAYNEVIARVRMWVNLNLWQKLKLSRDDAKPLLRLKGFPSFPLVERQANEVDWWDMVCNVKKLINEKKEDGKVFWQNLAGYKRQEALRPYLSSEEDRKKGKKFARYQLGDLLWHLEKKHGEDWGKVYDEAWERIDKKVEGLSKHIKLEEERRSEDAQSKAALTDWLRAKASFVIEGLKEADKDEFCRCELKLQKWYGDLRGKPFAIEAENSILDISGFSKQYNCAFIWQKDGVKKLNLYLIINYFKGGKLRFKKIKPEAFEANRFYTVINKKSGEIVPMEVNFNFDDPNLIILPLAFGKRQGREFIWNDLLSLETGSLQLANGRVIEKTLYNRRTRQDEPALFVALTFERREVLDSSNIKPMNLIGVDRGENIPAVIALTDPEGCPLSRFKDSLGNPTHILRIGESYKEKQRTIQAKKEVEQRRAGGYSRKYASKAKNLADDMVRNTARDLLYYAVTQDAMLIFENLSRGFGRQGKRTFMAERQYTRMEDWLTAKLAYEGLPSKTYLSKTLAQYTSKTCSNCGFTITSADYDRVLEKLKKTATGWMTTINGKELKVEGQITYYNRYKRQNVVKDLSVELDRLSEESVNNDISSWTKGRSGEALSLLKKRFSHRPVQEKFVCLNCGFETHADEQAALNIARSWLFLRSQEYKKYQTNKTTGNTDKRAFVETWQSFYRKKLKEVWKPAV

SEQ ID NO: 48461 - protein, 978 aa, synthetic construct
  REGION 1..978: note = engineered CasX variant
QEIKRINKIRRRLVKDSNTKKAGKTGPMKTLLVRVMTPDLRERLENLRKKPENIPQPISNTSRANLNKLLTDYTEMKKAILHVYWEEFQKDPVGLMSRVAQPASKKIDQNKLKPEMDEKGNLTTAGFACSQCGQPLFVYKLEQVSEKGKAYTNYFGRCNVAEHEKLILLAQLKPEKDSDEAVTYSLGKFGQRALDFYSIHVTKESTHPVKPLAQIAGNRYASVPVGKALSDACMGTIASFLSKYQDIIIEHQKVVKGNQKRLESLRELAGKENLEYPSVTLPPQPHTKEGVDAYNEVIARVRMWVNLNLWQKLKLSRDDAKPLLRLKGFPSFPLVERQANEVDWWDMVCNVKKLINEKKEDGKVFWQNLAGYKRQEALRPYLSSEEDRKKGKKFARYQLGDLLWHLEKKHGEDWGKVYDEAWERIDKKVEGLSKHIKLEEERRSEDAQSKAALTDWLRAKASFVIEGLKEADKDEFCRCELKLQKWYGDLRGKPFAIEAENSILDISGFSKQYNCAFIWQKDGVKKLNLYLIINYFKGGKLRFKKIKPEAFEANRFYTVINKKSGEIVPMEVNFNFDDPNLIILPLAFGKRQGREFIWNDLLSLETGSLQLANGRVIEKTLYNRRTRQDEPALFVALTFERREVLDSSNIKPMNLIGVDRGENIPAVIALTDPEGCPLSRFKDSLGNPTHILRIGESYKEKQRTIQAKKEVEQRRAGGYSRKYASKAKNLADDMVRNTARDLLYYAVTQDAMLIFENLSRGFGRQGKRTFMAERQYTRMEDWLTAKLAYEGLPSKTYLSKTLAQYTSKTCSNCGFTITSADYDRVLEKLKKTATGWMTTINGKELKVEGQITYYNRYKRQNVVKDLSVELDRLSEESVNNDISSWTKGRSGEALSLLKKRFSHRPVQEKFVCLNCGFETHADEQAALNIARSWLFLRSQEYKKYQTNKTTGNTDKRAFVETWQSFYRKKLKEVWKPAV

SEQ ID NO: 48462 - protein, 978 aa, synthetic construct
  REGION 1..978: note = engineered CasX variant
QEIKRINKIRRRLVKDSNTKKAGKTGPMKTLLVRVMTPDLRERLENLRKKPENIPQPISNTSRANLNKLLTDYTEMKKAILHVYWEEFQKDPVGLMSRVAQPASKKIDQNKLKPEMDEKGNLTTAGFACSQCGQPLFVYKLEQVSEKGKAYTNYFGRCNVAEHEKLIKLAQLKPEKDSDEAVTYSLGKFGQRALDFYSIHVTKESTHPVKPLAQIAGNRYASGPVGKALSDACMGTIASFLSKYQDIIIEHQKVVKGNQKRLESLRELAGKENLEYPSVTLPPQPHTKEGVDAYNEVIARVRMWVNLNLWQKLKLSRDDAKPLLRLKGFPSFPLVERQANEVDWWDMVCNVKKLINEKKEDGKVFWQNLAGYKRQEALRPYLSSEEDRKKGKKFARYQLGDLLWHLEKKHGEDWGKVYDEAWERIDKKVEGLSKHIKLEEERRSEDAQSKAALTDWLRAKASFVIEGLKEADKDEFCRCELKLQKWYGDLRGKPFAIEAENSILDISGFSKQYNCAFIWQKDGVKKLNLYLIINYFKGGKLRFKKIKPEAFEANRFYTVINKKSGEIVPMEVNFNFDDPNLIILPLAFGKRQGREFIWNDLLSLETGSLQLANGRVIEKTLYNRRTRQDEPALFVALTFERREVLDSSNIKPMNLIGVDRGENIPAVIALTDPEGCPLSRFKDSLGNPTHILRIGESYKEKQRTIQAKKEVEQRRAGGYSRKYASKAKNLADDMVRNTARDLLYYAVTQDAMLIFENLSRGFGRQGKRTFMAERQYTRMEDWLTAKLAYEGLPSKTYLSKTLAQYTSKTCSNCGFTITSADYDRVLEKLKKTATGWMTTINGKELKVEGQITYYNRYKRQNVVKDLSVELDRLSEESVNNDISSWTKGRSGEALSLLKKRFSHRPVQEKFVCLNCGFETHADEQAALNIARSWLFLRSQEYKKYQTNKTTGNTDKRAFVETWQSFYRKKLKEVWKPAV

SEQ ID NO: 48463 - protein, 977 aa, synthetic construct
  REGION 1..977: note = engineered CasX variant
QEIKRINKIRRRLVKDSNTKKAGKTGPMKTLLVRVMTPDLRERLENLRKKPENIPQPISNTSRANLNKLLTDYTEMKKAILHVYWEEFQKDPVGLMSRVAQPASKKIDQNKLKPEMDEKGNLTTAGFACSQCGQPLFVYKLEQVSEKGKAYTNYFGRCNVAEHEKLILLAQLKPEKDSDEAVTYSLGKFGQRALDFYSIHVTKESTHPVKPLAQIAGNRYASPVGKALSDACMGTIASFLSKYQDIIIEHQKVVKGNQKRLESLRELAGKENLEYPSVTLPPQPHTKEGVDAYNEVIARVRMWVNLNLWQKLKLSRDDAKPLLRLKGFPSFPLVERQANEVDWWDMVCNVKKLINEKKEDGKVFWQNLAGYKRQEALRPYLSSEEDRKKGKKFARYQLGDLLWHLEKKHGEDWGKVYDEAWERIDKKVEGLSKHIKLEEERRSEDAQSKAALTDWLRAKASFVIEGLKEADKDEFCRCELKLQKWYGDLRGKPFAIEAENSILDISGFSKQYNCAFIWQKDGVKKLNLYLIINYFKGGKLRFKKIKPEAFEANRFYTVINKKSGEIVPMEVNFNFDDPNLIILPLAFGKRQGREFIWNDLLSLETGSLQLANGRVIEKTLYNRRTRQDEPALFVALTFERREVLDSSNIKPMNLIGVDRGENIPAVIALTDPEGCPLSRFKDSLGNPTHILRIGESYKEKQRTIQAKKEVEQRRAGGYSRKYASKAKNLADDMVRNTARDLLYYAVTQDAMLIFENLSRGFGRQGKRTFMAERQYTRMEDWLTAKLAYEGLPSKTYLSKTLAQYTSKTCSNCGFTITSADYDRVLEKLKKTATGWMTTINGKELKVEGQITYYNRYKRQNVVKDLSVELDRLSEESVNNDISSWTKGRSGEALSLLKKRFSHRPVQEKFVCLNCGFETHADEQAALNIARSWLFLRSQEYKKYQTNKTTGNTDKRAFVETWQSFYRKKLKEVWKPAV

SEQ ID NO: 48464 - protein, 978 aa, synthetic construct
  REGION 1..978: note = engineered CasX variant
QEIKRINKIRRRLVKDSNTKKAGKTGPMKTLLVRVMTPDLRERLENLRKKPENIPQPISNTSRANLNKLLTDYTEMKKAILHVYWEEFQKDPVGLMSRVAQPASKKIDQNKLKPEMDEKGNLTTAGFACSQCGQPLFVYKLEQVSEKGKAYTNYFGRCNVAEHEKLILLAQLKPEKDSDEAVTYSLGKFGQRALDFYSIHVTKESTHPVKPLAQIAGNRYASYPVGKALSDACMGTIASFLSKYQDIIIEHQKVVKGNQKRLESLRELAGKENLEYPSVTLPPQPHTKEGVDAYNEVIARVRMWVNLNLWQKLKLSRDDAKPLLRLKGFPSFPLVERQANEVDWWDMVCNVKKLINEKKEDGKVFWQNLAGYKRQEALRPYLSSEEDRKKGKKFARYQLGDLLLHLYKKHGEDWGKVYDEAWERIDKKVEGLSKHIKLEEERRSEDAQSKAALTDWLRAKASFVIEGLKEADKDEFCRCELKLQKWYGDLRGKPFAIEAENSILDISGFSKQYNCAFIWQKDGVKKLNLYLIINYFKGGKLRFKKIKPEAFEANRFYTVINKKSGEIVPMEVNFNFDDPNLIILPLAFGKRQGREFIWNDLLSLETGSLQLANGRVIEKTLYNRRTRQDEPALFVALTFERREVLDSSNIKPMNLIGVDRGENIPAVIALTDPEGCPLSRFKDSLGNPTHILRIGESYKEKQRTIQAKKEVEQRRAGGYSRKYASKAKNLADDMVRNTARDLLYYAVTQDAMLIFENLSRGFGRQGKRTFMAERQYTRMEDWLTAKLAYEGLPSKTYLSKTLAQYTSKTCSNCGFTITSADYDRVLEKLKKTATGWMTTINGKELKVEGQITYYNRYKRQNVVKDLSVELDRLSEESVNNDISSWTKGRSGEALSLLKKRFSHRPVQEKFVCLNCGFETHADEQAALNIARSWLFLRSQEYKKYQTNKTTGNTDKRAFVETWQSFYRKKLKEVWKPAV

SEQ ID NO: 48465 - protein, 978 aa, synthetic construct
  REGION 1..978: note = engineered CasX variant
QEIKRINKIRRRLVKDSNTKKAGKTGPMKTLLVRVMTPDLRERLENLRKKPENIPQPISNTSRANLNKLLTDYTEMKKAILHVYWEEFQKDPVGLMSRVAQPASKKIDQNKLKPEMDEKGNLTTAGFACSQCGQPLFVYKLEQVSEKGKAYTNYFGRCNVAEHEKLILLAQLKPEKDSDEAVTYSLGKFGQRALDFYSIHVTKESTHPVKPLAQIAGNRYASHPVGKALSDACMGTIASFLSKYQDIIIEHQKVVKGNQKRLESLRELAGKENLEYPSVTLPPQPHTKEGVDAYNEVIARVRMWVNLNLWQKLKLSRDDAKPLLRLKGFPSFPLVERQANEVDWWDMVCNVKKLINEKKEDGKVFWQNLAGYKRQEALRPYLSSEEDRKKGKKFARYQLGDLLLHLYKKHGEDWGKVYDEAWERIDKKVEGLSKHIKLEEERRSEDAQSKAALTDWLRAKASFVIEGLKEADKDEFCRCELKLQKWYGDLRGKPFAIEAENSILDISGFSKQYNCAFIWQKDGVKKLNLYLIINYFKGGKLRFKKIKPEAFEANRFYTVINKKSGEIVPMEVNFNFDDPNLIILPLAFGKRQGREFIWNDLLSLETGSLQLANGRVIEKTLYNRRTRQDEPALFVALTFERREVLDSSNIKPMNLIGVDRGENIPAVIALTDPEGCPLSRFKDSLGNPTHILRIGESYKEKQRTIQAKKEVEQRRAGGYSRKYASKAKNLADDMVRNTARDLLYYAVTQDAMLIFENLSRGFGRQGKRTFMAERQYTRMEDWLTAKLAYEGLPSKTYLSKTLAQYTSKTCSNCGFTITSADYDRVLEKLKKTATGWMTTINGKELKVEGQITYYNRYKRQNVVKDLSVELDRLSEESVNNDISSWTKGRSGEALSLLKKRFSHRPVQEKFVCLNCGFETHADEQAALNIARSWLFLRSQEYKKYQTNKTTGNTDKRAFVETWQSFYRKKLKEVWKPAV

SEQ ID NO: 48466 - protein, 978 aa, synthetic construct
  REGION 1..978: note = engineered CasX variant
QEIKRINKIRRRLVKDSNTKKAGKTGPMKTLLVRVMTPDLRERLENLRKKPENIPQPISNTSRANLNKLLTDYTEMKKAILHVYWEEFQKDPVGLMSRVAQPASKKIDQNKLKPEMDEKGNLTTAGFACSQCGQPLFVYKLEQVSEKGKAYTNYFGRCNVAEHEKLILLAQLKPEKDSDEAVTYSLGKFGQRALDFYSIHVTKESTHPVKPLAQIAGNRYASSPVGKALSDACMGTIASFLSKYQDIIIEHQKVVKGNQKRLESLRELAGKENLEYPSVTLPPQPHTKEGVDAYNEVIARVRMWVNLNLWQKLKLSRDDAKPLLRLKGFPSFPLVERQANEVDWWDMVCNVKKLINEKKEDGKVFWQNLAGYKRQEALRPYLSSEEDRKKGKKFARYQLGDLLLHLYKKHGEDWGKVYDEAWERIDKKVEGLSKHIKLEEERRSEDAQSKAALTDWLRAKASFVIEGLKEADKDEFCRCELKLQKWYGDLRGKPFAIEAENSILDISGFSKQYNCAFIWQKDGVKKLNLYLIINYFKGGKLRFKKIKPEAFEANRFYTVINKKSGEIVPMEVNFNFDDPNLIILPLAFGKRQGREFIWNDLLSLETGSLQLANGRVIEKTLYNRRTRQDEPALFVALTFERREVLDSSNIKPMNLIGVDRGENIPAVIALTDPEGCPLSRFKDSLGNPTHILRIGESYKEKQRTIQAKKEVEQRRAGGYSRKYASKAKNLADDMVRNTARDLLYYAVTQDAMLIFENLSRGFGRQGKRTFMAERQYTRMEDWLTAKLAYEGLPSKTYLSKTLAQYTSKTCSNCGFTITSADYDRVLEKLKKTATGWMTTINGKELKVEGQITYYNRYKRQNVVKDLSVELDRLSEESVNNDISSWTKGRSGEALSLLKKRFSHRPVQEKFVCLNCGFETHADEQAALNIARSWLFLRSQEYKKYQTNKTTGNTDKRAFVETWQSFYRKKLKEVWKPAV

SEQ ID NO: 48467 - protein, 978 aa, synthetic construct
  REGION 1..978: note = engineered CasX variant
QEIKRINKIRRRLVKDSNTKKAGKTGPMKTLLVRVMTPDLRERLENLRKKPENIPQPISNTSRANLNKLLTDYTEMKKAILHVYWEEFQKDPVGLMSRVAQPASKKIDQNKLKPEMDEKGNLTTAGFACSQCGQPLFVYKLEQVSEKGKAYTNYFGRCNVAEHEKLILLAQLKPEKDSDEAVTYSLGKFGQRALDFYSIHVTKESTHPVKPLAQIAGNRYASTPVGKALSDACMGTIASFLSKYQDIIIEHQKVVKGNQKRLESLRELAGKENLEYPSVTLPPQPHTKEGVDAYNEVIARVRMWVNLNLWQKLKLSRDDAKPLLRLKGFPSFPLVERQANEVDWWDMVCNVKKLINEKKEDGKVFWQNLAGYKRQEALRPYLSSEEDRKKGKKFARYQLGDLLLHLYKKHGEDWGKVYDEAWERIDKKVEGLSKHIKLEEERRSEDAQSKAALTDWLRAKASFVIEGLKEADKDEFCRCELKLQKWYGDLRGKPFAIEAENSILDISGFSKQYNCAFIWQKDGVKKLNLYLIINYFKGGKLRFKKIKPEAFEANRFYTVINKKSGEIVPMEVNFNFDDPNLIILPLAFGKRQGREFIWNDLLSLETGSLQLANGRVIEKTLYNRRTRQDEPALFVALTFERREVLDSSNIKPMNLIGVDRGENIPAVIALTDPEGCPLSRFKDSLGNPTHILRIGESYKEKQRTIQAKKEVEQRRAGGYSRKYASKAKNLADDMVRNTARDLLYYAVTQDAMLIFENLSRGFGRQGKRTFMAERQYTRMEDWLTAKLAYEGLPSKTYLSKTLAQYTSKTCSNCGFTITSADYDRVLEKLKKTATGWMTTINGKELKVEGQITYYNRYKRQNVVKDLSVELDRLSEESVNNDISSWTKGRSGEALSLLKKRFSHRPVQEKFVCLNCGFETHADEQAALNIARSWLFLRSQEYKKYQTNKTTGNTDKRAFVETWQSFYRKKLKEVWKPAV

SEQ ID NO: 48468 - protein, 978 aa, synthetic construct
  REGION 1..978: note = engineered CasX variant
QEIKRINKIRRRLVKDSNTKKAGKTGPMKTLLVRVMTPDLRERLENLRKKPENIPQPISNTSRANLNKLLTDYTEMKKAILHVYWEEFQKDPVGLMSRVAQPASKKIDQNKLKPEMDEKGNLTTAGFACSQCGQPLFVYKLEQVSEKGKAYTNYFGRCNVAEHEKLILLAQLKPEKDSDEAVTYSLGKFGQRALDFYSIHVTKESTHPVKPLAQIAGNRYASAPVGKALSDACMGTIASFLSKYQDIIIEHQKVVKGNQKRLESLRELAGKENLEYPSVTLPPQPHTKEGVDAYNEVIARVRMWVNLNLWQKLKLSRDDAKPLLRLKGFPSFPLVERQANEVDWWDMVCNVKKLINEKKEDGKVFWQNLAGYKRQEALRPYLSSEEDRKKGKKFARYQLGDLLLHLYKKHGEDWGKVYDEAWERIDKKVEGLSKHIKLEEERRSEDAQSKAALTDWLRAKASFVIEGLKEADKDEFCRCELKLQKWYGDLRGKPFAIEAENSILDISGFSKQYNCAFIWQKDGVKKLNLYLIINYFKGGKLRFKKIKPEAFEANRFYTVINKKSGEIVPMEVNFNFDDPNLIILPLAFGKRQGREFIWNDLLSLETGSLQLANGRVIEKTLYNRRTRQDEPALFVALTFERREVLDSSNIKPMNLIGVDRGENIPAVIALTDPEGCPLSRFKDSLGNPTHILRIGESYKEKQRTIQAKKEVEQRRAGGYSRKYASKAKNLADDMVRNTARDLLYYAVTQDAMLIFENLSRGFGRQGKRTFMAERQYTRMEDWLTAKLAYEGLPSKTYLSKTLAQYTSKTCSNCGFTITSADYDRVLEKLKKTATGWMTTINGKELKVEGQITYYNRYKRQNVVKDLSVELDRLSEESVNNDISSWTKGRSGEALSLLKKRFSHRPVQEKFVCLNCGFETHADEQAALNIARSWLFLRSQEYKKYQTNKTTGNTDKRAFVETWQSFYRKKLKEVWKPAV

SEQ ID NO: 48469 - protein, 978 aa, synthetic construct
  REGION 1..978: note = engineered CasX variant
QEIKRINKIRRRLVKDSNTKKAGKTGPMKTLLVRVMTPDLRERLENLRKKPENIPQPISNTSRANLNKLLTDYTEMKKAILHVYWEEFQKDPVGLMSRVAQPASKKIDQNKLKPEMDEKGNLTTAGFACSQCGQPLFVYKLEQVSEKGKAYTNYFGRCNVAEHEKLILLAQLKPEKDSDEAVTYSLGKFGQRALDFYSIHVTKESTHPVKPLAQIAGNRYASVPVGKALSDACMGTIASFLSKYQDIIIEHQKVVKGNQKRLESLRELAGKENLEYPSVTLPPQPHTKEGVDAYNEVIARVRMWVNLNLWQKLKLSRDDAKPLLRLKGFPSFPLVERQANEVDWWDMVCNVKKLINEKKEDGKVFWQNLAGYKRQEALRPYLSSEEDRKKGKKFARYQLGDLLLHLYKKHGEDWGKVYDEAWERIDKKVEGLSKHIKLEEERRSEDAQSKAALTDWLRAKASFVIEGLKEADKDEFCRCELKLQKWYGDLRGKPFAIEAENSILDISGFSKQYNCAFIWQKDGVKKLNLYLIINYFKGGKLRFKKIKPEAFEANRFYTVINKKSGEIVPMEVNFNFDDPNLIILPLAFGKRQGREFIWNDLLSLETGSLQLANGRVIEKTLYNRRTRQDEPALFVALTFERREVLDSSNIKPMNLIGVDRGENIPAVIALTDPEGCPLSRFKDSLGNPTHILRIGESYKEKQRTIQAKKEVEQRRAGGYSRKYASKAKNLADDMVRNTARDLLYYAVTQDAMLIFENLSRGFGRQGKRTFMAERQYTRMEDWLTAKLAYEGLPSKTYLSKTLAQYTSKTCSNCGFTITSADYDRVLEKLKKTATGWMTTINGKELKVEGQITYYNRYKRQNVVKDLSVELDRLSEESVNNDISSWTKGRSGEALSLLKKRFSHRPVQEKFVCLNCGFETHADEQAALNIARSWLFLRSQEYKKYQTNKTTGNTDKRAFVETWQSFYRKKLKEVWKPAV

SEQ ID NO: 48470 - protein, 978 aa, synthetic construct
  REGION 1..978: note = engineered CasX variant
QEIKRINKIRRRLVKDSNTKKAGKTGPMKTLLVRVMTPDLRERLENLRKKPENIPQPISNTSRANLNKLLTDYTEMKKAILHVYWEEFQKDPVGLMSRVAQPASKKIDQNKLKPEMDEKGNLTTAGFACSQCGQPLFVYKLEQVSEKGKAYTNYFGRCNVAEHEKLIKLAQLKPEKDSDEAVTYSLGKFGQRALDFYSIHVTKESTHPVKPLAQIAGNRYASGPVGKALSDACMGTIASFLSKYQDIIIEHQKVVKGNQKRLESLRELAGKENLEYPSVTLPPQPHTKEGVDAYNEVIARVRMWVNLNLWQKLKLSRDDAKPLLRLKGFPSFPLVERQANEVDWWDMVCNVKKLINEKKEDGKVFWQNLAGYKRQEALRPYLSSEEDRKKGKKFARYQLGDLLLHLYKKHGEDWGKVYDEAWERIDKKVEGLSKHIKLEEERRSEDAQSKAALTDWLRAKASFVIEGLKEADKDEFCRCELKLQKWYGDLRGKPFAIEAENSILDISGFSKQYNCAFIWQKDGVKKLNLYLIINYFKGGKLRFKKIKPEAFEANRFYTVINKKSGEIVPMEVNFNFDDPNLIILPLAFGKRQGREFIWNDLLSLETGSLQLANGRVIEKTLYNRRTRQDEPALFVALTFERREVLDSSNIKPMNLIGVDRGENIPAVIALTDPEGCPLSRFKDSLGNPTHILRIGESYKEKQRTIQAKKEVEQRRAGGYSRKYASKAKNLADDMVRNTARDLLYYAVTQDAMLIFENLSRGFGRQGKRTFMAERQYTRMEDWLTAKLAYEGLPSKTYLSKTLAQYTSKTCSNCGFTITSADYDRVLEKLKKTATGWMTTINGKELKVEGQITYYNRYKRQNVVKDLSVELDRLSEESVNNDISSWTKGRSGEALSLLKKRFSHRPVQEKFVCLNCGFETHADEQAALNIARSWLFLRSQEYKKYQTNKTTGNTDKRAFVETWQSFYRKKLKEVWKPAV

SEQ ID NO: 48471 - protein, 977 aa, synthetic construct
  REGION 1..977: note = engineered CasX variant
QEIKRINKIRRRLVKDSNTKKAGKTGPMKTLLVRVMTPDLRERLENLRKKPENIPQPISNTSRANLNKLLTDYTEMKKAILHVYWEEFQKDPVGLMSRVAQPASKKIDQNKLKPEMDEKGNLTTAGFACSQCGQPLFVYKLEQVSEKGKAYTNYFGRCNVAEHEKLILLAQLKPEKDSDEAVTYSLGKFGQRALDFYSIHVTKESTHPVKPLAQIAGNRYASPVGKALSDACMGTIASFLSKYQDIIIEHQKVVKGNQKRLESLRELAGKENLEYPSVTLPPQPHTKEGVDAYNEVIARVRMWVNLNLWQKLKLSRDDAKPLLRLKGFPSFPLVERQANEVDWWDMVCNVKKLINEKKEDGKVFWQNLAGYKRQEALRPYLSSEEDRKKGKKFARYQLGDLLLHLYKKHGEDWGKVYDEAWERIDKKVEGLSKHIKLEEERRSEDAQSKAALTDWLRAKASFVIEGLKEADKDEFCRCELKLQKWYGDLRGKPFAIEAENSILDISGFSKQYNCAFIWQKDGVKKLNLYLIINYFKGGKLRFKKIKPEAFEANRFYTVINKKSGEIVPMEVNFNFDDPNLIILPLAFGKRQGREFIWNDLLSLETGSLQLANGRVIEKTLYNRRTRQDEPALFVALTFERREVLDSSNIKPMNLIGVDRGENIPAVIALTDPEGCPLSRFKDSLGNPTHILRIGESYKEKQRTIQAKKEVEQRRAGGYSRKYASKAKNLADDMVRNTARDLLYYAVTQDAMLIFENLSRGFGRQGKRTFMAERQYTRMEDWLTAKLAYEGLPSKTYLSKTLAQYTSKTCSNCGFTITSADYDRVLEKLKKTATGWMTTINGKELKVEGQITYYNRYKRQNVVKDLSVELDRLSEESVNNDISSWTKGRSGEALSLLKKRFSHRPVQEKFVCLNCGFETHADEQAALNIARSWLFLRSQEYKKYQTNKTTGNTDKRAFVETWQSFYRKKLKEVWKPAV

SEQ ID NO: 48472 - protein, 978 aa, synthetic construct
  REGION 1..978: note = engineered CasX variant
QEIKRINKIRRRLVKDSNTKKAGKTGPMKTLLVRVMTPDLRERLENLRKKPENIPQPISNTSRANLNKLLTDYTEMKKAILHVYWEEFQKDPVGLMSRVAQPASKKIDQNKLKPEMDEKGNLTTAGFACSQCGQPLFVYKLEQVSEKGKAYTNYFGRCNVAEHEKLILLAQLKPEKDSDEAVTYSLGKFGQRALDFYSIHVTKESTHPVKPLAQIAGNRYASYPVGKALSDACMGTIASFLSKYQDIIIEHQKVVKGNQKRLESLRELAGKENLEYPSVTLPPQPHTKEGVDAYNEVIARVRMWVNLNLWQKLKLSRDDAKPLLRLKGFPSFPLVERQANEVDWWDMVCNVKKLINEKKEDGKVFWQNLAGYKRQEALRPYLSSEEDRKKGKKFARYQLGDLLLHLEKKHPEDWGKVYDEAWERIDKKVEGLSKHIKLEEERRSEDAQSKAALTDWLRAKASFVIEGLKEADKDEFCRCELKLQKWYGDLRGKPFAIEAENSILDISGFSKQYNCAFIWQKDGVKKLNLYLIINYFKGGKLRFKKIKPEAFEANRFYTVINKKSGEIVPMEVNFNFDDPNLIILPLAFGKRQGREFIWNDLLSLETGSLQLANGRVIEKTLYNRRTRQDEPALFVALTFERREVLDSSNIKPMNLIGVDRGENIPAVIALTDPEGCPLSRFKDSLGNPTHILRIGESYKEKQRTIQAKKEVEQRRAGGYSRKYASKAKNLADDMVRNTARDLLYYAVTQDAMLIFENLSRGFGRQGKRTFMAERQYTRMEDWLTAKLAYEGLPSKTYLSKTLAQYTSKTCSNCGFTITSADYDRVLEKLKKTATGWMTTINGKELKVEGQITYYNRYKRQNVVKDLSVELDRLSEESVNNDISSWTKGRSGEALSLLKKRFSHRPVQEKFVCLNCGFETHADEQAALNIARSWLFLRSQEYKKYQTNKTTGNTDKRAFVETWQSFYRKKLKEVWKPAV

SEQ ID NO: 48473 - protein, 978 aa, synthetic construct
  REGION 1..978: note = engineered CasX variant
QEIKRINKIRRRLVKDSNTKKAGKTGPMKTLLVRVMTPDLRERLENLRKKPENIPQPISNTSRANLNKLLTDYTEMKKAILHVYWEEFQKDPVGLMSRVAQPASKKIDQNKLKPEMDEKGNLTTAGFACSQCGQPLFVYKLEQVSEKGKAYTNYFGRCNVAEHEKLILLAQLKPEKDSDEAVTYSLGKFGQRALDFYSIHVTKESTHPVKPLAQIAGNRYASHPVGKALSDACMGTIASFLSKYQDIIIEHQKVVKGNQKRLESLRELAGKENLEYPSVTLPPQPHTKEGVDAYNEVIARVRMWVNLNLWQKLKLSRDDAKPLLRLKGFPSFPLVERQANEVDWWDMVCNVKKLINEKKEDGKVFWQNLAGYKRQEALRPYLSSEEDRKKGKKFARYQLGDLLLHLEKKHPEDWGKVYDEAWERIDKKVEGLSKHIKLEEERRSEDAQSKAALTDWLRAKASFVIEGLKEADKDEFCRCELKLQKWYGDLRGKPFAIEAENSILDISGFSKQYNCAFIWQKDGVKKLNLYLIINYFKGGKLRFKKIKPEAFEANRFYTVINKKSGEIVPMEVNFNFDDPNLIILPLAFGKRQGREFIWNDLLSLETGSLQLANGRVIEKTLYNRRTRQDEPALFVALTFERREVLDSSNIKPMNLIGVDRGENIPAVIALTDPEGCPLSRFKDSLGNPTHILRIGESYKEKQRTIQAKKEVEQRRAGGYSRKYASKAKNLADDMVRNTARDLLYYAVTQDAMLIFENLSRGFGRQGKRTFMAERQYTRMEDWLTAKLAYEGLPSKTYLSKTLAQYTSKTCSNCGFTITSADYDRVLEKLKKTATGWMTTINGKELKVEGQITYYNRYKRQNVVKDLSVELDRLSEESVNNDISSWTKGRSGEALSLLKKRFSHRPVQEKFVCLNCGFETHADEQAALNIARSWLFLRSQEYKKYQTNKTTGNTDKRAFVETWQSFYRKKLKEVWKPAV

SEQ ID NO: 48474 - protein, 978 aa, synthetic construct
  REGION 1..978: note = engineered CasX variant
QEIKRINKIRRRLVKDSNTKKAGKTGPMKTLLVRVMTPDLRERLENLRKKPENIPQPISNTSRANLNKLLTDYTEMKKAILHVYWEEFQKDPVGLMSRVAQPASKKIDQNKLKPEMDEKGNLTTAGFACSQCGQPLFVYKLEQVSEKGKAYTNYFGRCNVAEHEKLILLAQLKPEKDSDEAVTYSLGKFGQRALDFYSIHVTKESTHPVKPLAQIAGNRYASSPVGKALSDACMGTIASFLSKYQDIIIEHQKVVKGNQKRLESLRELAGKENLEYPSVTLPPQPHTKEGVDAYNEVIARVRMWVNLNLWQKLKLSRDDAKPLLRLKGFPSFPLVERQANEVDWWDMVCNVKKLINEKKEDGKVFWQNLAGYKRQEALRPYLSSEEDRKKGKKFARYQLGDLLLHLEKKHPEDWGKVYDEAWERIDKKVEGLSKHIKLEEERRSEDAQSKAALTDWLRAKASFVIEGLKEADKDEFCRCELKLQKWYGDLRGKPFAIEAENSILDISGFSKQYNCAFIWQKDGVKKLNLYLIINYFKGGKLRFKKIKPEAFEANRFYTVINKKSGEIVPMEVNFNFDDPNLIILPLAFGKRQGREFIWNDLLSLETGSLQLANGRVIEKTLYNRRTRQDEPALFVALTFERREVLDSSNIKPMNLIGVDRGENIPAVIALTDPEGCPLSRFKDSLGNPTHILRIGESYKEKQRTIQAKKEVEQRRAGGYSRKYASKAKNLADDMVRNTARDLLYYAVTQDAMLIFENLSRGFGRQGKRTFMAERQYTRMEDWLTAKLAYEGLPSKTYLSKTLAQYTSKTCSNCGFTITSADYDRVLEKLKKTATGWMTTINGKELKVEGQITYYNRYKRQNVVKDLSVELDRLSEESVNNDISSWTKGRSGEALSLLKKRFSHRPVQEKFVCLNCGFETHADEQAALNIARSWLFLRSQEYKKYQTNKTTGNTDKRAFVETWQSFYRKKLKEVWKPAV

SEQ ID NO: 48475 - protein, 978 aa, synthetic construct
  REGION 1..978: note = engineered CasX variant
QEIKRINKIRRRLVKDSNTKKAGKTGPMKTLLVRVMTPDLRERLENLRKKPENIPQPISNTSRANLNKLLTDYTEMKKAILHVYWEEFQKDPVGLMSRVAQPASKKIDQNKLKPEMDEKGNLTTAGFACSQCGQPLFVYKLEQVSEKGKAYTNYFGRCNVAEHEKLILLAQLKPEKDSDEAVTYSLGKFGQRALDFYSIHVTKESTHPVKPLAQIAGNRYASTPVGKALSDACMGTIASFLSKYQDIIIEHQKVVKGNQKRLESLRELAGKENLEYPSVTLPPQPHTKEGVDAYNEVIARVRMWVNLNLWQKLKLSRDDAKPLLRLKGFPSFPLVERQANEVDWWDMVCNVKKLINEKKEDGKVFWQNLAGYKRQEALRPYLSSEEDRKKGKKFARYQLGDLLLHLEKKHPEDWGKVYDEAWERIDKKVEGLSKHIKLEEERRSEDAQSKAALTDWLRAKASFVIEGLKEADKDEFCRCELKLQKWYGDLRGKPFAIEAENSILDISGFSKQYNCAFIWQKDGVKKLNLYLIINYFKGGKLRFKKIKPEAFEANRFYTVINKKSGEIVPMEVNFNFDDPNLIILPLAFGKRQGREFIWNDLLSLETGSLQLANGRVIEKTLYNRRTRQDEPALFVALTFERREVLDSSNIKPMNLIGVDRGENIPAVIALTDPEGCPLSRFKDSLGNPTHILRIGESYKEKQRTIQAKKEVEQRRAGGYSRKYASKAKNLADDMVRNTARDLLYYAVTQDAMLIFENLSRGFGRQGKRTFMAERQYTRMEDWLTAKLAYEGLPSKTYLSKTLAQYTSKTCSNCGFTITSADYDRVLEKLKKTATGWMTTINGKELKVEGQITYYNRYKRQNVVKDLSVELDRLSEESVNNDISSWTKGRSGEALSLLKKRFSHRPVQEKFVCLNCGFETHADEQAALNIARSWLFLRSQEYKKYQTNKTTGNTDKRAFVETWQSFYRKKLKEVWKPAV

SEQ ID NO: 48476 - protein, 978 aa, synthetic construct
  REGION 1..978: note = engineered CasX variant
QEIKRINKIRRRLVKDSNTKKAGKTGPMKTLLVRVMTPDLRERLENLRKKPENIPQPISNTSRANLNKLLTDYTEMKKAILHVYWEEFQKDPVGLMSRVAQPASKKIDQNKLKPEMDEKGNLTTAGFACSQCGQPLFVYKLEQVSEKGKAYTNYFGRCNVAEHEKLILLAQLKPEKDSDEAVTYSLGKFGQRALDFYSIHVTKESTHPVKPLAQIAGNRYASAPVGKALSDACMGTIASFLSKYQDIIIEHQKVVKGNQKRLESLRELAGKENLEYPSVTLPPQPHTKEGVDAYNEVIARVRMWVNLNLWQKLKLSRDDAKPLLRLKGFPSFPLVERQANEVDWWDMVCNVKKLINEKKEDGKVFWQNLAGYKRQEALRPYLSSEEDRKKGKKFARYQLGDLLLHLEKKHPEDWGKVYDEAWERIDKKVEGLSKHIKLEEERRSEDAQSKAALTDWLRAKASFVIEGLKEADKDEFCRCELKLQKWYGDLRGKPFAIEAENSILDISGFSKQYNCAFIWQKDGVKKLNLYLIINYFKGGKLRFKKIKPEAFEANRFYTVINKKSGEIVPMEVNFNFDDPNLIILPLAFGKRQGREFIWNDLLSLETGSLQLANGRVIEKTLYNRRTRQDEPALFVALTFERREVLDSSNIKPMNLIGVDRGENIPAVIALTDPEGCPLSRFKDSLGNPTHILRIGESYKEKQRTIQAKKEVEQRRAGGYSRKYASKAKNLADDMVRNTARDLLYYAVTQDAMLIFENLSRGFGRQGKRTFMAERQYTRMEDWLTAKLAYEGLPSKTYLSKTLAQYTSKTCSNCGFTITSADYDRVLEKLKKTATGWMTTINGKELKVEGQITYYNRYKRQNVVKDLSVELDRLSEESVNNDISSWTKGRSGEALSLLKKRFSHRPVQEKFVCLNCGFETHADEQAALNIARSWLFLRSQEYKKYQTNKTTGNTDKRAFVETWQSFYRKKLKEVWKPAV

SEQ ID NO: 48477 - protein, 978 aa, synthetic construct
  REGION 1..978: note = engineered CasX variant
QEIKRINKIRRRLVKDSNTKKAGKTGPMKTLLVRVMTPDLRERLENLRKKPENIPQPISNTSRANLNKLLTDYTEMKKAILHVYWEEFQKDPVGLMSRVAQPASKKIDQNKLKPEMDEKGNLTTAGFACSQCGQPLFVYKLEQVSEKGKAYTNYFGRCNVAEHEKLILLAQLKPEKDSDEAVTYSLGKFGQRALDFYSIHVTKESTHPVKPLAQIAGNRYASVPVGKALSDACMGTIASFLSKYQDIIIEHQKVVKGNQKRLESLRELAGKENLEYPSVTLPPQPHTKEGVDAYNEVIARVRMWVNLNLWQKLKLSRDDAKPLLRLKGFPSFPLVERQANEVDWWDMVCNVKKLINEKKEDGKVFWQNLAGYKRQEALRPYLSSEEDRKKGKKFARYQLGDLLLHLEKKHPEDWGKVYDEAWERIDKKVEGLSKHIKLEEERRSEDAQSKAALTDWLRAKASFVIEGLKEADKDEFCRCELKLQKWYGDLRGKPFAIEAENSILDISGFSKQYNCAFIWQKDGVKKLNLYLIINYFKGGKLRFKKIKPEAFEANRFYTVINKKSGEIVPMEVNFNFDDPNLIILPLAFGKRQGREFIWNDLLSLETGSLQLANGRVIEKTLYNRRTRQDEPALFVALTFERREVLDSSNIKPMNLIGVDRGENIPAVIALTDPEGCPLSRFKDSLGNPTHILRIGESYKEKQRTIQAKKEVEQRRAGGYSRKYASKAKNLADDMVRNTARDLLYYAVTQDAMLIFENLSRGFGRQGKRTFMAERQYTRMEDWLTAKLAYEGLPSKTYLSKTLAQYTSKTCSNCGFTITSADYDRVLEKLKKTATGWMTTINGKELKVEGQITYYNRYKRQNVVKDLSVELDRLSEESVNNDISSWTKGRSGEALSLLKKRFSHRPVQEKFVCLNCGFETHADEQAALNIARSWLFLRSQEYKKYQTNKTTGNTDKRAFVETWQSFYRKKLKEVWKPAV

SEQ ID NO: 48478 - protein, 978 aa, synthetic construct
  REGION 1..978: note = engineered CasX variant
QEIKRINKIRRRLVKDSNTKKAGKTGPMKTLLVRVMTPDLRERLENLRKKPENIPQPISNTSRANLNKLLTDYTEMKKAILHVYWEEFQKDPVGLMSRVAQPASKKIDQNKLKPEMDEKGNLTTAGFACSQCGQPLFVYKLEQVSEKGKAYTNYFGRCNVAEHEKLIKLAQLKPEKDSDEAVTYSLGKFGQRALDFYSIHVTKESTHPVKPLAQIAGNRYASGPVGKALSDACMGTIASFLSKYQDIIIEHQKVVKGNQKRLESLRELAGKENLEYPSVTLPPQPHTKEGVDAYNEVIARVRMWVNLNLWQKLKLSRDDAKPLLRLKGFPSFPLVERQANEVDWWDMVCNVKKLINEKKEDGKVFWQNLAGYKRQEALRPYLSSEEDRKKGKKFARYQLGDLLLHLEKKHPEDWGKVYDEAWERIDKKVEGLSKHIKLEEERRSEDAQSKAALTDWLRAKASFVIEGLKEADKDEFCRCELKLQKWYGDLRGKPFAIEAENSILDISGFSKQYNCAFIWQKDGVKKLNLYLIINYFKGGKLRFKKIKPEAFEANRFYTVINKKSGEIVPMEVNFNFDDPNLIILPLAFGKRQGREFIWNDLLSLETGSLQLANGRVIEKTLYNRRTRQDEPALFVALTFERREVLDSSNIKPMNLIGVDRGENIPAVIALTDPEGCPLSRFKDSLGNPTHILRIGESYKEKQRTIQAKKEVEQRRAGGYSRKYASKAKNLADDMVRNTARDLLYYAVTQDAMLIFENLSRGFGRQGKRTFMAERQYTRMEDWLTAKLAYEGLPSKTYLSKTLAQYTSKTCSNCGFTITSADYDRVLEKLKKTATGWMTTINGKELKVEGQITYYNRYKRQNVVKDLSVELDRLSEESVNNDISSWTKGRSGEALSLLKKRFSHRPVQEKFVCLNCGFETHADEQAALNIARSWLFLRSQEYKKYQTNKTTGNTDKRAFVETWQSFYRKKLKEVWKPAV

SEQ ID NO: 48479 - protein, 977 aa, synthetic construct
  REGION 1..977: note = engineered CasX variant
QEIKRINKIRRRLVKDSNTKKAGKTGPMKTLLVRVMTPDLRERLENLRKKPENIPQPISNTSRANLNKLLTDYTEMKKAILHVYWEEFQKDPVGLMSRVAQPASKKIDQNKLKPEMDEKGNLTTAGFACSQCGQPLFVYKLEQVSEKGKAYTNYFGRCNVAEHEKLILLAQLKPEKDSDEAVTYSLGKFGQRALDFYSIHVTKESTHPVKPLAQIAGNRYASPVGKALSDACMGTIASFLSKYQDIIIEHQKVVKGNQKRLESLRELAGKENLEYPSVTLPPQPHTKEGVDAYNEVIARVRMWVNLNLWQKLKLSRDDAKPLLRLKGFPSFPLVERQANEVDWWDMVCNVKKLINEKKEDGKVFWQNLAGYKRQEALRPYLSSEEDRKKGKKFARYQLGDLLLHLEKKHPEDWGKVYDEAWERIDKKVEGLSKHIKLEEERRSEDAQSKAALTDWLRAKASFVIEGLKEADKDEFCRCELKLQKWYGDLRGKPFAIEAENSILDISGFSKQYNCAFIWQKDGVKKLNLYLIINYFKGGKLRFKKIKPEAFEANRFYTVINKKSGEIVPMEVNFNFDDPNLIILPLAFGKRQGREFIWNDLLSLETGSLQLANGRVIEKTLYNRRTRQDEPALFVALTFERREVLDSSNIKPMNLIGVDRGENIPAVIALTDPEGCPLSRFKDSLGNPTHILRIGESYKEKQRTIQAKKEVEQRRAGGYSRKYASKAKNLADDMVRNTARDLLYYAVTQDAMLIFENLSRGFGRQGKRTFMAERQYTRMEDWLTAKLAYEGLPSKTYLSKTLAQYTSKTCSNCGFTITSADYDRVLEKLKKTATGWMTTINGKELKVEGQITYYNRYKRQNVVKDLSVELDRLSEESVNNDISSWTKGRSGEALSLLKKRFSHRPVQEKFVCLNCGFETHADEQAALNIARSWLFLRSQEYKKYQTNKTTGNTDKRAFVETWQSFYRKKLKEVWKPAV

SEQ ID NO: 48480 - protein, 979 aa, synthetic construct
  REGION 1..979: note = engineered CasX variant
QEIKRINKIRRRLVKDSNTKKAGKTGPMKTLLVRVMTPDLRERLENLRKKPENIPQPISNTSRANLNKLLTDYTEMKKAILHVYWEEFQKDPVGLMSRVAQPASKKIDQNKLKPEMDEKGNLTTAGFACSQCGQPLFVYKLEQVSEKGKAYTNYFGRCNVAEHEKLILLAQLKPEKDSDEAVTYSLGKFGQRALDFYSIHVTKESTHPVKPLAQIAGNRYASYPVGKALSDACMGTIASFLSKYQDIIIEHQKVVKGNQKRLESLRELAGKENLEYPSVTLPPQPHTKEGVDAYNEVIARVRMWVNLNLWQKLKLSRDDAKPLLRLKGFPSFPLVERQANEVDWWDMVCNVKKLINEKKEDGKVFWQNLAGYKRQEALRPYLSSEEDRKKGKKFARYQLGDLLLHLEKKHGERDWGKVYDEAWERIDKKVEGLSKHIKLEEERRSEDAQSKAALTDWLRAKASFVIEGLKEADKDEFCRCELKLQKWYGDLRGKPFAIEAENSILDISGFSKQYNCAFIWQKDGVKKLNLYLIINYFKGGKLRFKKIKPEAFEANRFYTVINKKSGEIVPMEVNFNFDDPNLIILPLAFGKRQGREFIWNDLLSLETGSLQLANGRVIEKTLYNRRTRQDEPALFVALTFERREVLDSSNIKPMNLIGVDRGENIPAVIALTDPEGCPLSRFKDSLGNPTHILRIGESYKEKQRTIQAKKEVEQRRAGGYSRKYASKAKNLADDMVRNTARDLLYYAVTQDAMLIFENLSRGFGRQGKRTFMAERQYTRMEDWLTAKLAYEGLPSKTYLSKTLAQYTSKTCSNCGFTITSADYDRVLEKLKKTATGWMTTINGKELKVEGQITYYNRYKRQNVVKDLSVELDRLSEESVNNDISSWTKGRSGEALSLLKKRFSHRPVQEKFVCLNCGFETHADEQAALNIARSWLFLRSQEYKKYQTNKTTGNTDKRAFVETWQSFYRKKLKEVWKPAV

SEQ ID NO: 48481 - protein, 979 aa, synthetic construct
  REGION 1..979: note = engineered CasX variant
QEIKRINKIRRRLVKDSNTKKAGKTGPMKTLLVRVMTPDLRERLENLRKKPENIPQPISNTSRANLNKLLTDYTEMKKAILHVYWEEFQKDPVGLMSRVAQPASKKIDQNKLKPEMDEKGNLTTAGFACSQCGQPLFVYKLEQVSEKGKAYTNYFGRCNVAEHEKLILLAQLKPEKDSDEAVTYSLGKFGQRALDFYSIHVTKESTHPVKPLAQIAGNRYASHPVGKALSDACMGTIASFLSKYQDIIIEHQKVVKGNQKRLESLRELAGKENLEYPSVTLPPQPHTKEGVDAYNEVIARVRMWVNLNLWQKLKLSRDDAKPLLRLKGFPSFPLVERQANEVDWWDMVCNVKKLINEKKEDGKVFWQNLAGYKRQEALRPYLSSEEDRKKGKKFARYQLGDLLLHLEKKHGERDWGKVYDEAWERIDKKVEGLSKHIKLEEERRSEDAQSKAALTDWLRAKASFVIEGLKEADKDEFCRCELKLQKWYGDLRGKPFAIEAENSILDISGFSKQYNCAFIWQKDGVKKLNLYLIINYFKGGKLRFKKIKPEAFEANRFYTVINKKSGEIVPMEVNFNFDDPNLIILPLAFGKRQGREFIWNDLLSLETGSLQLANGRVIEKTLYNRRTRQDEPALFVALTFERREVLDSSNIKPMNLIGVDRGENIPAVIALTDPEGCPLSRFKDSLGNPTHILRIGESYKEKQRTIQAKKEVEQRRAGGYSRKYASKAKNLADDMVRNTARDLLYYAVTQDAMLIFENLSRGFGRQGKRTFMAERQYTRMEDWLTAKLAYEGLPSKTYLSKTLAQYTSKTCSNCGFTITSADYDRVLEKLKKTATGWMTTINGKELKVEGQITYYNRYKRQNVVKDLSVELDRLSEESVNNDISSWTKGRSGEALSLLKKRFSHRPVQEKFVCLNCGFETHADEQAALNIARSWLFLRSQEYKKYQTNKTTGNTDKRAFVETWQSFYRKKLKEVWKPAV

SEQ ID NO: 48482 - protein, 979 aa, synthetic construct
  REGION 1..979: note = engineered CasX variant
QEIKRINKIRRRLVKDSNTKKAGKTGPMKTLLVRVMTPDLRERLENLRKKPENIPQPISNTSRANLNKLLTDYTEMKKAILHVYWEEFQKDPVGLMSRVAQPASKKIDQNKLKPEMDEKGNLTTAGFACSQCGQPLFVYKLEQVSEKGKAYTNYFGRCNVAEHEKLILLAQLKPEKDSDEAVTYSLGKFGQRALDFYSIHVTKESTHPVKPLAQIAGNRYASSPVGKALSDACMGTIASFLSKYQDIIIEHQKVVKGNQKRLESLRELAGKENLEYPSVTLPPQPHTKEGVDAYNEVIARVRMWVNLNLWQKLKLSRDDAKPLLRLKGFPSFPLVERQANEVDWWDMVCNVKKLINEKKEDGKVFWQNLAGYKRQEALRPYLSSEEDRKKGKKFARYQLGDLLLHLEKKHGERDWGKVYDEAWERIDKKVEGLSKHIKLEEERRSEDAQSKAALTDWLRAKASFVIEGLKEADKDEFCRCELKLQKWYGDLRGKPFAIEAENSILDISGFSKQYNCAFIWQKDGVKKLNLYLIINYFKGGKLRFKKIKPEAFEANRFYTVINKKSGEIVPMEVNFNFDDPNLIILPLAFGKRQGREFIWNDLLSLETGSLQLANGRVIEKTLYNRRTRQDEPALFVALTFERREVLDSSNIKPMNLIGVDRGENIPAVIALTDPEGCPLSRFKDSLGNPTHILRIGESYKEKQRTIQAKKEVEQRRAGGYSRKYASKAKNLADDMVRNTARDLLYYAVTQDAMLIFENLSRGFGRQGKRTFMAERQYTRMEDWLTAKLAYEGLPSKTYLSKTLAQYTSKTCSNCGFTITSADYDRVLEKLKKTATGWMTTINGKELKVEGQITYYNRYKRQNVVKDLSVELDRLSEESVNNDISSWTKGRSGEALSLLKKRFSHRPVQEKFVCLNCGFETHADEQAALNIARSWLFLRSQEYKKYQTNKTTGNTDKRAFVETWQSFYRKKLKEVWKPAV

SEQ ID NO: 48483 - protein, 979 aa, synthetic construct
  REGION 1..979: note = engineered CasX variant
QEIKRINKIRRRLVKDSNTKKAGKTGPMKTLLVRVMTPDLRERLENLRKKPENIPQPISNTSRANLNKLLTDYTEMKKAILHVYWEEFQKDPVGLMSRVAQPASKKIDQNKLKPEMDEKGNLTTAGFACSQCGQPLFVYKLEQVSEKGKAYTNYFGRCNVAEHEKLILLAQLKPEKDSDEAVTYSLGKFGQRALDFYSIHVTKESTHPVKPLAQIAGNRYASTPVGKALSDACMGTIASFLSKYQDIIIEHQKVVKGNQKRLESLRELAGKENLEYPSVTLPPQPHTKEGVDAYNEVIARVRMWVNLNLWQKLKLSRDDAKPLLRLKGFPSFPLVERQANEVDWWDMVCNVKKLINEKKEDGKVFWQNLAGYKRQEALRPYLSSEEDRKKGKKFARYQLGDLLLHLEKKHGERDWGKVYDEAWERIDKKVEGLSKHIKLEEERRSEDAQSKAALTDWLRAKASFVIEGLKEADKDEFCRCELKLQKWYGDLRGKPFAIEAENSILDISGFSKQYNCAFIWQKDGVKKLNLYLIINYFKGGKLRFKKIKPEAFEANRFYTVINKKSGEIVPMEVNFNFDDPNLIILPLAFGKRQGREFIWNDLLSLETGSLQLANGRVIEKTLYNRRTRQDEPALFVALTFERREVLDSSNIKPMNLIGVDRGENIPAVIALTDPEGCPLSRFKDSLGNPTHILRIGESYKEKQRTIQAKKEVEQRRAGGYSRKYASKAKNLADDMVRNTARDLLYYAVTQDAMLIFENLSRGFGRQGKRTFMAERQYTRMEDWLTAKLAYEGLPSKTYLSKTLAQYTSKTCSNCGFTITSADYDRVLEKLKKTATGWMTTINGKELKVEGQITYYNRYKRQNVVKDLSVELDRLSEESVNNDISSWTKGRSGEALSLLKKRFSHRPVQEKFVCLNCGFETHADEQAALNIARSWLFLRSQEYKKYQTNKTTGNTDKRAFVETWQSFYRKKLKEVWKPAV

SEQ ID NO: 48484 - protein, 979 aa, synthetic construct
  REGION 1..979: note = engineered CasX variant
QEIKRINKIRRRLVKDSNTKKAGKTGPMKTLLVRVMTPDLRERLENLRKKPENIPQPISNTSRANLNKLLTDYTEMKKAILHVYWEEFQKDPVGLMSRVAQPASKKIDQNKLKPEMDEKGNLTTAGFACSQCGQPLFVYKLEQVSEKGKAYTNYFGRCNVAEHEKLILLAQLKPEKDSDEAVTYSLGKFGQRALDFYSIHVTKESTHPVKPLAQIAGNRYASAPVGKALSDACMGTIASFLSKYQDIIIEHQKVVKGNQKRLESLRELAGKENLEYPSVTLPPQPHTKEGVDAYNEVIARVRMWVNLNLWQKLKLSRDDAKPLLRLKGFPSFPLVERQANEVDWWDMVCNVKKLINEKKEDGKVFWQNLAGYKRQEALRPYLSSEEDRKKGKKFARYQLGDLLLHLEKKHGERDWGKVYDEAWERIDKKVEGLSKHIKLEEERRSEDAQSKAALTDWLRAKASFVIEGLKEADKDEFCRCELKLQKWYGDLRGKPFAIEAENSILDISGFSKQYNCAFIWQKDGVKKLNLYLIINYFKGGKLRFKKIKPEAFEANRFYTVINKKSGEIVPMEVNFNFDDPNLIILPLAFGKRQGREFIWNDLLSLETGSLQLANGRVIEKTLYNRRTRQDEPALFVALTFERREVLDSSNIKPMNLIGVDRGENIPAVIALTDPEGCPLSRFKDSLGNPTHILRIGESYKEKQRTIQAKKEVEQRRAGGYSRKYASKAKNLADDMVRNTARDLLYYAVTQDAMLIFENLSRGFGRQGKRTFMAERQYTRMEDWLTAKLAYEGLPSKTYLSKTLAQYTSKTCSNCGFTITSADYDRVLEKLKKTATGWMTTINGKELKVEGQITYYNRYKRQNVVKDLSVELDRLSEESVNNDISSWTKGRSGEALSLLKKRFSHRPVQEKFVCLNCGFETHADEQAALNIARSWLFLRSQEYKKYQTNKTTGNTDKRAFVETWQSFYRKKLKEVWKPAV

SEQ ID NO: 48485 - protein, 979 aa, synthetic construct
  REGION 1..979: note = engineered CasX variant
QEIKRINKIRRRLVKDSNTKKAGKTGPMKTLLVRVMTPDLRERLENLRKKPENIPQPISNTSRANLNKLLTDYTEMKKAILHVYWEEFQKDPVGLMSRVAQPASKKIDQNKLKPEMDEKGNLTTAGFACSQCGQPLFVYKLEQVSEKGKAYTNYFGRCNVAEHEKLILLAQLKPEKDSDEAVTYSLGKFGQRALDFYSIHVTKESTHPVKPLAQIAGNRYASVPVGKALSDACMGTIASFLSKYQDIIIEHQKVVKGNQKRLESLRELAGKENLEYPSVTLPPQPHTKEGVDAYNEVIARVRMWVNLNLWQKLKLSRDDAKPLLRLKGFPSFPLVERQANEVDWWDMVCNVKKLINEKKEDGKVFWQNLAGYKRQEALRPYLSSEEDRKKGKKFARYQLGDLLLHLEKKHGERDWGKVYDEAWERIDKKVEGLSKHIKLEEERRSEDAQSKAALTDWLRAKASFVIEGLKEADKDEFCRCELKLQKWYGDLRGKPFAIEAENSILDISGFSKQYNCAFIWQKDGVKKLNLYLIINYFKGGKLRFKKIKPEAFEANRFYTVINKKSGEIVPMEVNFNFDDPNLIILPLAFGKRQGREFIWNDLLSLETGSLQLANGRVIEKTLYNRRTRQDEPALFVALTFERREVLDSSNIKPMNLIGVDRGENIPAVIALTDPEGCPLSRFKDSLGNPTHILRIGESYKEKQRTIQAKKEVEQRRAGGYSRKYASKAKNLADDMVRNTARDLLYYAVTQDAMLIFENLSRGFGRQGKRTFMAERQYTRMEDWLTAKLAYEGLPSKTYLSKTLAQYTSKTCSNCGFTITSADYDRVLEKLKKTATGWMTTINGKELKVEGQITYYNRYKRQNVVKDLSVELDRLSEESVNNDISSWTKGRSGEALSLLKKRFSHRPVQEKFVCLNCGFETHADEQAALNIARSWLFLRSQEYKKYQTNKTTGNTDKRAFVETWQSFYRKKLKEVWKPAV

SEQ ID NO: 48486 - protein, 979 aa, synthetic construct
  REGION 1..979: note = engineered CasX variant
QEIKRINKIRRRLVKDSNTKKAGKTGPMKTLLVRVMTPDLRERLENLRKKPENIPQPISNTSRANLNKLLTDYTEMKKAILHVYWEEFQKDPVGLMSRVAQPASKKIDQNKLKPEMDEKGNLTTAGFACSQCGQPLFVYKLEQVSEKGKAYTNYFGRCNVAEHEKLIKLAQLKPEKDSDEAVTYSLGKFGQRALDFYSIHVTKESTHPVKPLAQIAGNRYASGPVGKALSDACMGTIASFLSKYQDIIIEHQKVVKGNQKRLESLRELAGKENLEYPSVTLPPQPHTKEGVDAYNEVIARVRMWVNLNLWQKLKLSRDDAKPLLRLKGFPSFPLVERQANEVDWWDMVCNVKKLINEKKEDGKVFWQNLAGYKRQEALRPYLSSEEDRKKGKKFARYQLGDLLLHLEKKHGERDWGKVYDEAWERIDKKVEGLSKHIKLEEERRSEDAQSKAALTDWLRAKASFVIEGLKEADKDEFCRCELKLQKWYGDLRGKPFAIEAENSILDISGFSKQYNCAFIWQKDGVKKLNLYLIINYFKGGKLRFKKIKPEAFEANRFYTVINKKSGEIVPMEVNFNFDDPNLIILPLAFGKRQGREFIWNDLLSLETGSLQLANGRVIEKTLYNRRTRQDEPALFVALTFERREVLDSSNIKPMNLIGVDRGENIPAVIALTDPEGCPLSRFKDSLGNPTHILRIGESYKEKQRTIQAKKEVEQRRAGGYSRKYASKAKNLADDMVRNTARDLLYYAVTQDAMLIFENLSRGFGRQGKRTFMAERQYTRMEDWLTAKLAYEGLPSKTYLSKTLAQYTSKTCSNCGFTITSADYDRVLEKLKKTATGWMTTINGKELKVEGQITYYNRYKRQNVVKDLSVELDRLSEESVNNDISSWTKGRSGEALSLLKKRFSHRPVQEKFVCLNCGFETHADEQAALNIARSWLFLRSQEYKKYQTNKTTGNTDKRAFVETWQSFYRKKLKEVWKPAV

SEQ ID NO: 48487 - protein, 978 aa, synthetic construct
  REGION 1..978: note = engineered CasX variant
QEIKRINKIRRRLVKDSNTKKAGKTGPMKTLLVRVMTPDLRERLENLRKKPENIPQPISNTSRANLNKLLTDYTEMKKAILHVYWEEFQKDPVGLMSRVAQPASKKIDQNKLKPEMDEKGNLTTAGFACSQCGQPLFVYKLEQVSEKGKAYTNYFGRCNVAEHEKLILLAQLKPEKDSDEAVTYSLGKFGQRALDFYSIHVTKESTHPVKPLAQIAGNRYASPVGKALSDACMGTIASFLSKYQDIIIEHQKVVKGNQKRLESLRELAGKENLEYPSVTLPPQPHTKEGVDAYNEVIARVRMWVNLNLWQKLKLSRDDAKPLLRLKGFPSFPLVERQANEVDWWDMVCNVKKLINEKKEDGKVFWQNLAGYKRQEALRPYLSSEEDRKKGKKFARYQLGDLLLHLEKKHGERDWGKVYDEAWERIDKKVEGLSKHIKLEEERRSEDAQSKAALTDWLRAKASFVIEGLKEADKDEFCRCELKLQKWYGDLRGKPFAIEAENSILDISGFSKQYNCAFIWQKDGVKKLNLYLIINYFKGGKLRFKKIKPEAFEANRFYTVINKKSGEIVPMEVNFNFDDPNLIILPLAFGKRQGREFIWNDLLSLETGSLQLANGRVIEKTLYNRRTRQDEPALFVALTFERREVLDSSNIKPMNLIGVDRGENIPAVIALTDPEGCPLSRFKDSLGNPTHILRIGESYKEKQRTIQAKKEVEQRRAGGYSRKYASKAKNLADDMVRNTARDLLYYAVTQDAMLIFENLSRGFGRQGKRTFMAERQYTRMEDWLTAKLAYEGLPSKTYLSKTLAQYTSKTCSNCGFTITSADYDRVLEKLKKTATGWMTTINGKELKVEGQITYYNRYKRQNVVKDLSVELDRLSEESVNNDISSWTKGRSGEALSLLKKRFSHRPVQEKFVCLNCGFETHADEQAALNIARSWLFLRSQEYKKYQTNKTTGNTDKRAFVETWQSFYRKKLKEVWKPAV

SEQ ID NO: 48488 - protein, 979 aa, synthetic construct
  REGION 1..979: note = engineered CasX variant
QEIKRINKIRRRLVKDSNTKKAGKTGPMKTLLVRVMTPDLRERLENLRKKPENIPQPISNTSRANLNKLLTDYTEMKKAILHVYWEEFQKDPVGLMSRVAQPASKKIDQNKLKPEMDEKGNLTTAGFACSQCGQPLFVYKLEQVSEKGKAYTNYFGRCNVAEHEKLILLAQLKPEKDSDEAVTYSLGKFGQRALDFYSIHVTKESTHPVKPLAQIAGNRYASYPVGKALSDACMGTIASFLSKYQDIIIEHQKVVKGNQKRLESLRELAGKENLEYPSVTLPPQPHTKEGVDAYNEVIARVRMWVNLNLWQKLKLSRDDAKPLLRLKGFPSFPLVERQANEVDWWDMVCNVKKLINEKKEDGKVFWQNLAGYKRQEALRPYLSSEEDRKKGKKFARYQLGDLLLHLEKKHGEYDWGKVYDEAWERIDKKVEGLSKHIKLEEERRSEDAQSKAALTDWLRAKASFVIEGLKEADKDEFCRCELKLQKWYGDLRGKPFAIEAENSILDISGFSKQYNCAFIWQKDGVKKLNLYLIINYFKGGKLRFKKIKPEAFEANRFYTVINKKSGEIVPMEVNFNFDDPNLIILPLAFGKRQGREFIWNDLLSLETGSLQLANGRVIEKTLYNRRTRQDEPALFVALTFERREVLDSSNIKPMNLIGVDRGENIPAVIALTDPEGCPLSRFKDSLGNPTHILRIGESYKEKQRTIQAKKEVEQRRAGGYSRKYASKAKNLADDMVRNTARDLLYYAVTQDAMLIFENLSRGFGRQGKRTFMAERQYTRMEDWLTAKLAYEGLPSKTYLSKTLAQYTSKTCSNCGFTITSADYDRVLEKLKKTATGWMTTINGKELKVEGQITYYNRYKRQNVVKDLSVELDRLSEESVNNDISSWTKGRSGEALSLLKKRFSHRPVQEKFVCLNCGFETHADEQAALNIARSWLFLRSQEYKKYQTNKTTGNTDKRAFVETWQSFYRKKLKEVWKPAV

SEQ ID NO: 48489 - protein, 979 aa, synthetic construct
  REGION 1..979: note = engineered CasX variant
QEIKRINKIRRRLVKDSNTKKAGKTGPMKTLLVRVMTPDLRERLENLRKKPENIPQPISNTSRANLNKLLTDYTEMKKAILHVYWEEFQKDPVGLMSRVAQPASKKIDQNKLKPEMDEKGNLTTAGFACSQCGQPLFVYKLEQVSEKGKAYTNYFGRCNVAEHEKLILLAQLKPEKDSDEAVTYSLGKFGQRALDFYSIHVTKESTHPVKPLAQIAGNRYASHPVGKALSDACMGTIASFLSKYQDIIIEHQKVVKGNQKRLESLRELAGKENLEYPSVTLPPQPHTKEGVDAYNEVIARVRMWVNLNLWQKLKLSRDDAKPLLRLKGFPSFPLVERQANEVDWWDMVCNVKKLINEKKEDGKVFWQNLAGYKRQEALRPYLSSEEDRKKGKKFARYQLGDLLLHLEKKHGEYDWGKVYDEAWERIDKKVEGLSKHIKLEEERRSEDAQSKAALTDWLRAKASFVIEGLKEADKDEFCRCELKLQKWYGDLRGKPFAIEAENSILDISGFSKQYNCAFIWQKDGVKKLNLYLIINYFKGGKLRFKKIKPEAFEANRFYTVINKKSGEIVPMEVNFNFDDPNLIILPLAFGKRQGREFIWNDLLSLETGSLQLANGRVIEKTLYNRRTRQDEPALFVALTFERREVLDSSNIKPMNLIGVDRGENIPAVIALTDPEGCPLSRFKDSLGNPTHILRIGESYKEKQRTIQAKKEVEQRRAGGYSRKYASKAKNLADDMVRNTARDLLYYAVTQDAMLIFENLSRGFGRQGKRTFMAERQYTRMEDWLTAKLAYEGLPSKTYLSKTLAQYTSKTCSNCGFTITSADYDRVLEKLKKTATGWMTTINGKELKVEGQITYYNRYKRQNVVKDLSVELDRLSEESVNNDISSWTKGRSGEALSLLKKRFSHRPVQEKFVCLNCGFETHADEQAALNIARSWLFLRSQEYKKYQTNKTTGNTDKRAFVETWQSFYRKKLKEVWKPAV

SEQ ID NO: 48490 - protein, 979 aa, synthetic construct
  REGION 1..979: note = engineered CasX variant
QEIKRINKIRRRLVKDSNTKKAGKTGPMKTLLVRVMTPDLRERLENLRKKPENIPQPISNTSRANLNKLLTDYTEMKKAILHVYWEEFQKDPVGLMSRVAQPASKKIDQNKLKPEMDEKGNLTTAGFACSQCGQPLFVYKLEQVSEKGKAYTNYFGRCNVAEHEKLILLAQLKPEKDSDEAVTYSLGKFGQRALDFYSIHVTKESTHPVKPLAQIAGNRYASSPVGKALSDACMGTIASFLSKYQDIIIEHQKVVKGNQKRLESLRELAGKENLEYPSVTLPPQPHTKEGVDAYNEVIARVRMWVNLNLWQKLKLSRDDAKPLLRLKGFPSFPLVERQANEVDWWDMVCNVKKLINEKKEDGKVFWQNLAGYKRQEALRPYLSSEEDRKKGKKFARYQLGDLLLHLEKKHGEYDWGKVYDEAWERIDKKVEGLSKHIKLEEERRSEDAQSKAALTDWLRAKASFVIEGLKEADKDEFCRCELKLQKWYGDLRGKPFAIEAENSILDISGFSKQYNCAFIWQKDGVKKLNLYLIINYFKGGKLRFKKIKPEAFEANRFYTVINKKSGEIVPMEVNFNFDDPNLIILPLAFGKRQGREFIWNDLLSLETGSLQLANGRVIEKTLYNRRTRQDEPALFVALTFERREVLDSSNIKPMNLIGVDRGENIPAVIALTDPEGCPLSRFKDSLGNPTHILRIGESYKEKQRTIQAKKEVEQRRAGGYSRKYASKAKNLADDMVRNTARDLLYYAVTQDAMLIFENLSRGFGRQGKRTFMAERQYTRMEDWLTAKLAYEGLPSKTYLSKTLAQYTSKTCSNCGFTITSADYDRVLEKLKKTATGWMTTINGKELKVEGQITYYNRYKRQNVVKDLSVELDRLSEESVNNDISSWTKGRSGEALSLLKKRFSHRPVQEKFVCLNCGFETHADEQAALNIARSWLFLRSQEYKKYQTNKTTGNTDKRAFVETWQSFYRKKLKEVWKPAV

SEQ ID NO: 48491 - protein, 979 aa, synthetic construct
  REGION 1..979: note = engineered CasX variant
QEIKRINKIRRRLVKDSNTKKAGKTGPMKTLLVRVMTPDLRERLENLRKKPENIPQPISNTSRANLNKLLTDYTEMKKAILHVYWEEFQKDPVGLMSRVAQPASKKIDQNKLKPEMDEKGNLTTAGFACSQCGQPLFVYKLEQVSEKGKAYTNYFGRCNVAEHEKLILLAQLKPEKDSDEAVTYSLGKFGQRALDFYSIHVTKESTHPVKPLAQIAGNRYASTPVGKALSDACMGTIASFLSKYQDIIIEHQKVVKGNQKRLESLRELAGKENLEYPSVTLPPQPHTKEGVDAYNEVIARVRMWVNLNLWQKLKLSRDDAKPLLRLKGFPSFPLVERQANEVDWWDMVCNVKKLINEKKEDGKVFWQNLAGYKRQEALRPYLSSEEDRKKGKKFARYQLGDLLLHLEKKHGEYDWGKVYDEAWERIDKKVEGLSKHIKLEEERRSEDAQSKAALTDWLRAKASFVIEGLKEADKDEFCRCELKLQKWYGDLRGKPFAIEAENSILDISGFSKQYNCAFIWQKDGVKKLNLYLIINYFKGGKLRFKKIKPEAFEANRFYTVINKKSGEIVPMEVNFNFDDPNLIILPLAFGKRQGREFIWNDLLSLETGSLQLANGRVIEKTLYNRRTRQDEPALFVALTFERREVLDSSNIKPMNLIGVDRGENIPAVIALTDPEGCPLSRFKDSLGNPTHILRIGESYKEKQRTIQAKKEVEQRRAGGYSRKYASKAKNLADDMVRNTARDLLYYAVTQDAMLIFENLSRGFGRQGKRTFMAERQYTRMEDWLTAKLAYEGLPSKTYLSKTLAQYTSKTCSNCGFTITSADYDRVLEKLKKTATGWMTTINGKELKVEGQITYYNRYKRQNVVKDLSVELDRLSEESVNNDISSWTKGRSGEALSLLKKRFSHRPVQEKFVCLNCGFETHADEQAALNIARSWLFLRSQEYKKYQTNKTTGNTDKRAFVETWQSFYRKKLKEVWKPAV

SEQ ID NO: 48492 - protein, 979 aa, synthetic construct
  REGION 1..979: note = engineered CasX variant
QEIKRINKIRRRLVKDSNTKKAGKTGPMKTLLVRVMTPDLRERLENLRKKPENIPQPISNTSRANLNKLLTDYTEMKKAILHVYWEEFQKDPVGLMSRVAQPASKKIDQNKLKPEMDEKGNLTTAGFACSQCGQPLFVYKLEQVSEKGKAYTNYFGRCNVAEHEKLILLAQLKPEKDSDEAVTYSLGKFGQRALDFYSIHVTKESTHPVKPLAQIAGNRYASAPVGKALSDACMGTIASFLSKYQDIIIEHQKVVKGNQKRLESLRELAGKENLEYPSVTLPPQPHTKEGVDAYNEVIARVRMWVNLNLWQKLKLSRDDAKPLLRLKGFPSFPLVERQANEVDWWDMVCNVKKLINEKKEDGKVFWQNLAGYKRQEALRPYLSSEEDRKKGKKFARYQLGDLLLHLEKKHGEYDWGKVYDEAWERIDKKVEGLSKHIKLEEERRSEDAQSKAALTDWLRAKASFVIEGLKEADKDEFCRCELKLQKWYGDLRGKPFAIEAENSILDISGFSKQYNCAFIWQKDGVKKLNLYLIINYFKGGKLRFKKIKPEAFEANRFYTVINKKSGEIVPMEVNFNFDDPNLIILPLAFGKRQGREFIWNDLLSLETGSLQLANGRVIEKTLYNRRTRQDEPALFVALTFERREVLDSSNIKPMNLIGVDRGENIPAVIALTDPEGCPLSRFKDSLGNPTHILRIGESYKEKQRTIQAKKEVEQRRAGGYSRKYASKAKNLADDMVRNTARDLLYYAVTQDAMLIFENLSRGFGRQGKRTFMAERQYTRMEDWLTAKLAYEGLPSKTYLSKTLAQYTSKTCSNCGFTITSADYDRVLEKLKKTATGWMTTINGKELKVEGQITYYNRYKRQNVVKDLSVELDRLSEESVNNDISSWTKGRSGEALSLLKKRFSHRPVQEKFVCLNCGFETHADEQAALNIARSWLFLRSQEYKKYQTNKTTGNTDKRAFVETWQSFYRKKLKEVWKPAV

SEQ ID NO: 48493 - protein, 979 aa, synthetic construct
  REGION 1..979: note = engineered CasX variant
QEIKRINKIRRRLVKDSNTKKAGKTGPMKTLLVRVMTPDLRERLENLRKKPENIPQPISNTSRANLNKLLTDYTEMKKAILHVYWEEFQKDPVGLMSRVAQPASKKIDQNKLKPEMDEKGNLTTAGFACSQCGQPLFVYKLEQVSEKGKAYTNYFGRCNVAEHEKLILLAQLKPEKDSDEAVTYSLGKFGQRALDFYSIHVTKESTHPVKPLAQIAGNRYASVPVGKALSDACMGTIASFLSKYQDIIIEHQKVVKGNQKRLESLRELAGKENLEYPSVTLPPQPHTKEGVDAYNEVIARVRMWVNLNLWQKLKLSRDDAKPLLRLKGFPSFPLVERQANEVDWWDMVCNVKKLINEKKEDGKVFWQNLAGYKRQEALRPYLSSEEDRKKGKKFARYQLGDLLLHLEKKHGEYDWGKVYDEAWERIDKKVEGLSKHIKLEEERRSEDAQSKAALTDWLRAKASFVIEGLKEADKDEFCRCELKLQKWYGDLRGKPFAIEAENSILDISGFSKQYNCAFIWQKDGVKKLNLYLIINYFKGGKLRFKKIKPEAFEANRFYTVINKKSGEIVPMEVNFNFDDPNLIILPLAFGKRQGREFIWNDLLSLETGSLQLANGRVIEKTLYNRRTRQDEPALFVALTFERREVLDSSNIKPMNLIGVDRGENIPAVIALTDPEGCPLSRFKDSLGNPTHILRIGESYKEKQRTIQAKKEVEQRRAGGYSRKYASKAKNLADDMVRNTARDLLYYAVTQDAMLIFENLSRGFGRQGKRTFMAERQYTRMEDWLTAKLAYEGLPSKTYLSKTLAQYTSKTCSNCGFTITSADYDRVLEKLKKTATGWMTTINGKELKVEGQITYYNRYKRQNVVKDLSVELDRLSEESVNNDISSWTKGRSGEALSLLKKRFSHRPVQEKFVCLNCGFETHADEQAALNIARSWLFLRSQEYKKYQTNKTTGNTDKRAFVETWQSFYRKKLKEVWKPAV

SEQ ID NO: 48494 - protein, 979 aa, synthetic construct
  REGION 1..979: note = engineered CasX variant
QEIKRINKIRRRLVKDSNTKKAGKTGPMKTLLVRVMTPDLRERLENLRKKPENIPQPISNTSRANLNKLLTDYTEMKKAILHVYWEEFQKDPVGLMSRVAQPASKKIDQNKLKPEMDEKGNLTTAGFACSQCGQPLFVYKLEQVSEKGKAYTNYFGRCNVAEHEKLIKLAQLKPEKDSDEAVTYSLGKFGQRALDFYSIHVTKESTHPVKPLAQIAGNRYASGPVGKALSDACMGTIASFLSKYQDIIIEHQKVVKGNQKRLESLRELAGKENLEYPSVTLPPQPHTKEGVDAYNEVIARVRMWVNLNLWQKLKLSRDDAKPLLRLKGFPSFPLVERQANEVDWWDMVCNVKKLINEKKEDGKVFWQNLAGYKRQEALRPYLSSEEDRKKGKKFARYQLGDLLLHLEKKHGEYDWGKVYDEAWERIDKKVEGLSKHIKLEEERRSEDAQSKAALTDWLRAKASFVIEGLKEADKDEFCRCELKLQKWYGDLRGKPFAIEAENSILDISGFSKQYNCAFIWQKDGVKKLNLYLIINYFKGGKLRFKKIKPEAFEANRFYTVINKKSGEIVPMEVNFNFDDPNLIILPLAFGKRQGREFIWNDLLSLETGSLQLANGRVIEKTLYNRRTRQDEPALFVALTFERREVLDSSNIKPMNLIGVDRGENIPAVIALTDPEGCPLSRFKDSLGNPTHILRIGESYKEKQRTIQAKKEVEQRRAGGYSRKYASKAKNLADDMVRNTARDLLYYAVTQDAMLIFENLSRGFGRQGKRTFMAERQYTRMEDWLTAKLAYEGLPSKTYLSKTLAQYTSKTCSNCGFTITSADYDRVLEKLKKTATGWMTTINGKELKVEGQITYYNRYKRQNVVKDLSVELDRLSEESVNNDISSWTKGRSGEALSLLKKRFSHRPVQEKFVCLNCGFETHADEQAALNIARSWLFLRSQEYKKYQTNKTTGNTDKRAFVETWQSFYRKKLKEVWKPAV

SEQ ID NO: 48495 - protein, 978 aa, synthetic construct
  REGION 1..978: note = engineered CasX variant
QEIKRINKIRRRLVKDSNTKKAGKTGPMKTLLVRVMTPDLRERLENLRKKPENIPQPISNTSRANLNKLLTDYTEMKKAILHVYWEEFQKDPVGLMSRVAQPASKKIDQNKLKPEMDEKGNLTTAGFACSQCGQPLFVYKLEQVSEKGKAYTNYFGRCNVAEHEKLILLAQLKPEKDSDEAVTYSLGKFGQRALDFYSIHVTKESTHPVKPLAQIAGNRYASPVGKALSDACMGTIASFLSKYQDIIIEHQKVVKGNQKRLESLRELAGKENLEYPSVTLPPQPHTKEGVDAYNEVIARVRMWVNLNLWQKLKLSRDDAKPLLRLKGFPSFPLVERQANEVDWWDMVCNVKKLINEKKEDGKVFWQNLAGYKRQEALRPYLSSEEDRKKGKKFARYQLGDLLLHLEKKHGEYDWGKVYDEAWERIDKKVEGLSKHIKLEEERRSEDAQSKAALTDWLRAKASFVIEGLKEADKDEFCRCELKLQKWYGDLRGKPFAIEAENSILDISGFSKQYNCAFIWQKDGVKKLNLYLIINYFKGGKLRFKKIKPEAFEANRFYTVINKKSGEIVPMEVNFNFDDPNLIILPLAFGKRQGREFIWNDLLSLETGSLQLANGRVIEKTLYNRRTRQDEPALFVALTFERREVLDSSNIKPMNLIGVDRGENIPAVIALTDPEGCPLSRFKDSLGNPTHILRIGESYKEKQRTIQAKKEVEQRRAGGYSRKYASKAKNLADDMVRNTARDLLYYAVTQDAMLIFENLSRGFGRQGKRTFMAERQYTRMEDWLTAKLAYEGLPSKTYLSKTLAQYTSKTCSNCGFTITSADYDRVLEKLKKTATGWMTTINGKELKVEGQITYYNRYKRQNVVKDLSVELDRLSEESVNNDISSWTKGRSGEALSLLKKRFSHRPVQEKFVCLNCGFETHADEQAALNIARSWLFLRSQEYKKYQTNKTTGNTDKRAFVETWQSFYRKKLKEVWKPAV

SEQ ID NO: 48496 - protein, 978 aa, synthetic construct
  REGION 1..978: note = engineered CasX variant
QEIKRINKIRRRLVKDSNTKKAGKTGPMKTLLVRVMTPDLRERLENLRKKPENIPQPISNTSRANLNKLLTDYTEMKKAILHVYWEEFQKDPVGLMSRVAQPASKKIDQNKLKPEMDEKGNLTTAGFACSQCGQPLFVYKLEQVSEKGKAYTNYFGRCNVAEHEKLILLAQLKPEKDSDEAVTYSLGKFGQRALDFYSIHVTKESTHPVKPLAQIAGNRYASYPVGKALSDACMGTIASFLSKYQDIIIEHQKVVKGNQKRLESLRELAGKENLEYPSVTLPPQPHTKEGVDAYNEVIARVRMWVNLNLWQKLKLSRDDAKPLLRLKGFPSFPLVERQANEVDWWDMVCNVKKLINEKKEDGKVFWQNLAGYKRQEALRPYLSSEEDRKKGKKFARYQLGDLLLHLEKKHGEDWGDVYDEAWERIDKKVEGLSKHIKLEEERRSEDAQSKAALTDWLRAKASFVIEGLKEADKDEFCRCELKLQKWYGDLRGKPFAIEAENSILDISGFSKQYNCAFIWQKDGVKKLNLYLIINYFKGGKLRFKKIKPEAFEANRFYTVINKKSGEIVPMEVNFNFDDPNLIILPLAFGKRQGREFIWNDLLSLETGSLQLANGRVIEKTLYNRRTRQDEPALFVALTFERREVLDSSNIKPMNLIGVDRGENIPAVIALTDPEGCPLSRFKDSLGNPTHILRIGESYKEKQRTIQAKKEVEQRRAGGYSRKYASKAKNLADDMVRNTARDLLYYAVTQDAMLIFENLSRGFGRQGKRTFMAERQYTRMEDWLTAKLAYEGLPSKTYLSKTLAQYTSKTCSNCGFTITSADYDRVLEKLKKTATGWMTTINGKELKVEGQITYYNRYKRQNVVKDLSVELDRLSEESVNNDISSWTKGRSGEALSLLKKRFSHRPVQEKFVCLNCGFETHADEQAALNIARSWLFLRSQEYKKYQTNKTTGNTDKRAFVETWQSFYRKKLKEVWKPAV

SEQ ID NO: 48497 - protein, 978 aa, synthetic construct
  REGION 1..978: note = engineered CasX variant
QEIKRINKIRRRLVKDSNTKKAGKTGPMKTLLVRVMTPDLRERLENLRKKPENIPQPISNTSRANLNKLLTDYTEMKKAILHVYWEEFQKDPVGLMSRVAQPASKKIDQNKLKPEMDEKGNLTTAGFACSQCGQPLFVYKLEQVSEKGKAYTNYFGRCNVAEHEKLILLAQLKPEKDSDEAVTYSLGKFGQRALDFYSIHVTKESTHPVKPLAQIAGNRYASHPVGKALSDACMGTIASFLSKYQDIIIEHQKVVKGNQKRLESLRELAGKENLEYPSVTLPPQPHTKEGVDAYNEVIARVRMWVNLNLWQKLKLSRDDAKPLLRLKGFPSFPLVERQANEVDWWDMVCNVKKLINEKKEDGKVFWQNLAGYKRQEALRPYLSSEEDRKKGKKFARYQLGDLLLHLEKKHGEDWGDVYDEAWERIDKKVEGLSKHIKLEEERRSEDAQSKAALTDWLRAKASFVIEGLKEADKDEFCRCELKLQKWYGDLRGKPFAIEAENSILDISGFSKQYNCAFIWQKDGVKKLNLYLIINYFKGGKLRFKKIKPEAFEANRFYTVINKKSGEIVPMEVNFNFDDPNLIILPLAFGKRQGREFIWNDLLSLETGSLQLANGRVIEKTLYNRRTRQDEPALFVALTFERREVLDSSNIKPMNLIGVDRGENIPAVIALTDPEGCPLSRFKDSLGNPTHILRIGESYKEKQRTIQAKKEVEQRRAGGYSRKYASKAKNLADDMVRNTARDLLYYAVTQDAMLIFENLSRGFGRQGKRTFMAERQYTRMEDWLTAKLAYEGLPSKTYLSKTLAQYTSKTCSNCGFTITSADYDRVLEKLKKTATGWMTTINGKELKVEGQITYYNRYKRQNVVKDLSVELDRLSEESVNNDISSWTKGRSGEALSLLKKRFSHRPVQEKFVCLNCGFETHADEQAALNIARSWLFLRSQEYKKYQTNKTTGNTDKRAFVETWQSFYRKKLKEVWKPAV

SEQ ID NO: 48498 - protein, 978 aa, synthetic construct
  REGION 1..978: note = engineered CasX variant
QEIKRINKIRRRLVKDSNTKKAGKTGPMKTLLVRVMTPDLRERLENLRKKPENIPQPISNTSRANLNKLLTDYTEMKKAILHVYWEEFQKDPVGLMSRVAQPASKKIDQNKLKPEMDEKGNLTTAGFACSQCGQPLFVYKLEQVSEKGKAYTNYFGRCNVAEHEKLILLAQLKPEKDSDEAVTYSLGKFGQRALDFYSIHVTKESTHPVKPLAQIAGNRYASSPVGKALSDACMGTIASFLSKYQDIIIEHQKVVKGNQKRLESLRELAGKENLEYPSVTLPPQPHTKEGVDAYNEVIARVRMWVNLNLWQKLKLSRDDAKPLLRLKGFPSFPLVERQANEVDWWDMVCNVKKLINEKKEDGKVFWQNLAGYKRQEALRPYLSSEEDRKKGKKFARYQLGDLLLHLEKKHGEDWGDVYDEAWERIDKKVEGLSKHIKLEEERRSEDAQSKAALTDWLRAKASFVIEGLKEADKDEFCRCELKLQKWYGDLRGKPFAIEAENSILDISGFSKQYNCAFIWQKDGVKKLNLYLIINYFKGGKLRFKKIKPEAFEANRFYTVINKKSGEIVPMEVNFNFDDPNLIILPLAFGKRQGREFIWNDLLSLETGSLQLANGRVIEKTLYNRRTRQDEPALFVALTFERREVLDSSNIKPMNLIGVDRGENIPAVIALTDPEGCPLSRFKDSLGNPTHILRIGESYKEKQRTIQAKKEVEQRRAGGYSRKYASKAKNLADDMVRNTARDLLYYAVTQDAMLIFENLSRGFGRQGKRTFMAERQYTRMEDWLTAKLAYEGLPSKTYLSKTLAQYTSKTCSNCGFTITSADYDRVLEKLKKTATGWMTTINGKELKVEGQITYYNRYKRQNVVKDLSVELDRLSEESVNNDISSWTKGRSGEALSLLKKRFSHRPVQEKFVCLNCGFETHADEQAALNIARSWLFLRSQEYKKYQTNKTTGNTDKRAFVETWQSFYRKKLKEVWKPAV

SEQ ID NO: 48499 - protein, 978 aa, synthetic construct
  REGION 1..978: note = engineered CasX variant
QEIKRINKIRRRLVKDSNTKKAGKTGPMKTLLVRVMTPDLRERLENLRKKPENIPQPISNTSRANLNKLLTDYTEMKKAILHVYWEEFQKDPVGLMSRVAQPASKKIDQNKLKPEMDEKGNLTTAGFACSQCGQPLFVYKLEQVSEKGKAYTNYFGRCNVAEHEKLILLAQLKPEKDSDEAVTYSLGKFGQRALDFYSIHVTKESTHPVKPLAQIAGNRYASTPVGKALSDACMGTIASFLSKYQDIIIEHQKVVKGNQKRLESLRELAGKENLEYPSVTLPPQPHTKEGVDAYNEVIARVRMWVNLNLWQKLKLSRDDAKPLLRLKGFPSFPLVERQANEVDWWDMVCNVKKLINEKKEDGKVFWQNLAGYKRQEALRPYLSSEEDRKKGKKFARYQLGDLLLHLEKKHGEDWGDVYDEAWERIDKKVEGLSKHIKLEEERRSEDAQSKAALTDWLRAKASFVIEGLKEADKDEFCRCELKLQKWYGDLRGKPFAIEAENSILDISGFSKQYNCAFIWQKDGVKKLNLYLIINYFKGGKLRFKKIKPEAFEANRFYTVINKKSGEIVPMEVNFNFDDPNLIILPLAFGKRQGREFIWNDLLSLETGSLQLANGRVIEKTLYNRRTRQDEPALFVALTFERREVLDSSNIKPMNLIGVDRGENIPAVIALTDPEGCPLSRFKDSLGNPTHILRIGESYKEKQRTIQAKKEVEQRRAGGYSRKYASKAKNLADDMVRNTARDLLYYAVTQDAMLIFENLSRGFGRQGKRTFMAERQYTRMEDWLTAKLAYEGLPSKTYLSKTLAQYTSKTCSNCGFTITSADYDRVLEKLKKTATGWMTTINGKELKVEGQITYYNRYKRQNVVKDLSVELDRLSEESVNNDISSWTKGRSGEALSLLKKRFSHRPVQEKFVCLNCGFETHADEQAALNIARSWLFLRSQEYKKYQTNKTTGNTDKRAFVETWQSFYRKKLKEVWKPAV

SEQ ID NO: 48500 - protein, 978 aa, synthetic construct
  REGION 1..978: note = engineered CasX variant
QEIKRINKIRRRLVKDSNTKKAGKTGPMKTLLVRVMTPDLRERLENLRKKPENIPQPISNTSRANLNKLLTDYTEMKKAILHVYWEEFQKDPVGLMSRVAQPASKKIDQNKLKPEMDEKGNLTTAGFACSQCGQPLFVYKLEQVSEKGKAYTNYFGRCNVAEHEKLILLAQLKPEKDSDEAVTYSLGKFGQRALDFYSIHVTKESTHPVKPLAQIAGNRYASAPVGKALSDACMGTIASFLSKYQDIIIEHQKVVKGNQKRLESLRELAGKENLEYPSVTLPPQPHTKEGVDAYNEVIARVRMWVNLNLWQKLKLSRDDAKPLLRLKGFPSFPLVERQANEVDWWDMVCNVKKLINEKKEDGKVFWQNLAGYKRQEALRPYLSSEEDRKKGKKFARYQLGDLLLHLEKKHGEDWGDVYDEAWERIDKKVEGLSKHIKLEEERRSEDAQSKAALTDWLRAKASFVIEGLKEADKDEFCRCELKLQKWYGDLRGKPFAIEAENSILDISGFSKQYNCAFIWQKDGVKKLNLYLIINYFKGGKLRFKKIKPEAFEANRFYTVINKKSGEIVPMEVNFNFDDPNLIILPLAFGKRQGREFIWNDLLSLETGSLQLANGRVIEKTLYNRRTRQDEPALFVALTFERREVLDSSNIKPMNLIGVDRGENIPAVIALTDPEGCPLSRFKDSLGNPTHILRIGESYKEKQRTIQAKKEVEQRRAGGYSRKYASKAKNLADDMVRNTARDLLYYAVTQDAMLIFENLSRGFGRQGKRTFMAERQYTRMEDWLTAKLAYEGLPSKTYLSKTLAQYTSKTCSNCGFTITSADYDRVLEKLKKTATGWMTTINGKELKVEGQITYYNRYKRQNVVKDLSVELDRLSEESVNNDISSWTKGRSGEALSLLKKRFSHRPVQEKFVCLNCGFETHADEQAALNIARSWLFLRSQEYKKYQTNKTTGNTDKRAFVETWQSFYRKKLKEVWKPAV

SEQ ID NO: 48501 - protein, 978 aa, synthetic construct
  REGION 1..978: note = engineered CasX variant
QEIKRINKIRRRLVKDSNTKKAGKTGPMKTLLVRVMTPDLRERLENLRKKPENIPQPISNTSRANLNKLLTDYTEMKKAILHVYWEEFQKDPVGLMSRVAQPASKKIDQNKLKPEMDEKGNLTTAGFACSQCGQPLFVYKLEQVSEKGKAYTNYFGRCNVAEHEKLILLAQLKPEKDSDEAVTYSLGKFGQRALDFYSIHVTKESTHPVKPLAQIAGNRYASVPVGKALSDACMGTIASFLSKYQDIIIEHQKVVKGNQKRLESLRELAGKENLEYPSVTLPPQPHTKEGVDAYNEVIARVRMWVNLNLWQKLKLSRDDAKPLLRLKGFPSFPLVERQANEVDWWDMVCNVKKLINEKKEDGKVFWQNLAGYKRQEALRPYLSSEEDRKKGKKFARYQLGDLLLHLEKKHGEDWGDVYDEAWERIDKKVEGLSKHIKLEEERRSEDAQSKAALTDWLRAKASFVIEGLKEADKDEFCRCELKLQKWYGDLRGKPFAIEAENSILDISGFSKQYNCAFIWQKDGVKKLNLYLIINYFKGGKLRFKKIKPEAFEANRFYTVINKKSGEIVPMEVNFNFDDPNLIILPLAFGKRQGREFIWNDLLSLETGSLQLANGRVIEKTLYNRRTRQDEPALFVALTFERREVLDSSNIKPMNLIGVDRGENIPAVIALTDPEGCPLSRFKDSLGNPTHILRIGESYKEKQRTIQAKKEVEQRRAGGYSRKYASKAKNLADDMVRNTARDLLYYAVTQDAMLIFENLSRGFGRQGKRTFMAERQYTRMEDWLTAKLAYEGLPSKTYLSKTLAQYTSKTCSNCGFTITSADYDRVLEKLKKTATGWMTTINGKELKVEGQITYYNRYKRQNVVKDLSVELDRLSEESVNNDISSWTKGRSGEALSLLKKRFSHRPVQEKFVCLNCGFETHADEQAALNIARSWLFLRSQEYKKYQTNKTTGNTDKRAFVETWQSFYRKKLKEVWKPAV

SEQ ID NO: 48502 - protein, 978 aa, synthetic construct
  REGION 1..978: note = engineered CasX variant
QEIKRINKIRRRLVKDSNTKKAGKTGPMKTLLVRVMTPDLRERLENLRKKPENIPQPISNTSRANLNKLLTDYTEMKKAILHVYWEEFQKDPVGLMSRVAQPASKKIDQNKLKPEMDEKGNLTTAGFACSQCGQPLFVYKLEQVSEKGKAYTNYFGRCNVAEHEKLIKLAQLKPEKDSDEAVTYSLGKFGQRALDFYSIHVTKESTHPVKPLAQIAGNRYASGPVGKALSDACMGTIASFLSKYQDIIIEHQKVVKGNQKRLESLRELAGKENLEYPSVTLPPQPHTKEGVDAYNEVIARVRMWVNLNLWQKLKLSRDDAKPLLRLKGFPSFPLVERQANEVDWWDMVCNVKKLINEKKEDGKVFWQNLAGYKRQEALRPYLSSEEDRKKGKKFARYQLGDLLLHLEKKHGEDWGDVYDEAWERIDKKVEGLSKHIKLEEERRSEDAQSKAALTDWLRAKASFVIEGLKEADKDEFCRCELKLQKWYGDLRGKPFAIEAENSILDISGFSKQYNCAFIWQKDGVKKLNLYLIINYFKGGKLRFKKIKPEAFEANRFYTVINKKSGEIVPMEVNFNFDDPNLIILPLAFGKRQGREFIWNDLLSLETGSLQLANGRVIEKTLYNRRTRQDEPALFVALTFERREVLDSSNIKPMNLIGVDRGENIPAVIALTDPEGCPLSRFKDSLGNPTHILRIGESYKEKQRTIQAKKEVEQRRAGGYSRKYASKAKNLADDMVRNTARDLLYYAVTQDAMLIFENLSRGFGRQGKRTFMAERQYTRMEDWLTAKLAYEGLPSKTYLSKTLAQYTSKTCSNCGFTITSADYDRVLEKLKKTATGWMTTINGKELKVEGQITYYNRYKRQNVVKDLSVELDRLSEESVNNDISSWTKGRSGEALSLLKKRFSHRPVQEKFVCLNCGFETHADEQAALNIARSWLFLRSQEYKKYQTNKTTGNTDKRAFVETWQSFYRKKLKEVWKPAV

SEQ ID NO: 48503 - protein, 977 aa, synthetic construct
  REGION 1..977: note = engineered CasX variant
QEIKRINKIRRRLVKDSNTKKAGKTGPMKTLLVRVMTPDLRERLENLRKKPENIPQPISNTSRANLNKLLTDYTEMKKAILHVYWEEFQKDPVGLMSRVAQPASKKIDQNKLKPEMDEKGNLTTAGFACSQCGQPLFVYKLEQVSEKGKAYTNYFGRCNVAEHEKLILLAQLKPEKDSDEAVTYSLGKFGQRALDFYSIHVTKESTHPVKPLAQIAGNRYASPVGKALSDACMGTIASFLSKYQDIIIEHQKVVKGNQKRLESLRELAGKENLEYPSVTLPPQPHTKEGVDAYNEVIARVRMWVNLNLWQKLKLSRDDAKPLLRLKGFPSFPLVERQANEVDWWDMVCNVKKLINEKKEDGKVFWQNLAGYKRQEALRPYLSSEEDRKKGKKFARYQLGDLLLHLEKKHGEDWGDVYDEAWERIDKKVEGLSKHIKLEEERRSEDAQSKAALTDWLRAKASFVIEGLKEADKDEFCRCELKLQKWYGDLRGKPFAIEAENSILDISGFSKQYNCAFIWQKDGVKKLNLYLIINYFKGGKLRFKKIKPEAFEANRFYTVINKKSGEIVPMEVNFNFDDPNLIILPLAFGKRQGREFIWNDLLSLETGSLQLANGRVIEKTLYNRRTRQDEPALFVALTFERREVLDSSNIKPMNLIGVDRGENIPAVIALTDPEGCPLSRFKDSLGNPTHILRIGESYKEKQRTIQAKKEVEQRRAGGYSRKYASKAKNLADDMVRNTARDLLYYAVTQDAMLIFENLSRGFGRQGKRTFMAERQYTRMEDWLTAKLAYEGLPSKTYLSKTLAQYTSKTCSNCGFTITSADYDRVLEKLKKTATGWMTTINGKELKVEGQITYYNRYKRQNVVKDLSVELDRLSEESVNNDISSWTKGRSGEALSLLKKRFSHRPVQEKFVCLNCGFETHADEQAALNIARSWLFLRSQEYKKYQTNKTTGNTDKRAFVETWQSFYRKKLKEVWKPAV

SEQ ID NO: 48504 - protein, 978 aa, synthetic construct
  REGION 1..978: note = engineered CasX variant
QEIKRINKIRRRLVKDSNTKKAGKTGPMKTLLVRVMTPDLRERLENLRKKPENIPQPISNTSRANLNKLLTDYTEMKKAILHVYWEEFQKDPVGLMSRVAQPASKKIDQNKLKPEMDEKGNLTTAGFACSQCGQPLFVYKLEQVSEKGKAYTNYFGRCNVAEHEKLILLAQLKPEKDSDEAVTYSLGKFGQRALDFYSIHVTKESTHPVKPLAQIAGNRYASYPVGKALSDACMGTIASFLSKYQDIIIEHQKVVKGNQKRLESLRELAGKENLEYPSVTLPPQPHTKEGVDAYNEVIARVRMWVNLNLWQKLKLSRDDAKPLLRLKGFPSFPLVERQANEVDWWDMVCNVKKLINEKKEDGKVFWQNLAGYKRQEALRPYLSSEEDRKKGKKFARYQLGDLLLHLEKKHGEDWGKVYGEAWERIDKKVEGLSKHIKLEEERRSEDAQSKAALTDWLRAKASFVIEGLKEADKDEFCRCELKLQKWYGDLRGKPFAIEAENSILDISGFSKQYNCAFIWQKDGVKKLNLYLIINYFKGGKLRFKKIKPEAFEANRFYTVINKKSGEIVPMEVNFNFDDPNLIILPLAFGKRQGREFIWNDLLSLETGSLQLANGRVIEKTLYNRRTRQDEPALFVALTFERREVLDSSNIKPMNLIGVDRGENIPAVIALTDPEGCPLSRFKDSLGNPTHILRIGESYKEKQRTIQAKKEVEQRRAGGYSRKYASKAKNLADDMVRNTARDLLYYAVTQDAMLIFENLSRGFGRQGKRTFMAERQYTRMEDWLTAKLAYEGLPSKTYLSKTLAQYTSKTCSNCGFTITSADYDRVLEKLKKTATGWMTTINGKELKVEGQITYYNRYKRQNVVKDLSVELDRLSEESVNNDISSWTKGRSGEALSLLKKRFSHRPVQEKFVCLNCGFETHADEQAALNIARSWLFLRSQEYKKYQTNKTTGNTDKRAFVETWQSFYRKKLKEVWKPAV

SEQ ID NO: 48505 - protein, 978 aa, synthetic construct
  REGION 1..978: note = engineered CasX variant
QEIKRINKIRRRLVKDSNTKKAGKTGPMKTLLVRVMTPDLRERLENLRKKPENIPQPISNTSRANLNKLLTDYTEMKKAILHVYWEEFQKDPVGLMSRVAQPASKKIDQNKLKPEMDEKGNLTTAGFACSQCGQPLFVYKLEQVSEKGKAYTNYFGRCNVAEHEKLILLAQLKPEKDSDEAVTYSLGKFGQRALDFYSIHVTKESTHPVKPLAQIAGNRYASHPVGKALSDACMGTIASFLSKYQDIIIEHQKVVKGNQKRLESLRELAGKENLEYPSVTLPPQPHTKEGVDAYNEVIARVRMWVNLNLWQKLKLSRDDAKPLLRLKGFPSFPLVERQANEVDWWDMVCNVKKLINEKKEDGKVFWQNLAGYKRQEALRPYLSSEEDRKKGKKFARYQLGDLLLHLEKKHGEDWGKVYGEAWERIDKKVEGLSKHIKLEEERRSEDAQSKAALTDWLRAKASFVIEGLKEADKDEFCRCELKLQKWYGDLRGKPFAIEAENSILDISGFSKQYNCAFIWQKDGVKKLNLYLIINYFKGGKLRFKKIKPEAFEANRFYTVINKKSGEIVPMEVNFNFDDPNLIILPLAFGKRQGREFIWNDLLSLETGSLQLANGRVIEKTLYNRRTRQDEPALFVALTFERREVLDSSNIKPMNLIGVDRGENIPAVIALTDPEGCPLSRFKDSLGNPTHILRIGESYKEKQRTIQAKKEVEQRRAGGYSRKYASKAKNLADDMVRNTARDLLYYAVTQDAMLIFENLSRGFGRQGKRTFMAERQYTRMEDWLTAKLAYEGLPSKTYLSKTLAQYTSKTCSNCGFTITSADYDRVLEKLKKTATGWMTTINGKELKVEGQITYYNRYKRQNVVKDLSVELDRLSEESVNNDISSWTKGRSGEALSLLKKRFSHRPVQEKFVCLNCGFETHADEQAALNIARSWLFLRSQEYKKYQTNKTTGNTDKRAFVETWQSFYRKKLKEVWKPAV

SEQ ID NO: 48506 - protein, 978 aa, synthetic construct
  REGION 1..978: note = engineered CasX variant
QEIKRINKIRRRLVKDSNTKKAGKTGPMKTLLVRVMTPDLRERLENLRKKPENIPQPISNTSRANLNKLLTDYTEMKKAILHVYWEEFQKDPVGLMSRVAQPASKKIDQNKLKPEMDEKGNLTTAGFACSQCGQPLFVYKLEQVSEKGKAYTNYFGRCNVAEHEKLILLAQLKPEKDSDEAVTYSLGKFGQRALDFYSIHVTKESTHPVKPLAQIAGNRYASSPVGKALSDACMGTIASFLSKYQDIIIEHQKVVKGNQKRLESLRELAGKENLEYPSVTLPPQPHTKEGVDAYNEVIARVRMWVNLNLWQKLKLSRDDAKPLLRLKGFPSFPLVERQANEVDWWDMVCNVKKLINEKKEDGKVFWQNLAGYKRQEALRPYLSSEEDRKKGKKFARYQLGDLLLHLEKKHGEDWGKVYGEAWERIDKKVEGLSKHIKLEEERRSEDAQSKAALTDWLRAKASFVIEGLKEADKDEFCRCELKLQKWYGDLRGKPFAIEAENSILDISGFSKQYNCAFIWQKDGVKKLNLYLIINYFKGGKLRFKKIKPEAFEANRFYTVINKKSGEIVPMEVNFNFDDPNLIILPLAFGKRQGREFIWNDLLSLETGSLQLANGRVIEKTLYNRRTRQDEPALFVALTFERREVLDSSNIKPMNLIGVDRGENIPAVIALTDPEGCPLSRFKDSLGNPTHILRIGESYKEKQRTIQAKKEVEQRRAGGYSRKYASKAKNLADDMVRNTARDLLYYAVTQDAMLIFENLSRGFGRQGKRTFMAERQYTRMEDWLTAKLAYEGLPSKTYLSKTLAQYTSKTCSNCGFTITSADYDRVLEKLKKTATGWMTTINGKELKVEGQITYYNRYKRQNVVKDLSVELDRLSEESVNNDISSWTKGRSGEALSLLKKRFSHRPVQEKFVCLNCGFETHADEQAALNIARSWLFLRSQEYKKYQTNKTTGNTDKRAFVETWQSFYRKKLKEVWKPAV

SEQ ID NO: 48507 - protein, 978 aa, synthetic construct
  REGION 1..978: note = engineered CasX variant
QEIKRINKIRRRLVKDSNTKKAGKTGPMKTLLVRVMTPDLRERLENLRKKPENIPQPISNTSRANLNKLLTDYTEMKKAILHVYWEEFQKDPVGLMSRVAQPASKKIDQNKLKPEMDEKGNLTTAGFACSQCGQPLFVYKLEQVSEKGKAYTNYFGRCNVAEHEKLILLAQLKPEKDSDEAVTYSLGKFGQRALDFYSIHVTKESTHPVKPLAQIAGNRYASTPVGKALSDACMGTIASFLSKYQDIIIEHQKVVKGNQKRLESLRELAGKENLEYPSVTLPPQPHTKEGVDAYNEVIARVRMWVNLNLWQKLKLSRDDAKPLLRLKGFPSFPLVERQANEVDWWDMVCNVKKLINEKKEDGKVFWQNLAGYKRQEALRPYLSSEEDRKKGKKFARYQLGDLLLHLEKKHGEDWGKVYGEAWERIDKKVEGLSKHIKLEEERRSEDAQSKAALTDWLRAKASFVIEGLKEADKDEFCRCELKLQKWYGDLRGKPFAIEAENSILDISGFSKQYNCAFIWQKDGVKKLNLYLIINYFKGGKLRFKKIKPEAFEANRFYTVINKKSGEIVPMEVNFNFDDPNLIILPLAFGKRQGREFIWNDLLSLETGSLQLANGRVIEKTLYNRRTRQDEPALFVALTFERREVLDSSNIKPMNLIGVDRGENIPAVIALTDPEGCPLSRFKDSLGNPTHILRIGESYKEKQRTIQAKKEVEQRRAGGYSRKYASKAKNLADDMVRNTARDLLYYAVTQDAMLIFENLSRGFGRQGKRTFMAERQYTRMEDWLTAKLAYEGLPSKTYLSKTLAQYTSKTCSNCGFTITSADYDRVLEKLKKTATGWMTTINGKELKVEGQITYYNRYKRQNVVKDLSVELDRLSEESVNNDISSWTKGRSGEALSLLKKRFSHRPVQEKFVCLNCGFETHADEQAALNIARSWLFLRSQEYKKYQTNKTTGNTDKRAFVETWQSFYRKKLKEVWKPAV

SEQ ID NO: 48508 - protein, 978 aa, synthetic construct
  REGION 1..978: note = engineered CasX variant
QEIKRINKIRRRLVKDSNTKKAGKTGPMKTLLVRVMTPDLRERLENLRKKPENIPQPISNTSRANLNKLLTDYTEMKKAILHVYWEEFQKDPVGLMSRVAQPASKKIDQNKLKPEMDEKGNLTTAGFACSQCGQPLFVYKLEQVSEKGKAYTNYFGRCNVAEHEKLILLAQLKPEKDSDEAVTYSLGKFGQRALDFYSIHVTKESTHPVKPLAQIAGNRYASAPVGKALSDACMGTIASFLSKYQDIIIEHQKVVKGNQKRLESLRELAGKENLEYPSVTLPPQPHTKEGVDAYNEVIARVRMWVNLNLWQKLKLSRDDAKPLLRLKGFPSFPLVERQANEVDWWDMVCNVKKLINEKKEDGKVFWQNLAGYKRQEALRPYLSSEEDRKKGKKFARYQLGDLLLHLEKKHGEDWGKVYGEAWERIDKKVEGLSKHIKLEEERRSEDAQSKAALTDWLRAKASFVIEGLKEADKDEFCRCELKLQKWYGDLRGKPFAIEAENSILDISGFSKQYNCAFIWQKDGVKKLNLYLIINYFKGGKLRFKKIKPEAFEANRFYTVINKKSGEIVPMEVNFNFDDPNLIILPLAFGKRQGREFIWNDLLSLETGSLQLANGRVIEKTLYNRRTRQDEPALFVALTFERREVLDSSNIKPMNLIGVDRGENIPAVIALTDPEGCPLSRFKDSLGNPTHILRIGESYKEKQRTIQAKKEVEQRRAGGYSRKYASKAKNLADDMVRNTARDLLYYAVTQDAMLIFENLSRGFGRQGKRTFMAERQYTRMEDWLTAKLAYEGLPSKTYLSKTLAQYTSKTCSNCGFTITSADYDRVLEKLKKTATGWMTTINGKELKVEGQITYYNRYKRQNVVKDLSVELDRLSEESVNNDISSWTKGRSGEALSLLKKRFSHRPVQEKFVCLNCGFETHADEQAALNIARSWLFLRSQEYKKYQTNKTTGNTDKRAFVETWQSFYRKKLKEVWKPAV

SEQ ID NO: 48509 - protein, 978 aa, synthetic construct
  REGION 1..978: note = engineered CasX variant
QEIKRINKIRRRLVKDSNTKKAGKTGPMKTLLVRVMTPDLRERLENLRKKPENIPQPISNTSRANLNKLLTDYTEMKKAILHVYWEEFQKDPVGLMSRVAQPASKKIDQNKLKPEMDEKGNLTTAGFACSQCGQPLFVYKLEQVSEKGKAYTNYFGRCNVAEHEKLILLAQLKPEKDSDEAVTYSLGKFGQRALDFYSIHVTKESTHPVKPLAQIAGNRYASVPVGKALSDACMGTIASFLSKYQDIIIEHQKVVKGNQKRLESLRELAGKENLEYPSVTLPPQPHTKEGVDAYNEVIARVRMWVNLNLWQKLKLSRDDAKPLLRLKGFPSFPLVERQANEVDWWDMVCNVKKLINEKKEDGKVFWQNLAGYKRQEALRPYLSSEEDRKKGKKFARYQLGDLLLHLEKKHGEDWGKVYGEAWERIDKKVEGLSKHIKLEEERRSEDAQSKAALTDWLRAKASFVIEGLKEADKDEFCRCELKLQKWYGDLRGKPFAIEAENSILDISGFSKQYNCAFIWQKDGVKKLNLYLIINYFKGGKLRFKKIKPEAFEANRFYTVINKKSGEIVPMEVNFNFDDPNLIILPLAFGKRQGREFIWNDLLSLETGSLQLANGRVIEKTLYNRRTRQDEPALFVALTFERREVLDSSNIKPMNLIGVDRGENIPAVIALTDPEGCPLSRFKDSLGNPTHILRIGESYKEKQRTIQAKKEVEQRRAGGYSRKYASKAKNLADDMVRNTARDLLYYAVTQDAMLIFENLSRGFGRQGKRTFMAERQYTRMEDWLTAKLAYEGLPSKTYLSKTLAQYTSKTCSNCGFTITSADYDRVLEKLKKTATGWMTTINGKELKVEGQITYYNRYKRQNVVKDLSVELDRLSEESVNNDISSWTKGRSGEALSLLKKRFSHRPVQEKFVCLNCGFETHADEQAALNIARSWLFLRSQEYKKYQTNKTTGNTDKRAFVETWQSFYRKKLKEVWKPAV

SEQ ID NO: 48510 - protein, 978 aa, synthetic construct
  REGION 1..978: note = engineered CasX variant
QEIKRINKIRRRLVKDSNTKKAGKTGPMKTLLVRVMTPDLRERLENLRKKPENIPQPISNTSRANLNKLLTDYTEMKKAILHVYWEEFQKDPVGLMSRVAQPASKKIDQNKLKPEMDEKGNLTTAGFACSQCGQPLFVYKLEQVSEKGKAYTNYFGRCNVAEHEKLIKLAQLKPEKDSDEAVTYSLGKFGQRALDFYSIHVTKESTHPVKPLAQIAGNRYASGPVGKALSDACMGTIASFLSKYQDIIIEHQKVVKGNQKRLESLRELAGKENLEYPSVTLPPQPHTKEGVDAYNEVIARVRMWVNLNLWQKLKLSRDDAKPLLRLKGFPSFPLVERQANEVDWWDMVCNVKKLINEKKEDGKVFWQNLAGYKRQEALRPYLSSEEDRKKGKKFARYQLGDLLLHLEKKHGEDWGKVYGEAWERIDKKVEGLSKHIKLEEERRSEDAQSKAALTDWLRAKASFVIEGLKEADKDEFCRCELKLQKWYGDLRGKPFAIEAENSILDISGFSKQYNCAFIWQKDGVKKLNLYLIINYFKGGKLRFKKIKPEAFEANRFYTVINKKSGEIVPMEVNFNFDDPNLIILPLAFGKRQGREFIWNDLLSLETGSLQLANGRVIEKTLYNRRTRQDEPALFVALTFERREVLDSSNIKPMNLIGVDRGENIPAVIALTDPEGCPLSRFKDSLGNPTHILRIGESYKEKQRTIQAKKEVEQRRAGGYSRKYASKAKNLADDMVRNTARDLLYYAVTQDAMLIFENLSRGFGRQGKRTFMAERQYTRMEDWLTAKLAYEGLPSKTYLSKTLAQYTSKTCSNCGFTITSADYDRVLEKLKKTATGWMTTINGKELKVEGQITYYNRYKRQNVVKDLSVELDRLSEESVNNDISSWTKGRSGEALSLLKKRFSHRPVQEKFVCLNCGFETHADEQAALNIARSWLFLRSQEYKKYQTNKTTGNTDKRAFVETWQSFYRKKLKEVWKPAV

SEQ ID NO: 48511 - protein, 977 aa, synthetic construct
  REGION 1..977: note = engineered CasX variant
QEIKRINKIRRRLVKDSNTKKAGKTGPMKTLLVRVMTPDLRERLENLRKKPENIPQPISNTSRANLNKLLTDYTEMKKAILHVYWEEFQKDPVGLMSRVAQPASKKIDQNKLKPEMDEKGNLTTAGFACSQCGQPLFVYKLEQVSEKGKAYTNYFGRCNVAEHEKLILLAQLKPEKDSDEAVTYSLGKFGQRALDFYSIHVTKESTHPVKPLAQIAGNRYASPVGKALSDACMGTIASFLSKYQDIIIEHQKVVKGNQKRLESLRELAGKENLEYPSVTLPPQPHTKEGVDAYNEVIARVRMWVNLNLWQKLKLSRDDAKPLLRLKGFPSFPLVERQANEVDWWDMVCNVKKLINEKKEDGKVFWQNLAGYKRQEALRPYLSSEEDRKKGKKFARYQLGDLLLHLEKKHGEDWGKVYGEAWERIDKKVEGLSKHIKLEEERRSEDAQSKAALTDWLRAKASFVIEGLKEADKDEFCRCELKLQKWYGDLRGKPFAIEAENSILDISGFSKQYNCAFIWQKDGVKKLNLYLIINYFKGGKLRFKKIKPEAFEANRFYTVINKKSGEIVPMEVNFNFDDPNLIILPLAFGKRQGREFIWNDLLSLETGSLQLANGRVIEKTLYNRRTRQDEPALFVALTFERREVLDSSNIKPMNLIGVDRGENIPAVIALTDPEGCPLSRFKDSLGNPTHILRIGESYKEKQRTIQAKKEVEQRRAGGYSRKYASKAKNLADDMVRNTARDLLYYAVTQDAMLIFENLSRGFGRQGKRTFMAERQYTRMEDWLTAKLAYEGLPSKTYLSKTLAQYTSKTCSNCGFTITSADYDRVLEKLKKTATGWMTTINGKELKVEGQITYYNRYKRQNVVKDLSVELDRLSEESVNNDISSWTKGRSGEALSLLKKRFSHRPVQEKFVCLNCGFETHADEQAALNIARSWLFLRSQEYKKYQTNKTTGNTDKRAFVETWQSFYRKKLKEVWKPAV

SEQ ID NO: 48512 - protein, 978 aa, synthetic construct
  REGION 1..978: note = engineered CasX variant
QEIKRINKIRRRLVKDSNTKKAGKTGPMKTLLVRVMTPDLRERLENLRKKPENIPQPISNTSRANLNKLLTDYTEMKKAILHVYWEEFQKDPVGLMSRVAQPASKKIDQNKLKPEMDEKGNLTTAGFACSQCGQPLFVYKLEQVSEKGKAYTNYFGRCNVAEHEKLILLAQLKPEKDSDEAVTYSLGKFGQRALDFYSIHVTKESTHPVKPLAQIAGNRYASYPVGKALSDACMGTIASFLSKYQDIIIEHQKVVKGNQKRLESLRELAGKENLEYPSVTLPPQPHTKEGVDAYNEVIARVRMWVNLNLWQKLKLSRDDAKPLLRLKGFPSFPLVERQANEVDWWDMVCNVKKLINEKKEDGKVFWQNLAGYKRQEALRPYLSSEEDRKKGKKFARYQLGDLLLHLEKKHGEDWGKVYDEAWERIDKKVEGLSKHIKLEEERRSEDAQSKAALTDWLRAKASFVIEGKKEADKDEFCRCELKLQKWYGDLRGKPFAIEAENSILDISGFSKQYNCAFIWQKDGVKKLNLYLIINYFKGGKLRFKKIKPEAFEANRFYTVINKKSGEIVPMEVNFNFDDPNLIILPLAFGKRQGREFIWNDLLSLETGSLQLANGRVIEKTLYNRRTRQDEPALFVALTFERREVLDSSNIKPMNLIGVDRGENIPAVIALTDPEGCPLSRFKDSLGNPTHILRIGESYKEKQRTIQAKKEVEQRRAGGYSRKYASKAKNLADDMVRNTARDLLYYAVTQDAMLIFENLSRGFGRQGKRTFMAERQYTRMEDWLTAKLAYEGLPSKTYLSKTLAQYTSKTCSNCGFTITSADYDRVLEKLKKTATGWMTTINGKELKVEGQITYYNRYKRQNVVKDLSVELDRLSEESVNNDISSWTKGRSGEALSLLKKRFSHRPVQEKFVCLNCGFETHADEQAALNIARSWLFLRSQEYKKYQTNKTTGNTDKRAFVETWQSFYRKKLKEVWKPAV

SEQ ID NO: 48513 - protein, 978 aa, synthetic construct
  REGION 1..978: note = engineered CasX variant
QEIKRINKIRRRLVKDSNTKKAGKTGPMKTLLVRVMTPDLRERLENLRKKPENIPQPISNTSRANLNKLLTDYTEMKKAILHVYWEEFQKDPVGLMSRVAQPASKKIDQNKLKPEMDEKGNLTTAGFACSQCGQPLFVYKLEQVSEKGKAYTNYFGRCNVAEHEKLILLAQLKPEKDSDEAVTYSLGKFGQRALDFYSIHVTKESTHPVKPLAQIAGNRYASHPVGKALSDACMGTIASFLSKYQDIIIEHQKVVKGNQKRLESLRELAGKENLEYPSVTLPPQPHTKEGVDAYNEVIARVRMWVNLNLWQKLKLSRDDAKPLLRLKGFPSFPLVERQANEVDWWDMVCNVKKLINEKKEDGKVFWQNLAGYKRQEALRPYLSSEEDRKKGKKFARYQLGDLLLHLEKKHGEDWGKVYDEAWERIDKKVEGLSKHIKLEEERRSEDAQSKAALTDWLRAKASFVIEGKKEADKDEFCRCELKLQKWYGDLRGKPFAIEAENSILDISGFSKQYNCAFIWQKDGVKKLNLYLIINYFKGGKLRFKKIKPEAFEANRFYTVINKKSGEIVPMEVNFNFDDPNLIILPLAFGKRQGREFIWNDLLSLETGSLQLANGRVIEKTLYNRRTRQDEPALFVALTFERREVLDSSNIKPMNLIGVDRGENIPAVIALTDPEGCPLSRFKDSLGNPTHILRIGESYKEKQRTIQAKKEVEQRRAGGYSRKYASKAKNLADDMVRNTARDLLYYAVTQDAMLIFENLSRGFGRQGKRTFMAERQYTRMEDWLTAKLAYEGLPSKTYLSKTLAQYTSKTCSNCGFTITSADYDRVLEKLKKTATGWMTTINGKELKVEGQITYYNRYKRQNVVKDLSVELDRLSEESVNNDISSWTKGRSGEALSLLKKRFSHRPVQEKFVCLNCGFETHADEQAALNIARSWLFLRSQEYKKYQTNKTTGNTDKRAFVETWQSFYRKKLKEVWKPAV

SEQ ID NO: 48514 - protein, 978 aa, synthetic construct
  REGION 1..978: note = engineered CasX variant
QEIKRINKIRRRLVKDSNTKKAGKTGPMKTLLVRVMTPDLRERLENLRKKPENIPQPISNTSRANLNKLLTDYTEMKKAILHVYWEEFQKDPVGLMSRVAQPASKKIDQNKLKPEMDEKGNLTTAGFACSQCGQPLFVYKLEQVSEKGKAYTNYFGRCNVAEHEKLILLAQLKPEKDSDEAVTYSLGKFGQRALDFYSIHVTKESTHPVKPLAQIAGNRYASSPVGKALSDACMGTIASFLSKYQDIIIEHQKVVKGNQKRLESLRELAGKENLEYPSVTLPPQPHTKEGVDAYNEVIARVRMWVNLNLWQKLKLSRDDAKPLLRLKGFPSFPLVERQANEVDWWDMVCNVKKLINEKKEDGKVFWQNLAGYKRQEALRPYLSSEEDRKKGKKFARYQLGDLLLHLEKKHGEDWGKVYDEAWERIDKKVEGLSKHIKLEEERRSEDAQSKAALTDWLRAKASFVIEGKKEADKDEFCRCELKLQKWYGDLRGKPFAIEAENSILDISGFSKQYNCAFIWQKDGVKKLNLYLIINYFKGGKLRFKKIKPEAFEANRFYTVINKKSGEIVPMEVNFNFDDPNLIILPLAFGKRQGREFIWNDLLSLETGSLQLANGRVIEKTLYNRRTRQDEPALFVALTFERREVLDSSNIKPMNLIGVDRGENIPAVIALTDPEGCPLSRFKDSLGNPTHILRIGESYKEKQRTIQAKKEVEQRRAGGYSRKYASKAKNLADDMVRNTARDLLYYAVTQDAMLIFENLSRGFGRQGKRTFMAERQYTRMEDWLTAKLAYEGLPSKTYLSKTLAQYTSKTCSNCGFTITSADYDRVLEKLKKTATGWMTTINGKELKVEGQITYYNRYKRQNVVKDLSVELDRLSEESVNNDISSWTKGRSGEALSLLKKRFSHRPVQEKFVCLNCGFETHADEQAALNIARSWLFLRSQEYKKYQTNKTTGNTDKRAFVETWQSFYRKKLKEVWKPAV

SEQ ID NO: 48515 - protein, 978 aa, synthetic construct
  REGION 1..978: note = engineered CasX variant
QEIKRINKIRRRLVKDSNTKKAGKTGPMKTLLVRVMTPDLRERLENLRKKPENIPQPISNTSRANLNKLLTDYTEMKKAILHVYWEEFQKDPVGLMSRVAQPASKKIDQNKLKPEMDEKGNLTTAGFACSQCGQPLFVYKLEQVSEKGKAYTNYFGRCNVAEHEKLILLAQLKPEKDSDEAVTYSLGKFGQRALDFYSIHVTKESTHPVKPLAQIAGNRYASTPVGKALSDACMGTIASFLSKYQDIIIEHQKVVKGNQKRLESLRELAGKENLEYPSVTLPPQPHTKEGVDAYNEVIARVRMWVNLNLWQKLKLSRDDAKPLLRLKGFPSFPLVERQANEVDWWDMVCNVKKLINEKKEDGKVFWQNLAGYKRQEALRPYLSSEEDRKKGKKFARYQLGDLLLHLEKKHGEDWGKVYDEAWERIDKKVEGLSKHIKLEEERRSEDAQSKAALTDWLRAKASFVIEGKKEADKDEFCRCELKLQKWYGDLRGKPFAIEAENSILDISGFSKQYNCAFIWQKDGVKKLNLYLIINYFKGGKLRFKKIKPEAFEANRFYTVINKKSGEIVPMEVNFNFDDPNLIILPLAFGKRQGREFIWNDLLSLETGSLQLANGRVIEKTLYNRRTRQDEPALFVALTFERREVLDSSNIKPMNLIGVDRGENIPAVIALTDPEGCPLSRFKDSLGNPTHILRIGESYKEKQRTIQAKKEVEQRRAGGYSRKYASKAKNLADDMVRNTARDLLYYAVTQDAMLIFENLSRGFGRQGKRTFMAERQYTRMEDWLTAKLAYEGLPSKTYLSKTLAQYTSKTCSNCGFTITSADYDRVLEKLKKTATGWMTTINGKELKVEGQITYYNRYKRQNVVKDLSVELDRLSEESVNNDISSWTKGRSGEALSLLKKRFSHRPVQEKFVCLNCGFETHADEQAALNIARSWLFLRSQEYKKYQTNKTTGNTDKRAFVETWQSFYRKKLKEVWKPAV

SEQ ID NO: 48516 - protein, 978 aa, synthetic construct
  REGION 1..978: note = engineered CasX variant
QEIKRINKIRRRLVKDSNTKKAGKTGPMKTLLVRVMTPDLRERLENLRKKPENIPQPISNTSRANLNKLLTDYTEMKKAILHVYWEEFQKDPVGLMSRVAQPASKKIDQNKLKPEMDEKGNLTTAGFACSQCGQPLFVYKLEQVSEKGKAYTNYFGRCNVAEHEKLILLAQLKPEKDSDEAVTYSLGKFGQRALDFYSIHVTKESTHPVKPLAQIAGNRYASAPVGKALSDACMGTIASFLSKYQDIIIEHQKVVKGNQKRLESLRELAGKENLEYPSVTLPPQPHTKEGVDAYNEVIARVRMWVNLNLWQKLKLSRDDAKPLLRLKGFPSFPLVERQANEVDWWDMVCNVKKLINEKKEDGKVFWQNLAGYKRQEALRPYLSSEEDRKKGKKFARYQLGDLLLHLEKKHGEDWGKVYDEAWERIDKKVEGLSKHIKLEEERRSEDAQSKAALTDWLRAKASFVIEGKKEADKDEFCRCELKLQKWYGDLRGKPFAIEAENSILDISGFSKQYNCAFIWQKDGVKKLNLYLIINYFKGGKLRFKKIKPEAFEANRFYTVINKKSGEIVPMEVNFNFDDPNLIILPLAFGKRQGREFIWNDLLSLETGSLQLANGRVIEKTLYNRRTRQDEPALFVALTFERREVLDSSNIKPMNLIGVDRGENIPAVIALTDPEGCPLSRFKDSLGNPTHILRIGESYKEKQRTIQAKKEVEQRRAGGYSRKYASKAKNLADDMVRNTARDLLYYAVTQDAMLIFENLSRGFGRQGKRTFMAERQYTRMEDWLTAKLAYEGLPSKTYLSKTLAQYTSKTCSNCGFTITSADYDRVLEKLKKTATGWMTTINGKELKVEGQITYYNRYKRQNVVKDLSVELDRLSEESVNNDISSWTKGRSGEALSLLKKRFSHRPVQEKFVCLNCGFETHADEQAALNIARSWLFLRSQEYKKYQTNKTTGNTDKRAFVETWQSFYRKKLKEVWKPAV

SEQ ID NO: 48517 - protein, 978 aa, synthetic construct
  REGION 1..978: note = engineered CasX variant
QEIKRINKIRRRLVKDSNTKKAGKTGPMKTLLVRVMTPDLRERLENLRKKPENIPQPISNTSRANLNKLLTDYTEMKKAILHVYWEEFQKDPVGLMSRVAQPASKKIDQNKLKPEMDEKGNLTTAGFACSQCGQPLFVYKLEQVSEKGKAYTNYFGRCNVAEHEKLILLAQLKPEKDSDEAVTYSLGKFGQRALDFYSIHVTKESTHPVKPLAQIAGNRYASVPVGKALSDACMGTIASFLSKYQDIIIEHQKVVKGNQKRLESLRELAGKENLEYPSVTLPPQPHTKEGVDAYNEVIARVRMWVNLNLWQKLKLSRDDAKPLLRLKGFPSFPLVERQANEVDWWDMVCNVKKLINEKKEDGKVFWQNLAGYKRQEALRPYLSSEEDRKKGKKFARYQLGDLLLHLEKKHGEDWGKVYDEAWERIDKKVEGLSKHIKLEEERRSEDAQSKAALTDWLRAKASFVIEGKKEADKDEFCRCELKLQKWYGDLRGKPFAIEAENSILDISGFSKQYNCAFIWQKDGVKKLNLYLIINYFKGGKLRFKKIKPEAFEANRFYTVINKKSGEIVPMEVNFNFDDPNLIILPLAFGKRQGREFIWNDLLSLETGSLQLANGRVIEKTLYNRRTRQDEPALFVALTFERREVLDSSNIKPMNLIGVDRGENIPAVIALTDPEGCPLSRFKDSLGNPTHILRIGESYKEKQRTIQAKKEVEQRRAGGYSRKYASKAKNLADDMVRNTARDLLYYAVTQDAMLIFENLSRGFGRQGKRTFMAERQYTRMEDWLTAKLAYEGLPSKTYLSKTLAQYTSKTCSNCGFTITSADYDRVLEKLKKTATGWMTTINGKELKVEGQITYYNRYKRQNVVKDLSVELDRLSEESVNNDISSWTKGRSGEALSLLKKRFSHRPVQEKFVCLNCGFETHADEQAALNIARSWLFLRSQEYKKYQTNKTTGNTDKRAFVETWQSFYRKKLKEVWKPAV

SEQ ID NO: 48518 - protein, 978 aa, synthetic construct
  REGION 1..978: note = engineered CasX variant
QEIKRINKIRRRLVKDSNTKKAGKTGPMKTLLVRVMTPDLRERLENLRKKPENIPQPISNTSRANLNKLLTDYTEMKKAILHVYWEEFQKDPVGLMSRVAQPASKKIDQNKLKPEMDEKGNLTTAGFACSQCGQPLFVYKLEQVSEKGKAYTNYFGRCNVAEHEKLIKLAQLKPEKDSDEAVTYSLGKFGQRALDFYSIHVTKESTHPVKPLAQIAGNRYASGPVGKALSDACMGTIASFLSKYQDIIIEHQKVVKGNQKRLESLRELAGKENLEYPSVTLPPQPHTKEGVDAYNEVIARVRMWVNLNLWQKLKLSRDDAKPLLRLKGFPSFPLVERQANEVDWWDMVCNVKKLINEKKEDGKVFWQNLAGYKRQEALRPYLSSEEDRKKGKKFARYQLGDLLLHLEKKHGEDWGKVYDEAWERIDKKVEGLSKHIKLEEERRSEDAQSKAALTDWLRAKASFVIEGKKEADKDEFCRCELKLQKWYGDLRGKPFAIEAENSILDISGFSKQYNCAFIWQKDGVKKLNLYLIINYFKGGKLRFKKIKPEAFEANRFYTVINKKSGEIVPMEVNFNFDDPNLIILPLAFGKRQGREFIWNDLLSLETGSLQLANGRVIEKTLYNRRTRQDEPALFVALTFERREVLDSSNIKPMNLIGVDRGENIPAVIALTDPEGCPLSRFKDSLGNPTHILRIGESYKEKQRTIQAKKEVEQRRAGGYSRKYASKAKNLADDMVRNTARDLLYYAVTQDAMLIFENLSRGFGRQGKRTFMAERQYTRMEDWLTAKLAYEGLPSKTYLSKTLAQYTSKTCSNCGFTITSADYDRVLEKLKKTATGWMTTINGKELKVEGQITYYNRYKRQNVVKDLSVELDRLSEESVNNDISSWTKGRSGEALSLLKKRFSHRPVQEKFVCLNCGFETHADEQAALNIARSWLFLRSQEYKKYQTNKTTGNTDKRAFVETWQSFYRKKLKEVWKPAV

SEQ ID NO: 48519 - protein, 977 aa, synthetic construct
  REGION 1..977: note = engineered CasX variant
QEIKRINKIRRRLVKDSNTKKAGKTGPMKTLLVRVMTPDLRERLENLRKKPENIPQPISNTSRANLNKLLTDYTEMKKAILHVYWEEFQKDPVGLMSRVAQPASKKIDQNKLKPEMDEKGNLTTAGFACSQCGQPLFVYKLEQVSEKGKAYTNYFGRCNVAEHEKLILLAQLKPEKDSDEAVTYSLGKFGQRALDFYSIHVTKESTHPVKPLAQIAGNRYASPVGKALSDACMGTIASFLSKYQDIIIEHQKVVKGNQKRLESLRELAGKENLEYPSVTLPPQPHTKEGVDAYNEVIARVRMWVNLNLWQKLKLSRDDAKPLLRLKGFPSFPLVERQANEVDWWDMVCNVKKLINEKKEDGKVFWQNLAGYKRQEALRPYLSSEEDRKKGKKFARYQLGDLLLHLEKKHGEDWGKVYDEAWERIDKKVEGLSKHIKLEEERRSEDAQSKAALTDWLRAKASFVIEGKKEADKDEFCRCELKLQKWYGDLRGKPFAIEAENSILDISGFSKQYNCAFIWQKDGVKKLNLYLIINYFKGGKLRFKKIKPEAFEANRFYTVINKKSGEIVPMEVNFNFDDPNLIILPLAFGKRQGREFIWNDLLSLETGSLQLANGRVIEKTLYNRRTRQDEPALFVALTFERREVLDSSNIKPMNLIGVDRGENIPAVIALTDPEGCPLSRFKDSLGNPTHILRIGESYKEKQRTIQAKKEVEQRRAGGYSRKYASKAKNLADDMVRNTARDLLYYAVTQDAMLIFENLSRGFGRQGKRTFMAERQYTRMEDWLTAKLAYEGLPSKTYLSKTLAQYTSKTCSNCGFTITSADYDRVLEKLKKTATGWMTTINGKELKVEGQITYYNRYKRQNVVKDLSVELDRLSEESVNNDISSWTKGRSGEALSLLKKRFSHRPVQEKFVCLNCGFETHADEQAALNIARSWLFLRSQEYKKYQTNKTTGNTDKRAFVETWQSFYRKKLKEVWKPAV

SEQ ID NO: 48520 - protein, 978 aa, synthetic construct
  REGION 1..978: note = engineered CasX variant
QEIKRINKIRRRLVKDSNTKKAGKTGPMKTLLVRVMTPDLRERLENLRKKPENIPQPISNTSRANLNKLLTDYTEMKKAILHVYWEEFQKDPVGLMSRVAQPASKKIDQNKLKPEMDEKGNLTTAGFACSQCGQPLFVYKLEQVSEKGKAYTNYFGRCNVAEHEKLILLAQLKPEKDSDEAVTYSLGKFGQRALDFYSIHVTKESTHPVKPLAQIAGNRYASYPVGKALSDACMGTIASFLSKYQDIIIEHQKVVKGNQKRLESLRELAGKENLEYPSVTLPPQPHTKEGVDAYNEVIARVRMWVNLNLWQKLKLSRDDAKPLLRLKGFPSFPLVERQANEVDWWDMVCNVKKLINEKKEDGKVFWQNLAGYKRQEALRPYLSSEEDRKKGKKFARYQLGDLLLHLEKKHGEDWGKVYDEAWERIDKKVEGLSKHIKLEEERRSEDAQSKAALTDWLRAKASFVIEGSKEADKDEFCRCELKLQKWYGDLRGKPFAIEAENSILDISGFSKQYNCAFIWQKDGVKKLNLYLIINYFKGGKLRFKKIKPEAFEANRFYTVINKKSGEIVPMEVNFNFDDPNLIILPLAFGKRQGREFIWNDLLSLETGSLQLANGRVIEKTLYNRRTRQDEPALFVALTFERREVLDSSNIKPMNLIGVDRGENIPAVIALTDPEGCPLSRFKDSLGNPTHILRIGESYKEKQRTIQAKKEVEQRRAGGYSRKYASKAKNLADDMVRNTARDLLYYAVTQDAMLIFENLSRGFGRQGKRTFMAERQYTRMEDWLTAKLAYEGLPSKTYLSKTLAQYTSKTCSNCGFTITSADYDRVLEKLKKTATGWMTTINGKELKVEGQITYYNRYKRQNVVKDLSVELDRLSEESVNNDISSWTKGRSGEALSLLKKRFSHRPVQEKFVCLNCGFETHADEQAALNIARSWLFLRSQEYKKYQTNKTTGNTDKRAFVETWQSFYRKKLKEVWKPAV

SEQ ID NO: 48521 - protein, 978 aa, synthetic construct
  REGION 1..978: note = engineered CasX variant
QEIKRINKIRRRLVKDSNTKKAGKTGPMKTLLVRVMTPDLRERLENLRKKPENIPQPISNTSRANLNKLLTDYTEMKKAILHVYWEEFQKDPVGLMSRVAQPASKKIDQNKLKPEMDEKGNLTTAGFACSQCGQPLFVYKLEQVSEKGKAYTNYFGRCNVAEHEKLILLAQLKPEKDSDEAVTYSLGKFGQRALDFYSIHVTKESTHPVKPLAQIAGNRYASHPVGKALSDACMGTIASFLSKYQDIIIEHQKVVKGNQKRLESLRELAGKENLEYPSVTLPPQPHTKEGVDAYNEVIARVRMWVNLNLWQKLKLSRDDAKPLLRLKGFPSFPLVERQANEVDWWDMVCNVKKLINEKKEDGKVFWQNLAGYKRQEALRPYLSSEEDRKKGKKFARYQLGDLLLHLEKKHGEDWGKVYDEAWERIDKKVEGLSKHIKLEEERRSEDAQSKAALTDWLRAKASFVIEGSKEADKDEFCRCELKLQKWYGDLRGKPFAIEAENSILDISGFSKQYNCAFIWQKDGVKKLNLYLIINYFKGGKLRFKKIKPEAFEANRFYTVINKKSGEIVPMEVNFNFDDPNLIILPLAFGKRQGREFIWNDLLSLETGSLQLANGRVIEKTLYNRRTRQDEPALFVALTFERREVLDSSNIKPMNLIGVDRGENIPAVIALTDPEGCPLSRFKDSLGNPTHILRIGESYKEKQRTIQAKKEVEQRRAGGYSRKYASKAKNLADDMVRNTARDLLYYAVTQDAMLIFENLSRGFGRQGKRTFMAERQYTRMEDWLTAKLAYEGLPSKTYLSKTLAQYTSKTCSNCGFTITSADYDRVLEKLKKTATGWMTTINGKELKVEGQITYYNRYKRQNVVKDLSVELDRLSEESVNNDISSWTKGRSGEALSLLKKRFSHRPVQEKFVCLNCGFETHADEQAALNIARSWLFLRSQEYKKYQTNKTTGNTDKRAFVETWQSFYRKKLKEVWKPAV

SEQ ID NO: 48522 - protein, 978 aa, synthetic construct
  REGION 1..978: note = engineered CasX variant
QEIKRINKIRRRLVKDSNTKKAGKTGPMKTLLVRVMTPDLRERLENLRKKPENIPQPISNTSRANLNKLLTDYTEMKKAILHVYWEEFQKDPVGLMSRVAQPASKKIDQNKLKPEMDEKGNLTTAGFACSQCGQPLFVYKLEQVSEKGKAYTNYFGRCNVAEHEKLILLAQLKPEKDSDEAVTYSLGKFGQRALDFYSIHVTKESTHPVKPLAQIAGNRYASSPVGKALSDACMGTIASFLSKYQDIIIEHQKVVKGNQKRLESLRELAGKENLEYPSVTLPPQPHTKEGVDAYNEVIARVRMWVNLNLWQKLKLSRDDAKPLLRLKGFPSFPLVERQANEVDWWDMVCNVKKLINEKKEDGKVFWQNLAGYKRQEALRPYLSSEEDRKKGKKFARYQLGDLLLHLEKKHGEDWGKVYDEAWERIDKKVEGLSKHIKLEEERRSEDAQSKAALTDWLRAKASFVIEGSKEADKDEFCRCELKLQKWYGDLRGKPFAIEAENSILDISGFSKQYNCAFIWQKDGVKKLNLYLIINYFKGGKLRFKKIKPEAFEANRFYTVINKKSGEIVPMEVNFNFDDPNLIILPLAFGKRQGREFIWNDLLSLETGSLQLANGRVIEKTLYNRRTRQDEPALFVALTFERREVLDSSNIKPMNLIGVDRGENIPAVIALTDPEGCPLSRFKDSLGNPTHILRIGESYKEKQRTIQAKKEVEQRRAGGYSRKYASKAKNLADDMVRNTARDLLYYAVTQDAMLIFENLSRGFGRQGKRTFMAERQYTRMEDWLTAKLAYEGLPSKTYLSKTLAQYTSKTCSNCGFTITSADYDRVLEKLKKTATGWMTTINGKELKVEGQITYYNRYKRQNVVKDLSVELDRLSEESVNNDISSWTKGRSGEALSLLKKRFSHRPVQEKFVCLNCGFETHADEQAALNIARSWLFLRSQEYKKYQTNKTTGNTDKRAFVETWQSFYRKKLKEVWKPAV

SEQ ID NO: 48523 - protein, 978 aa, synthetic construct
  REGION 1..978: note = engineered CasX variant
QEIKRINKIRRRLVKDSNTKKAGKTGPMKTLLVRVMTPDLRERLENLRKKPENIPQPISNTSRANLNKLLTDYTEMKKAILHVYWEEFQKDPVGLMSRVAQPASKKIDQNKLKPEMDEKGNLTTAGFACSQCGQPLFVYKLEQVSEKGKAYTNYFGRCNVAEHEKLILLAQLKPEKDSDEAVTYSLGKFGQRALDFYSIHVTKESTHPVKPLAQIAGNRYASTPVGKALSDACMGTIASFLSKYQDIIIEHQKVVKGNQKRLESLRELAGKENLEYPSVTLPPQPHTKEGVDAYNEVIARVRMWVNLNLWQKLKLSRDDAKPLLRLKGFPSFPLVERQANEVDWWDMVCNVKKLINEKKEDGKVFWQNLAGYKRQEALRPYLSSEEDRKKGKKFARYQLGDLLLHLEKKHGEDWGKVYDEAWERIDKKVEGLSKHIKLEEERRSEDAQSKAALTDWLRAKASFVIEGSKEADKDEFCRCELKLQKWYGDLRGKPFAIEAENSILDISGFSKQYNCAFIWQKDGVKKLNLYLIINYFKGGKLRFKKIKPEAFEANRFYTVINKKSGEIVPMEVNFNFDDPNLIILPLAFGKRQGREFIWNDLLSLETGSLQLANGRVIEKTLYNRRTRQDEPALFVALTFERREVLDSSNIKPMNLIGVDRGENIPAVIALTDPEGCPLSRFKDSLGNPTHILRIGESYKEKQRTIQAKKEVEQRRAGGYSRKYASKAKNLADDMVRNTARDLLYYAVTQDAMLIFENLSRGFGRQGKRTFMAERQYTRMEDWLTAKLAYEGLPSKTYLSKTLAQYTSKTCSNCGFTITSADYDRVLEKLKKTATGWMTTINGKELKVEGQITYYNRYKRQNVVKDLSVELDRLSEESVNNDISSWTKGRSGEALSLLKKRFSHRPVQEKFVCLNCGFETHADEQAALNIARSWLFLRSQEYKKYQTNKTTGNTDKRAFVETWQSFYRKKLKEVWKPAV

SEQ ID NO: 48524 - protein, 978 aa, synthetic construct
  REGION 1..978: note = engineered CasX variant
QEIKRINKIRRRLVKDSNTKKAGKTGPMKTLLVRVMTPDLRERLENLRKKPENIPQPISNTSRANLNKLLTDYTEMKKAILHVYWEEFQKDPVGLMSRVAQPASKKIDQNKLKPEMDEKGNLTTAGFACSQCGQPLFVYKLEQVSEKGKAYTNYFGRCNVAEHEKLILLAQLKPEKDSDEAVTYSLGKFGQRALDFYSIHVTKESTHPVKPLAQIAGNRYASAPVGKALSDACMGTIASFLSKYQDIIIEHQKVVKGNQKRLESLRELAGKENLEYPSVTLPPQPHTKEGVDAYNEVIARVRMWVNLNLWQKLKLSRDDAKPLLRLKGFPSFPLVERQANEVDWWDMVCNVKKLINEKKEDGKVFWQNLAGYKRQEALRPYLSSEEDRKKGKKFARYQLGDLLLHLEKKHGEDWGKVYDEAWERIDKKVEGLSKHIKLEEERRSEDAQSKAALTDWLRAKASFVIEGSKEADKDEFCRCELKLQKWYGDLRGKPFAIEAENSILDISGFSKQYNCAFIWQKDGVKKLNLYLIINYFKGGKLRFKKIKPEAFEANRFYTVINKKSGEIVPMEVNFNFDDPNLIILPLAFGKRQGREFIWNDLLSLETGSLQLANGRVIEKTLYNRRTRQDEPALFVALTFERREVLDSSNIKPMNLIGVDRGENIPAVIALTDPEGCPLSRFKDSLGNPTHILRIGESYKEKQRTIQAKKEVEQRRAGGYSRKYASKAKNLADDMVRNTARDLLYYAVTQDAMLIFENLSRGFGRQGKRTFMAERQYTRMEDWLTAKLAYEGLPSKTYLSKTLAQYTSKTCSNCGFTITSADYDRVLEKLKKTATGWMTTINGKELKVEGQITYYNRYKRQNVVKDLSVELDRLSEESVNNDISSWTKGRSGEALSLLKKRFSHRPVQEKFVCLNCGFETHADEQAALNIARSWLFLRSQEYKKYQTNKTTGNTDKRAFVETWQSFYRKKLKEVWKPAV

SEQ ID NO: 48525 - protein, 978 aa, synthetic construct
  REGION 1..978: note = engineered CasX variant
QEIKRINKIRRRLVKDSNTKKAGKTGPMKTLLVRVMTPDLRERLENLRKKPENIPQPISNTSRANLNKLLTDYTEMKKAILHVYWEEFQKDPVGLMSRVAQPASKKIDQNKLKPEMDEKGNLTTAGFACSQCGQPLFVYKLEQVSEKGKAYTNYFGRCNVAEHEKLILLAQLKPEKDSDEAVTYSLGKFGQRALDFYSIHVTKESTHPVKPLAQIAGNRYASVPVGKALSDACMGTIASFLSKYQDIIIEHQKVVKGNQKRLESLRELAGKENLEYPSVTLPPQPHTKEGVDAYNEVIARVRMWVNLNLWQKLKLSRDDAKPLLRLKGFPSFPLVERQANEVDWWDMVCNVKKLINEKKEDGKVFWQNLAGYKRQEALRPYLSSEEDRKKGKKFARYQLGDLLLHLEKKHGEDWGKVYDEAWERIDKKVEGLSKHIKLEEERRSEDAQSKAALTDWLRAKASFVIEGSKEADKDEFCRCELKLQKWYGDLRGKPFAIEAENSILDISGFSKQYNCAFIWQKDGVKKLNLYLIINYFKGGKLRFKKIKPEAFEANRFYTVINKKSGEIVPMEVNFNFDDPNLIILPLAFGKRQGREFIWNDLLSLETGSLQLANGRVIEKTLYNRRTRQDEPALFVALTFERREVLDSSNIKPMNLIGVDRGENIPAVIALTDPEGCPLSRFKDSLGNPTHILRIGESYKEKQRTIQAKKEVEQRRAGGYSRKYASKAKNLADDMVRNTARDLLYYAVTQDAMLIFENLSRGFGRQGKRTFMAERQYTRMEDWLTAKLAYEGLPSKTYLSKTLAQYTSKTCSNCGFTITSADYDRVLEKLKKTATGWMTTINGKELKVEGQITYYNRYKRQNVVKDLSVELDRLSEESVNNDISSWTKGRSGEALSLLKKRFSHRPVQEKFVCLNCGFETHADEQAALNIARSWLFLRSQEYKKYQTNKTTGNTDKRAFVETWQSFYRKKLKEVWKPAV

SEQ ID NO: 48526 - protein, 978 aa, synthetic construct
  REGION 1..978: note = engineered CasX variant
QEIKRINKIRRRLVKDSNTKKAGKTGPMKTLLVRVMTPDLRERLENLRKKPENIPQPISNTSRANLNKLLTDYTEMKKAILHVYWEEFQKDPVGLMSRVAQPASKKIDQNKLKPEMDEKGNLTTAGFACSQCGQPLFVYKLEQVSEKGKAYTNYFGRCNVAEHEKLIKLAQLKPEKDSDEAVTYSLGKFGQRALDFYSIHVTKESTHPVKPLAQIAGNRYASGPVGKALSDACMGTIASFLSKYQDIIIEHQKVVKGNQKRLESLRELAGKENLEYPSVTLPPQPHTKEGVDAYNEVIARVRMWVNLNLWQKLKLSRDDAKPLLRLKGFPSFPLVERQANEVDWWDMVCNVKKLINEKKEDGKVFWQNLAGYKRQEALRPYLSSEEDRKKGKKFARYQLGDLLLHLEKKHGEDWGKVYDEAWERIDKKVEGLSKHIKLEEERRSEDAQSKAALTDWLRAKASFVIEGSKEADKDEFCRCELKLQKWYGDLRGKPFAIEAENSILDISGFSKQYNCAFIWQKDGVKKLNLYLIINYFKGGKLRFKKIKPEAFEANRFYTVINKKSGEIVPMEVNFNFDDPNLIILPLAFGKRQGREFIWNDLLSLETGSLQLANGRVIEKTLYNRRTRQDEPALFVALTFERREVLDSSNIKPMNLIGVDRGENIPAVIALTDPEGCPLSRFKDSLGNPTHILRIGESYKEKQRTIQAKKEVEQRRAGGYSRKYASKAKNLADDMVRNTARDLLYYAVTQDAMLIFENLSRGFGRQGKRTFMAERQYTRMEDWLTAKLAYEGLPSKTYLSKTLAQYTSKTCSNCGFTITSADYDRVLEKLKKTATGWMTTINGKELKVEGQITYYNRYKRQNVVKDLSVELDRLSEESVNNDISSWTKGRSGEALSLLKKRFSHRPVQEKFVCLNCGFETHADEQAALNIARSWLFLRSQEYKKYQTNKTTGNTDKRAFVETWQSFYRKKLKEVWKPAV

SEQ ID NO: 48527 - protein, 977 aa, synthetic construct
  REGION 1..977: note = engineered CasX variant
QEIKRINKIRRRLVKDSNTKKAGKTGPMKTLLVRVMTPDLRERLENLRKKPENIPQPISNTSRANLNKLLTDYTEMKKAILHVYWEEFQKDPVGLMSRVAQPASKKIDQNKLKPEMDEKGNLTTAGFACSQCGQPLFVYKLEQVSEKGKAYTNYFGRCNVAEHEKLILLAQLKPEKDSDEAVTYSLGKFGQRALDFYSIHVTKESTHPVKPLAQIAGNRYASPVGKALSDACMGTIASFLSKYQDIIIEHQKVVKGNQKRLESLRELAGKENLEYPSVTLPPQPHTKEGVDAYNEVIARVRMWVNLNLWQKLKLSRDDAKPLLRLKGFPSFPLVERQANEVDWWDMVCNVKKLINEKKEDGKVFWQNLAGYKRQEALRPYLSSEEDRKKGKKFARYQLGDLLLHLEKKHGEDWGKVYDEAWERIDKKVEGLSKHIKLEEERRSEDAQSKAALTDWLRAKASFVIEGSKEADKDEFCRCELKLQKWYGDLRGKPFAIEAENSILDISGFSKQYNCAFIWQKDGVKKLNLYLIINYFKGGKLRFKKIKPEAFEANRFYTVINKKSGEIVPMEVNFNFDDPNLIILPLAFGKRQGREFIWNDLLSLETGSLQLANGRVIEKTLYNRRTRQDEPALFVALTFERREVLDSSNIKPMNLIGVDRGENIPAVIALTDPEGCPLSRFKDSLGNPTHILRIGESYKEKQRTIQAKKEVEQRRAGGYSRKYASKAKNLADDMVRNTARDLLYYAVTQDAMLIFENLSRGFGRQGKRTFMAERQYTRMEDWLTAKLAYEGLPSKTYLSKTLAQYTSKTCSNCGFTITSADYDRVLEKLKKTATGWMTTINGKELKVEGQITYYNRYKRQNVVKDLSVELDRLSEESVNNDISSWTKGRSGEALSLLKKRFSHRPVQEKFVCLNCGFETHADEQAALNIARSWLFLRSQEYKKYQTNKTTGNTDKRAFVETWQSFYRKKLKEVWKPAV

SEQ ID NO: 48528 - protein, 979 aa, synthetic construct
  REGION 1..979: note = engineered CasX variant
QEIKRINKIRRRLVKDSNTKKAGKTGPMKTLLVRVMTPDLRERLENLRKKPENIPQPISNTSRANLNKLLTDYTEMKKAILHVYWEEFQKDPVGLMSRVAQPASKKIDQNKLKPEMDEKGNLTTAGFACSQCGQPLFVYKLEQVSEKGKAYTNYFGRCNVAEHEKLILLAQLKPEKDSDEAVTYSLGKFGQRALDFYSIHVTKESTHPVKPLAQIAGNRYASYPVGKALSDACMGTIASFLSKYQDIIIEHQKVVKGNQKRLESLRELAGKENLEYPSVTLPPQPHTKEGVDAYNEVIARVRMWVNLNLWQKLKLSRDDAKPLLRLKGFPSFPLVERQANEVDWWDMVCNVKKLINEKKEDGKVFWQNLAGYKRQEALRPYLSSEEDRKKGKKFARYQLGDLLLHLEKKHGEDWGKVYDEAWERIDKKVEGLSKHIKLEEERRSEDAQSKAALTDWLRAKASFVIEGLKEADDKDEFCRCELKLQKWYGDLRGKPFAIEAENSILDISGFSKQYNCAFIWQKDGVKKLNLYLIINYFKGGKLRFKKIKPEAFEANRFYTVINKKSGEIVPMEVNFNFDDPNLIILPLAFGKRQGREFIWNDLLSLETGSLQLANGRVIEKTLYNRRTRQDEPALFVALTFERREVLDSSNIKPMNLIGVDRGENIPAVIALTDPEGCPLSRFKDSLGNPTHILRIGESYKEKQRTIQAKKEVEQRRAGGYSRKYASKAKNLADDMVRNTARDLLYYAVTQDAMLIFENLSRGFGRQGKRTFMAERQYTRMEDWLTAKLAYEGLPSKTYLSKTLAQYTSKTCSNCGFTITSADYDRVLEKLKKTATGWMTTINGKELKVEGQITYYNRYKRQNVVKDLSVELDRLSEESVNNDISSWTKGRSGEALSLLKKRFSHRPVQEKFVCLNCGFETHADEQAALNIARSWLFLRSQEYKKYQTNKTTGNTDKRAFVETWQSFYRKKLKEVWKPAV

SEQ ID NO: 48529 - protein, 979 aa, synthetic construct
  REGION 1..979: note = engineered CasX variant
QEIKRINKIRRRLVKDSNTKKAGKTGPMKTLLVRVMTPDLRERLENLRKKPENIPQPISNTSRANLNKLLTDYTEMKKAILHVYWEEFQKDPVGLMSRVAQPASKKIDQNKLKPEMDEKGNLTTAGFACSQCGQPLFVYKLEQVSEKGKAYTNYFGRCNVAEHEKLILLAQLKPEKDSDEAVTYSLGKFGQRALDFYSIHVTKESTHPVKPLAQIAGNRYASHPVGKALSDACMGTIASFLSKYQDIIIEHQKVVKGNQKRLESLRELAGKENLEYPSVTLPPQPHTKEGVDAYNEVIARVRMWVNLNLWQKLKLSRDDAKPLLRLKGFPSFPLVERQANEVDWWDMVCNVKKLINEKKEDGKVFWQNLAGYKRQEALRPYLSSEEDRKKGKKFARYQLGDLLLHLEKKHGEDWGKVYDEAWERIDKKVEGLSKHIKLEEERRSEDAQSKAALTDWLRAKASFVIEGLKEADDKDEFCRCELKLQKWYGDLRGKPFAIEAENSILDISGFSKQYNCAFIWQKDGVKKLNLYLIINYFKGGKLRFKKIKPEAFEANRFYTVINKKSGEIVPMEVNFNFDDPNLIILPLAFGKRQGREFIWNDLLSLETGSLQLANGRVIEKTLYNRRTRQDEPALFVALTFERREVLDSSNIKPMNLIGVDRGENIPAVIALTDPEGCPLSRFKDSLGNPTHILRIGESYKEKQRTIQAKKEVEQRRAGGYSRKYASKAKNLADDMVRNTARDLLYYAVTQDAMLIFENLSRGFGRQGKRTFMAERQYTRMEDWLTAKLAYEGLPSKTYLSKTLAQYTSKTCSNCGFTITSADYDRVLEKLKKTATGWMTTINGKELKVEGQITYYNRYKRQNVVKDLSVELDRLSEESVNNDISSWTKGRSGEALSLLKKRFSHRPVQEKFVCLNCGFETHADEQAALNIARSWLFLRSQEYKKYQTNKTTGNTDKRAFVETWQSFYRKKLKEVWKPAV

SEQ ID NO: 48530 - protein, 979 aa, synthetic construct
  REGION 1..979: note = engineered CasX variant
QEIKRINKIRRRLVKDSNTKKAGKTGPMKTLLVRVMTPDLRERLENLRKKPENIPQPISNTSRANLNKLLTDYTEMKKAILHVYWEEFQKDPVGLMSRVAQPASKKIDQNKLKPEMDEKGNLTTAGFACSQCGQPLFVYKLEQVSEKGKAYTNYFGRCNVAEHEKLILLAQLKPEKDSDEAVTYSLGKFGQRALDFYSIHVTKESTHPVKPLAQIAGNRYASSPVGKALSDACMGTIASFLSKYQDIIIEHQKVVKGNQKRLESLRELAGKENLEYPSVTLPPQPHTKEGVDAYNEVIARVRMWVNLNLWQKLKLSRDDAKPLLRLKGFPSFPLVERQANEVDWWDMVCNVKKLINEKKEDGKVFWQNLAGYKRQEALRPYLSSEEDRKKGKKFARYQLGDLLLHLEKKHGEDWGKVYDEAWERIDKKVEGLSKHIKLEEERRSEDAQSKAALTDWLRAKASFVIEGLKEADDKDEFCRCELKLQKWYGDLRGKPFAIEAENSILDISGFSKQYNCAFIWQKDGVKKLNLYLIINYFKGGKLRFKKIKPEAFEANRFYTVINKKSGEIVPMEVNFNFDDPNLIILPLAFGKRQGREFIWNDLLSLETGSLQLANGRVIEKTLYNRRTRQDEPALFVALTFERREVLDSSNIKPMNLIGVDRGENIPAVIALTDPEGCPLSRFKDSLGNPTHILRIGESYKEKQRTIQAKKEVEQRRAGGYSRKYASKAKNLADDMVRNTARDLLYYAVTQDAMLIFENLSRGFGRQGKRTFMAERQYTRMEDWLTAKLAYEGLPSKTYLSKTLAQYTSKTCSNCGFTITSADYDRVLEKLKKTATGWMTTINGKELKVEGQITYYNRYKRQNVVKDLSVELDRLSEESVNNDISSWTKGRSGEALSLLKKRFSHRPVQEKFVCLNCGFETHADEQAALNIARSWLFLRSQEYKKYQTNKTTGNTDKRAFVETWQSFYRKKLKEVWKPAV

SEQ ID NO: 48531 - protein, 979 aa, synthetic construct
  REGION 1..979: note = engineered CasX variant
QEIKRINKIRRRLVKDSNTKKAGKTGPMKTLLVRVMTPDLRERLENLRKKPENIPQPISNTSRANLNKLLTDYTEMKKAILHVYWEEFQKDPVGLMSRVAQPASKKIDQNKLKPEMDEKGNLTTAGFACSQCGQPLFVYKLEQVSEKGKAYTNYFGRCNVAEHEKLILLAQLKPEKDSDEAVTYSLGKFGQRALDFYSIHVTKESTHPVKPLAQIAGNRYASTPVGKALSDACMGTIASFLSKYQDIIIEHQKVVKGNQKRLESLRELAGKENLEYPSVTLPPQPHTKEGVDAYNEVIARVRMWVNLNLWQKLKLSRDDAKPLLRLKGFPSFPLVERQANEVDWWDMVCNVKKLINEKKEDGKVFWQNLAGYKRQEALRPYLSSEEDRKKGKKFARYQLGDLLLHLEKKHGEDWGKVYDEAWERIDKKVEGLSKHIKLEEERRSEDAQSKAALTDWLRAKASFVIEGLKEADDKDEFCRCELKLQKWYGDLRGKPFAIEAENSILDISGFSKQYNCAFIWQKDGVKKLNLYLIINYFKGGKLRFKKIKPEAFEANRFYTVINKKSGEIVPMEVNFNFDDPNLIILPLAFGKRQGREFIWNDLLSLETGSLQLANGRVIEKTLYNRRTRQDEPALFVALTFERREVLDSSNIKPMNLIGVDRGENIPAVIALTDPEGCPLSRFKDSLGNPTHILRIGESYKEKQRTIQAKKEVEQRRAGGYSRKYASKAKNLADDMVRNTARDLLYYAVTQDAMLIFENLSRGFGRQGKRTFMAERQYTRMEDWLTAKLAYEGLPSKTYLSKTLAQYTSKTCSNCGFTITSADYDRVLEKLKKTATGWMTTINGKELKVEGQITYYNRYKRQNVVKDLSVELDRLSEESVNNDISSWTKGRSGEALSLLKKRFSHRPVQEKFVCLNCGFETHADEQAALNIARSWLFLRSQEYKKYQTNKTTGNTDKRAFVETWQSFYRKKLKEVWKPAV

SEQ ID NO: 48532 - protein, 979 aa, synthetic construct
  REGION 1..979: note = engineered CasX variant
QEIKRINKIRRRLVKDSNTKKAGKTGPMKTLLVRVMTPDLRERLENLRKKPENIPQPISNTSRANLNKLLTDYTEMKKAILHVYWEEFQKDPVGLMSRVAQPASKKIDQNKLKPEMDEKGNLTTAGFACSQCGQPLFVYKLEQVSEKGKAYTNYFGRCNVAEHEKLILLAQLKPEKDSDEAVTYSLGKFGQRALDFYSIHVTKESTHPVKPLAQIAGNRYASAPVGKALSDACMGTIASFLSKYQDIIIEHQKVVKGNQKRLESLRELAGKENLEYPSVTLPPQPHTKEGVDAYNEVIARVRMWVNLNLWQKLKLSRDDAKPLLRLKGFPSFPLVERQANEVDWWDMVCNVKKLINEKKEDGKVFWQNLAGYKRQEALRPYLSSEEDRKKGKKFARYQLGDLLLHLEKKHGEDWGKVYDEAWERIDKKVEGLSKHIKLEEERRSEDAQSKAALTDWLRAKASFVIEGLKEADDKDEFCRCELKLQKWYGDLRGKPFAIEAENSILDISGFSKQYNCAFIWQKDGVKKLNLYLIINYFKGGKLRFKKIKPEAFEANRFYTVINKKSGEIVPMEVNFNFDDPNLIILPLAFGKRQGREFIWNDLLSLETGSLQLANGRVIEKTLYNRRTRQDEPALFVALTFERREVLDSSNIKPMNLIGVDRGENIPAVIALTDPEGCPLSRFKDSLGNPTHILRIGESYKEKQRTIQAKKEVEQRRAGGYSRKYASKAKNLADDMVRNTARDLLYYAVTQDAMLIFENLSRGFGRQGKRTFMAERQYTRMEDWLTAKLAYEGLPSKTYLSKTLAQYTSKTCSNCGFTITSADYDRVLEKLKKTATGWMTTINGKELKVEGQITYYNRYKRQNVVKDLSVELDRLSEESVNNDISSWTKGRSGEALSLLKKRFSHRPVQEKFVCLNCGFETHADEQAALNIARSWLFLRSQEYKKYQTNKTTGNTDKRAFVETWQSFYRKKLKEVWKPAV

SEQ ID NO: 48533 - protein, 979 aa, synthetic construct
  REGION 1..979: note = engineered CasX variant
QEIKRINKIRRRLVKDSNTKKAGKTGPMKTLLVRVMTPDLRERLENLRKKPENIPQPISNTSRANLNKLLTDYTEMKKAILHVYWEEFQKDPVGLMSRVAQPASKKIDQNKLKPEMDEKGNLTTAGFACSQCGQPLFVYKLEQVSEKGKAYTNYFGRCNVAEHEKLILLAQLKPEKDSDEAVTYSLGKFGQRALDFYSIHVTKESTHPVKPLAQIAGNRYASVPVGKALSDACMGTIASFLSKYQDIIIEHQKVVKGNQKRLESLRELAGKENLEYPSVTLPPQPHTKEGVDAYNEVIARVRMWVNLNLWQKLKLSRDDAKPLLRLKGFPSFPLVERQANEVDWWDMVCNVKKLINEKKEDGKVFWQNLAGYKRQEALRPYLSSEEDRKKGKKFARYQLGDLLLHLEKKHGEDWGKVYDEAWERIDKKVEGLSKHIKLEEERRSEDAQSKAALTDWLRAKASFVIEGLKEADDKDEFCRCELKLQKWYGDLRGKPFAIEAENSILDISGFSKQYNCAFIWQKDGVKKLNLYLIINYFKGGKLRFKKIKPEAFEANRFYTVINKKSGEIVPMEVNFNFDDPNLIILPLAFGKRQGREFIWNDLLSLETGSLQLANGRVIEKTLYNRRTRQDEPALFVALTFERREVLDSSNIKPMNLIGVDRGENIPAVIALTDPEGCPLSRFKDSLGNPTHILRIGESYKEKQRTIQAKKEVEQRRAGGYSRKYASKAKNLADDMVRNTARDLLYYAVTQDAMLIFENLSRGFGRQGKRTFMAERQYTRMEDWLTAKLAYEGLPSKTYLSKTLAQYTSKTCSNCGFTITSADYDRVLEKLKKTATGWMTTINGKELKVEGQITYYNRYKRQNVVKDLSVELDRLSEESVNNDISSWTKGRSGEALSLLKKRFSHRPVQEKFVCLNCGFETHADEQAALNIARSWLFLRSQEYKKYQTNKTTGNTDKRAFVETWQSFYRKKLKEVWKPAV

SEQ ID NO: 48534 - protein, 979 aa, synthetic construct
  REGION 1..979: note = engineered CasX variant
QEIKRINKIRRRLVKDSNTKKAGKTGPMKTLLVRVMTPDLRERLENLRKKPENIPQPISNTSRANLNKLLTDYTEMKKAILHVYWEEFQKDPVGLMSRVAQPASKKIDQNKLKPEMDEKGNLTTAGFACSQCGQPLFVYKLEQVSEKGKAYTNYFGRCNVAEHEKLIKLAQLKPEKDSDEAVTYSLGKFGQRALDFYSIHVTKESTHPVKPLAQIAGNRYASGPVGKALSDACMGTIASFLSKYQDIIIEHQKVVKGNQKRLESLRELAGKENLEYPSVTLPPQPHTKEGVDAYNEVIARVRMWVNLNLWQKLKLSRDDAKPLLRLKGFPSFPLVERQANEVDWWDMVCNVKKLINEKKEDGKVFWQNLAGYKRQEALRPYLSSEEDRKKGKKFARYQLGDLLLHLEKKHGEDWGKVYDEAWERIDKKVEGLSKHIKLEEERRSEDAQSKAALTDWLRAKASFVIEGLKEADDKDEFCRCELKLQKWYGDLRGKPFAIEAENSILDISGFSKQYNCAFIWQKDGVKKLNLYLIINYFKGGKLRFKKIKPEAFEANRFYTVINKKSGEIVPMEVNFNFDDPNLIILPLAFGKRQGREFIWNDLLSLETGSLQLANGRVIEKTLYNRRTRQDEPALFVALTFERREVLDSSNIKPMNLIGVDRGENIPAVIALTDPEGCPLSRFKDSLGNPTHILRIGESYKEKQRTIQAKKEVEQRRAGGYSRKYASKAKNLADDMVRNTARDLLYYAVTQDAMLIFENLSRGFGRQGKRTFMAERQYTRMEDWLTAKLAYEGLPSKTYLSKTLAQYTSKTCSNCGFTITSADYDRVLEKLKKTATGWMTTINGKELKVEGQITYYNRYKRQNVVKDLSVELDRLSEESVNNDISSWTKGRSGEALSLLKKRFSHRPVQEKFVCLNCGFETHADEQAALNIARSWLFLRSQEYKKYQTNKTTGNTDKRAFVETWQSFYRKKLKEVWKPAV

SEQ ID NO: 48535 - protein, 978 aa, synthetic construct
  REGION 1..978: note = engineered CasX variant
QEIKRINKIRRRLVKDSNTKKAGKTGPMKTLLVRVMTPDLRERLENLRKKPENIPQPISNTSRANLNKLLTDYTEMKKAILHVYWEEFQKDPVGLMSRVAQPASKKIDQNKLKPEMDEKGNLTTAGFACSQCGQPLFVYKLEQVSEKGKAYTNYFGRCNVAEHEKLILLAQLKPEKDSDEAVTYSLGKFGQRALDFYSIHVTKESTHPVKPLAQIAGNRYASPVGKALSDACMGTIASFLSKYQDIIIEHQKVVKGNQKRLESLRELAGKENLEYPSVTLPPQPHTKEGVDAYNEVIARVRMWVNLNLWQKLKLSRDDAKPLLRLKGFPSFPLVERQANEVDWWDMVCNVKKLINEKKEDGKVFWQNLAGYKRQEALRPYLSSEEDRKKGKKFARYQLGDLLLHLEKKHGEDWGKVYDEAWERIDKKVEGLSKHIKLEEERRSEDAQSKAALTDWLRAKASFVIEGLKEADDKDEFCRCELKLQKWYGDLRGKPFAIEAENSILDISGFSKQYNCAFIWQKDGVKKLNLYLIINYFKGGKLRFKKIKPEAFEANRFYTVINKKSGEIVPMEVNFNFDDPNLIILPLAFGKRQGREFIWNDLLSLETGSLQLANGRVIEKTLYNRRTRQDEPALFVALTFERREVLDSSNIKPMNLIGVDRGENIPAVIALTDPEGCPLSRFKDSLGNPTHILRIGESYKEKQRTIQAKKEVEQRRAGGYSRKYASKAKNLADDMVRNTARDLLYYAVTQDAMLIFENLSRGFGRQGKRTFMAERQYTRMEDWLTAKLAYEGLPSKTYLSKTLAQYTSKTCSNCGFTITSADYDRVLEKLKKTATGWMTTINGKELKVEGQITYYNRYKRQNVVKDLSVELDRLSEESVNNDISSWTKGRSGEALSLLKKRFSHRPVQEKFVCLNCGFETHADEQAALNIARSWLFLRSQEYKKYQTNKTTGNTDKRAFVETWQSFYRKKLKEVWKPAV

SEQ ID NO: 48536 - protein, 979 aa, synthetic construct
  REGION 1..979: note = engineered CasX variant
QEIKRINKIRRRLVKDSNTKKAGKTGPMKTLLVRVMTPDLRERLENLRKKPENIPQPISNTSRANLNKLLTDYTEMKKAILHVYWEEFQKDPVGLMSRVAQPASKKIDQNKLKPEMDEKGNLTTAGFACSQCGQPLFVYKLEQVSEKGKAYTNYFGRCNVAEHEKLILLAQLKPEKDSDEAVTYSLGKFGQRALDFYSIHVTKESTHPVKPLAQIAGNRYASYPVGKALSDACMGTIASFLSKYQDIIIEHQKVVKGNQKRLESLRELAGKENLEYPSVTLPPQPHTKEGVDAYNEVIARVRMWVNLNLWQKLKLSRDDAKPLLRLKGFPSFPLVERQANEVDWWDMVCNVKKLINEKKEDGKVFWQNLAGYKRQEALRPYLSSEEDRKKGKKFARYQLGDLLLHLEKKHGEDWGKVYDEAWERIDKKVEGLSKHIKLEEERRSEDAQSKAALTDWLRAKASFVIEGLKEADKDEFCRCELKLQKWYGDLRGKPFAIEAENSILDISGFSKQYNCAFIWQKDGVKKLNLYLIINYFKGGKLRFKKIKPEAFEANRFYTVINKKSGEIVPMEVNFNFDDPNLIILPLAFGKRQGREFIWNDLLSLETGSLQLANGRVIEKTLYNRRTRQDEPALFVALTFERREVLDSSNIKPMNLIGVDRGENIPAVIALTDPEGCPLSRFKDSLGNPTHILRIGESYKEKQRTIQAKKEVEQRRAGGYSRKYASKAKNLADDMVRNTARDLLYYAVTQDAMLIFENLSRGFGRQGKRTFMAERQYTRMEDWLTAKLAYEGLPSKTYLSKTLAQYTSKTCSNCGFTITSADYDRVLEKLKKTATGWMTTINGKELKVEGQITYYNRYKRQNVVKDLSVELDRLSEESVNNDISSWTKGRSGNEALSLLKKRFSHRPVQEKFVCLNCGFETHADEQAALNIARSWLFLRSQEYKKYQTNKTTGNTDKRAFVETWQSFYRKKLKEVWKPAV

SEQ ID NO: 48537 - protein, 979 aa, synthetic construct
  REGION 1..979: note = engineered CasX variant
QEIKRINKIRRRLVKDSNTKKAGKTGPMKTLLVRVMTPDLRERLENLRKKPENIPQPISNTSRANLNKLLTDYTEMKKAILHVYWEEFQKDPVGLMSRVAQPASKKIDQNKLKPEMDEKGNLTTAGFACSQCGQPLFVYKLEQVSEKGKAYTNYFGRCNVAEHEKLILLAQLKPEKDSDEAVTYSLGKFGQRALDFYSIHVTKESTHPVKPLAQIAGNRYASHPVGKALSDACMGTIASFLSKYQDIIIEHQKVVKGNQKRLESLRELAGKENLEYPSVTLPPQPHTKEGVDAYNEVIARVRMWVNLNLWQKLKLSRDDAKPLLRLKGFPSFPLVERQANEVDWWDMVCNVKKLINEKKEDGKVFWQNLAGYKRQEALRPYLSSEEDRKKGKKFARYQLGDLLLHLEKKHGEDWGKVYDEAWERIDKKVEGLSKHIKLEEERRSEDAQSKAALTDWLRAKASFVIEGLKEADKDEFCRCELKLQKWYGDLRGKPFAIEAENSILDISGFSKQYNCAFIWQKDGVKKLNLYLIINYFKGGKLRFKKIKPEAFEANRFYTVINKKSGEIVPMEVNFNFDDPNLIILPLAFGKRQGREFIWNDLLSLETGSLQLANGRVIEKTLYNRRTRQDEPALFVALTFERREVLDSSNIKPMNLIGVDRGENIPAVIALTDPEGCPLSRFKDSLGNPTHILRIGESYKEKQRTIQAKKEVEQRRAGGYSRKYASKAKNLADDMVRNTARDLLYYAVTQDAMLIFENLSRGFGRQGKRTFMAERQYTRMEDWLTAKLAYEGLPSKTYLSKTLAQYTSKTCSNCGFTITSADYDRVLEKLKKTATGWMTTINGKELKVEGQITYYNRYKRQNVVKDLSVELDRLSEESVNNDISSWTKGRSGNEALSLLKKRFSHRPVQEKFVCLNCGFETHADEQAALNIARSWLFLRSQEYKKYQTNKTTGNTDKRAFVETWQSFYRKKLKEVWKPAV

SEQ ID NO: 48538 - protein, 979 aa, synthetic construct
  REGION 1..979: note = engineered CasX variant
QEIKRINKIRRRLVKDSNTKKAGKTGPMKTLLVRVMTPDLRERLENLRKKPENIPQPISNTSRANLNKLLTDYTEMKKAILHVYWEEFQKDPVGLMSRVAQPASKKIDQNKLKPEMDEKGNLTTAGFACSQCGQPLFVYKLEQVSEKGKAYTNYFGRCNVAEHEKLILLAQLKPEKDSDEAVTYSLGKFGQRALDFYSIHVTKESTHPVKPLAQIAGNRYASSPVGKALSDACMGTIASFLSKYQDIIIEHQKVVKGNQKRLESLRELAGKENLEYPSVTLPPQPHTKEGVDAYNEVIARVRMWVNLNLWQKLKLSRDDAKPLLRLKGFPSFPLVERQANEVDWWDMVCNVKKLINEKKEDGKVFWQNLAGYKRQEALRPYLSSEEDRKKGKKFARYQLGDLLLHLEKKHGEDWGKVYDEAWERIDKKVEGLSKHIKLEEERRSEDAQSKAALTDWLRAKASFVIEGLKEADKDEFCRCELKLQKWYGDLRGKPFAIEAENSILDISGFSKQYNCAFIWQKDGVKKLNLYLIINYFKGGKLRFKKIKPEAFEANRFYTVINKKSGEIVPMEVNFNFDDPNLIILPLAFGKRQGREFIWNDLLSLETGSLQLANGRVIEKTLYNRRTRQDEPALFVALTFERREVLDSSNIKPMNLIGVDRGENIPAVIALTDPEGCPLSRFKDSLGNPTHILRIGESYKEKQRTIQAKKEVEQRRAGGYSRKYASKAKNLADDMVRNTARDLLYYAVTQDAMLIFENLSRGFGRQGKRTFMAERQYTRMEDWLTAKLAYEGLPSKTYLSKTLAQYTSKTCSNCGFTITSADYDRVLEKLKKTATGWMTTINGKELKVEGQITYYNRYKRQNVVKDLSVELDRLSEESVNNDISSWTKGRSGNEALSLLKKRFSHRPVQEKFVCLNCGFETHADEQAALNIARSWLFLRSQEYKKYQTNKTTGNTDKRAFVETWQSFYRKKLKEVWKPAV

SEQ ID NO: 48539 - protein, 979 aa, synthetic construct
  REGION 1..979: note = engineered CasX variant
QEIKRINKIRRRLVKDSNTKKAGKTGPMKTLLVRVMTPDLRERLENLRKKPENIPQPISNTSRANLNKLLTDYTEMKKAILHVYWEEFQKDPVGLMSRVAQPASKKIDQNKLKPEMDEKGNLTTAGFACSQCGQPLFVYKLEQVSEKGKAYTNYFGRCNVAEHEKLILLAQLKPEKDSDEAVTYSLGKFGQRALDFYSIHVTKESTHPVKPLAQIAGNRYASTPVGKALSDACMGTIASFLSKYQDIIIEHQKVVKGNQKRLESLRELAGKENLEYPSVTLPPQPHTKEGVDAYNEVIARVRMWVNLNLWQKLKLSRDDAKPLLRLKGFPSFPLVERQANEVDWWDMVCNVKKLINEKKEDGKVFWQNLAGYKRQEALRPYLSSEEDRKKGKKFARYQLGDLLLHLEKKHGEDWGKVYDEAWERIDKKVEGLSKHIKLEEERRSEDAQSKAALTDWLRAKASFVIEGLKEADKDEFCRCELKLQKWYGDLRGKPFAIEAENSILDISGFSKQYNCAFIWQKDGVKKLNLYLIINYFKGGKLRFKKIKPEAFEANRFYTVINKKSGEIVPMEVNFNFDDPNLIILPLAFGKRQGREFIWNDLLSLETGSLQLANGRVIEKTLYNRRTRQDEPALFVALTFERREVLDSSNIKPMNLIGVDRGENIPAVIALTDPEGCPLSRFKDSLGNPTHILRIGESYKEKQRTIQAKKEVEQRRAGGYSRKYASKAKNLADDMVRNTARDLLYYAVTQDAMLIFENLSRGFGRQGKRTFMAERQYTRMEDWLTAKLAYEGLPSKTYLSKTLAQYTSKTCSNCGFTITSADYDRVLEKLKKTATGWMTTINGKELKVEGQITYYNRYKRQNVVKDLSVELDRLSEESVNNDISSWTKGRSGNEALSLLKKRFSHRPVQEKFVCLNCGFETHADEQAALNIARSWLFLRSQEYKKYQTNKTTGNTDKRAFVETWQSFYRKKLKEVWKPAV

SEQ ID NO: 48540 - protein, 979 aa, synthetic construct
  REGION 1..979: note = engineered CasX variant
QEIKRINKIRRRLVKDSNTKKAGKTGPMKTLLVRVMTPDLRERLENLRKKPENIPQPISNTSRANLNKLLTDYTEMKKAILHVYWEEFQKDPVGLMSRVAQPASKKIDQNKLKPEMDEKGNLTTAGFACSQCGQPLFVYKLEQVSEKGKAYTNYFGRCNVAEHEKLILLAQLKPEKDSDEAVTYSLGKFGQRALDFYSIHVTKESTHPVKPLAQIAGNRYASAPVGKALSDACMGTIASFLSKYQDIIIEHQKVVKGNQKRLESLRELAGKENLEYPSVTLPPQPHTKEGVDAYNEVIARVRMWVNLNLWQKLKLSRDDAKPLLRLKGFPSFPLVERQANEVDWWDMVCNVKKLINEKKEDGKVFWQNLAGYKRQEALRPYLSSEEDRKKGKKFARYQLGDLLLHLEKKHGEDWGKVYDEAWERIDKKVEGLSKHIKLEEERRSEDAQSKAALTDWLRAKASFVIEGLKEADKDEFCRCELKLQKWYGDLRGKPFAIEAENSILDISGFSKQYNCAFIWQKDGVKKLNLYLIINYFKGGKLRFKKIKPEAFEANRFYTVINKKSGEIVPMEVNFNFDDPNLIILPLAFGKRQGREFIWNDLLSLETGSLQLANGRVIEKTLYNRRTRQDEPALFVALTFERREVLDSSNIKPMNLIGVDRGENIPAVIALTDPEGCPLSRFKDSLGNPTHILRIGESYKEKQRTIQAKKEVEQRRAGGYSRKYASKAKNLADDMVRNTARDLLYYAVTQDAMLIFENLSRGFGRQGKRTFMAERQYTRMEDWLTAKLAYEGLPSKTYLSKTLAQYTSKTCSNCGFTITSADYDRVLEKLKKTATGWMTTINGKELKVEGQITYYNRYKRQNVVKDLSVELDRLSEESVNNDISSWTKGRSGNEALSLLKKRFSHRPVQEKFVCLNCGFETHADEQAALNIARSWLFLRSQEYKKYQTNKTTGNTDKRAFVETWQSFYRKKLKEVWKPAV

SEQ ID NO: 48541 - protein, 979 aa, synthetic construct
  REGION 1..979: note = engineered CasX variant
QEIKRINKIRRRLVKDSNTKKAGKTGPMKTLLVRVMTPDLRERLENLRKKPENIPQPISNTSRANLNKLLTDYTEMKKAILHVYWEEFQKDPVGLMSRVAQPASKKIDQNKLKPEMDEKGNLTTAGFACSQCGQPLFVYKLEQVSEKGKAYTNYFGRCNVAEHEKLILLAQLKPEKDSDEAVTYSLGKFGQRALDFYSIHVTKESTHPVKPLAQIAGNRYASVPVGKALSDACMGTIASFLSKYQDIIIEHQKVVKGNQKRLESLRELAGKENLEYPSVTLPPQPHTKEGVDAYNEVIARVRMWVNLNLWQKLKLSRDDAKPLLRLKGFPSFPLVERQANEVDWWDMVCNVKKLINEKKEDGKVFWQNLAGYKRQEALRPYLSSEEDRKKGKKFARYQLGDLLLHLEKKHGEDWGKVYDEAWERIDKKVEGLSKHIKLEEERRSEDAQSKAALTDWLRAKASFVIEGLKEADKDEFCRCELKLQKWYGDLRGKPFAIEAENSILDISGFSKQYNCAFIWQKDGVKKLNLYLIINYFKGGKLRFKKIKPEAFEANRFYTVINKKSGEIVPMEVNFNFDDPNLIILPLAFGKRQGREFIWNDLLSLETGSLQLANGRVIEKTLYNRRTRQDEPALFVALTFERREVLDSSNIKPMNLIGVDRGENIPAVIALTDPEGCPLSRFKDSLGNPTHILRIGESYKEKQRTIQAKKEVEQRRAGGYSRKYASKAKNLADDMVRNTARDLLYYAVTQDAMLIFENLSRGFGRQGKRTFMAERQYTRMEDWLTAKLAYEGLPSKTYLSKTLAQYTSKTCSNCGFTITSADYDRVLEKLKKTATGWMTTINGKELKVEGQITYYNRYKRQNVVKDLSVELDRLSEESVNNDISSWTKGRSGNEALSLLKKRFSHRPVQEKFVCLNCGFETHADEQAALNIARSWLFLRSQEYKKYQTNKTTGNTDKRAFVETWQSFYRKKLKEVWKPAV

SEQ ID NO: 48542 - protein, 979 aa, synthetic construct
  REGION 1..979: note = engineered CasX variant
QEIKRINKIRRRLVKDSNTKKAGKTGPMKTLLVRVMTPDLRERLENLRKKPENIPQPISNTSRANLNKLLTDYTEMKKAILHVYWEEFQKDPVGLMSRVAQPASKKIDQNKLKPEMDEKGNLTTAGFACSQCGQPLFVYKLEQVSEKGKAYTNYFGRCNVAEHEKLIKLAQLKPEKDSDEAVTYSLGKFGQRALDFYSIHVTKESTHPVKPLAQIAGNRYASGPVGKALSDACMGTIASFLSKYQDIIIEHQKVVKGNQKRLESLRELAGKENLEYPSVTLPPQPHTKEGVDAYNEVIARVRMWVNLNLWQKLKLSRDDAKPLLRLKGFPSFPLVERQANEVDWWDMVCNVKKLINEKKEDGKVFWQNLAGYKRQEALRPYLSSEEDRKKGKKFARYQLGDLLLHLEKKHGEDWGKVYDEAWERIDKKVEGLSKHIKLEEERRSEDAQSKAALTDWLRAKASFVIEGLKEADKDEFCRCELKLQKWYGDLRGKPFAIEAENSILDISGFSKQYNCAFIWQKDGVKKLNLYLIINYFKGGKLRFKKIKPEAFEANRFYTVINKKSGEIVPMEVNFNFDDPNLIILPLAFGKRQGREFIWNDLLSLETGSLQLANGRVIEKTLYNRRTRQDEPALFVALTFERREVLDSSNIKPMNLIGVDRGENIPAVIALTDPEGCPLSRFKDSLGNPTHILRIGESYKEKQRTIQAKKEVEQRRAGGYSRKYASKAKNLADDMVRNTARDLLYYAVTQDAMLIFENLSRGFGRQGKRTFMAERQYTRMEDWLTAKLAYEGLPSKTYLSKTLAQYTSKTCSNCGFTITSADYDRVLEKLKKTATGWMTTINGKELKVEGQITYYNRYKRQNVVKDLSVELDRLSEESVNNDISSWTKGRSGNEALSLLKKRFSHRPVQEKFVCLNCGFETHADEQAALNIARSWLFLRSQEYKKYQTNKTTGNTDKRAFVETWQSFYRKKLKEVWKPAV

SEQ ID NO: 48543 - protein, 978 aa, synthetic construct
  REGION 1..978: note = engineered CasX variant
QEIKRINKIRRRLVKDSNTKKAGKTGPMKTLLVRVMTPDLRERLENLRKKPENIPQPISNTSRANLNKLLTDYTEMKKAILHVYWEEFQKDPVGLMSRVAQPASKKIDQNKLKPEMDEKGNLTTAGFACSQCGQPLFVYKLEQVSEKGKAYTNYFGRCNVAEHEKLILLAQLKPEKDSDEAVTYSLGKFGQRALDFYSIHVTKESTHPVKPLAQIAGNRYASPVGKALSDACMGTIASFLSKYQDIIIEHQKVVKGNQKRLESLRELAGKENLEYPSVTLPPQPHTKEGVDAYNEVIARVRMWVNLNLWQKLKLSRDDAKPLLRLKGFPSFPLVERQANEVDWWDMVCNVKKLINEKKEDGKVFWQNLAGYKRQEALRPYLSSEEDRKKGKKFARYQLGDLLLHLEKKHGEDWGKVYDEAWERIDKKVEGLSKHIKLEEERRSEDAQSKAALTDWLRAKASFVIEGLKEADKDEFCRCELKLQKWYGDLRGKPFAIEAENSILDISGFSKQYNCAFIWQKDGVKKLNLYLIINYFKGGKLRFKKIKPEAFEANRFYTVINKKSGEIVPMEVNFNFDDPNLIILPLAFGKRQGREFIWNDLLSLETGSLQLANGRVIEKTLYNRRTRQDEPALFVALTFERREVLDSSNIKPMNLIGVDRGENIPAVIALTDPEGCPLSRFKDSLGNPTHILRIGESYKEKQRTIQAKKEVEQRRAGGYSRKYASKAKNLADDMVRNTARDLLYYAVTQDAMLIFENLSRGFGRQGKRTFMAERQYTRMEDWLTAKLAYEGLPSKTYLSKTLAQYTSKTCSNCGFTITSADYDRVLEKLKKTATGWMTTINGKELKVEGQITYYNRYKRQNVVKDLSVELDRLSEESVNNDISSWTKGRSGNEALSLLKKRFSHRPVQEKFVCLNCGFETHADEQAALNIARSWLFLRSQEYKKYQTNKTTGNTDKRAFVETWQSFYRKKLKEVWKPAV

SEQ ID NO: 48544 - protein, 978 aa, synthetic construct
  REGION 1..978: note = engineered CasX variant
QEIKRINKIRRRLVKDSNTKKAGKTGPMKTLLVRVMTPDLRERLENLRKKPENIPQPISNTSRANLNKLLTDYTEMKKAILHVYWEEFQKDPVGLMSRVAQPASKKIDQNKLKPEMDEKGNLTTAGFACSQCGQPLFVYKLEQVSEKGKAYTNYFGRCNVAEHEKLILLAQLKPEKDSDEAVTYSLGKFGQRALDFYSIHVTKESTHPVKPLAQIAGNRYASYPVGKALSDACMGTIASFLSKYQDIIIEHQKVVKGNQKRLESLRELAGKENLEYPSVTLPPQPHTKEGVDAYNEVIARVRMWVNLNLWQKLKLSRDDAKPLLRLKGFPSFPLVERQANEVDWWDMVCNVKKLINEKKEDGKVFWQNLAGYKRQEALRPYLSSEEDRQKGKKFARYQLGDLLLHLEKKHGEDWGKVYDEAWERIDKKVEGLSKHIKLEEERRSEDAQSKAALTDWLRAKASFVIEGLKEADKDEFCRCELKLQKWYGDLRGKPFAIEAENSILDISGFSKQYNCAFIWQKDGVKKLNLYLIINYFKGGKLRFKKIKPEAFEANRFYTVINKKSGEIVPMEVNFNFDDPNLIILPLAFGKRQGREFIWNDLLSLETGSLQLANGRVIEKTLYNRRTRQDEPALFVALTFERREVLDSSNIKPMNLIGVDRGENIPAVIALTDPEGCPLSRFKDSLGNPTHILRIGESYKEKQRTIQAKKEVEQRRAGGYSRKYASKAKNLADDMVRNTARDLLYYAVTQDAMLIFENLSRGFGRQGKRTFMAERQYTRMEDWLTAKLAYEGLPSKTYLSKTLAQYTSKTCSNCGFTITSADYDRVLEKLKKTATGWMTTINGKELKVEGQITYYNRYKRQNVVKDLSVELDRLSEESVNNDISSWTKGRSGEALSLLKKRFSHRPVQEKFVCLNCGFETHADEQAALNIARSWLFLRSQEYKKYQTNKTTGNTDKRAFVETWQSFYRKKLKEVWKPAV

SEQ ID NO: 48545 - protein, 978 aa, synthetic construct
  REGION 1..978: note = engineered CasX variant
QEIKRINKIRRRLVKDSNTKKAGKTGPMKTLLVRVMTPDLRERLENLRKKPENIPQPISNTSRANLNKLLTDYTEMKKAILHVYWEEFQKDPVGLMSRVAQPASKKIDQNKLKPEMDEKGNLTTAGFACSQCGQPLFVYKLEQVSEKGKAYTNYFGRCNVAEHEKLILLAQLKPEKDSDEAVTYSLGKFGQRALDFYSIHVTKESTHPVKPLAQIAGNRYASHPVGKALSDACMGTIASFLSKYQDIIIEHQKVVKGNQKRLESLRELAGKENLEYPSVTLPPQPHTKEGVDAYNEVIARVRMWVNLNLWQKLKLSRDDAKPLLRLKGFPSFPLVERQANEVDWWDMVCNVKKLINEKKEDGKVFWQNLAGYKRQEALRPYLSSEEDRQKGKKFARYQLGDLLLHLEKKHGEDWGKVYDEAWERIDKKVEGLSKHIKLEEERRSEDAQSKAALTDWLRAKASFVIEGLKEADKDEFCRCELKLQKWYGDLRGKPFAIEAENSILDISGFSKQYNCAFIWQKDGVKKLNLYLIINYFKGGKLRFKKIKPEAFEANRFYTVINKKSGEIVPMEVNFNFDDPNLIILPLAFGKRQGREFIWNDLLSLETGSLQLANGRVIEKTLYNRRTRQDEPALFVALTFERREVLDSSNIKPMNLIGVDRGENIPAVIALTDPEGCPLSRFKDSLGNPTHILRIGESYKEKQRTIQAKKEVEQRRAGGYSRKYASKAKNLADDMVRNTARDLLYYAVTQDAMLIFENLSRGFGRQGKRTFMAERQYTRMEDWLTAKLAYEGLPSKTYLSKTLAQYTSKTCSNCGFTITSADYDRVLEKLKKTATGWMTTINGKELKVEGQITYYNRYKRQNVVKDLSVELDRLSEESVNNDISSWTKGRSGEALSLLKKRFSHRPVQEKFVCLNCGFETHADEQAALNIARSWLFLRSQEYKKYQTNKTTGNTDKRAFVETWQSFYRKKLKEVWKPAV

SEQ ID NO: 48546 - protein, 978 aa, synthetic construct
  REGION 1..978: note = engineered CasX variant
QEIKRINKIRRRLVKDSNTKKAGKTGPMKTLLVRVMTPDLRERLENLRKKPENIPQPISNTSRANLNKLLTDYTEMKKAILHVYWEEFQKDPVGLMSRVAQPASKKIDQNKLKPEMDEKGNLTTAGFACSQCGQPLFVYKLEQVSEKGKAYTNYFGRCNVAEHEKLILLAQLKPEKDSDEAVTYSLGKFGQRALDFYSIHVTKESTHPVKPLAQIAGNRYASSPVGKALSDACMGTIASFLSKYQDIIIEHQKVVKGNQKRLESLRELAGKENLEYPSVTLPPQPHTKEGVDAYNEVIARVRMWVNLNLWQKLKLSRDDAKPLLRLKGFPSFPLVERQANEVDWWDMVCNVKKLINEKKEDGKVFWQNLAGYKRQEALRPYLSSEEDRQKGKKFARYQLGDLLLHLEKKHGEDWGKVYDEAWERIDKKVEGLSKHIKLEEERRSEDAQSKAALTDWLRAKASFVIEGLKEADKDEFCRCELKLQKWYGDLRGKPFAIEAENSILDISGFSKQYNCAFIWQKDGVKKLNLYLIINYFKGGKLRFKKIKPEAFEANRFYTVINKKSGEIVPMEVNFNFDDPNLIILPLAFGKRQGREFIWNDLLSLETGSLQLANGRVIEKTLYNRRTRQDEPALFVALTFERREVLDSSNIKPMNLIGVDRGENIPAVIALTDPEGCPLSRFKDSLGNPTHILRIGESYKEKQRTIQAKKEVEQRRAGGYSRKYASKAKNLADDMVRNTARDLLYYAVTQDAMLIFENLSRGFGRQGKRTFMAERQYTRMEDWLTAKLAYEGLPSKTYLSKTLAQYTSKTCSNCGFTITSADYDRVLEKLKKTATGWMTTINGKELKVEGQITYYNRYKRQNVVKDLSVELDRLSEESVNNDISSWTKGRSGEALSLLKKRFSHRPVQEKFVCLNCGFETHADEQAALNIARSWLFLRSQEYKKYQTNKTTGNTDKRAFVETWQSFYRKKLKEVWKPAV

SEQ ID NO: 48547 - protein, 978 aa, synthetic construct
  REGION 1..978: note = engineered CasX variant
QEIKRINKIRRRLVKDSNTKKAGKTGPMKTLLVRVMTPDLRERLENLRKKPENIPQPISNTSRANLNKLLTDYTEMKKAILHVYWEEFQKDPVGLMSRVAQPASKKIDQNKLKPEMDEKGNLTTAGFACSQCGQPLFVYKLEQVSEKGKAYTNYFGRCNVAEHEKLILLAQLKPEKDSDEAVTYSLGKFGQRALDFYSIHVTKESTHPVKPLAQIAGNRYASTPVGKALSDACMGTIASFLSKYQDIIIEHQKVVKGNQKRLESLRELAGKENLEYPSVTLPPQPHTKEGVDAYNEVIARVRMWVNLNLWQKLKLSRDDAKPLLRLKGFPSFPLVERQANEVDWWDMVCNVKKLINEKKEDGKVFWQNLAGYKRQEALRPYLSSEEDRQKGKKFARYQLGDLLLHLEKKHGEDWGKVYDEAWERIDKKVEGLSKHIKLEEERRSEDAQSKAALTDWLRAKASFVIEGLKEADKDEFCRCELKLQKWYGDLRGKPFAIEAENSILDISGFSKQYNCAFIWQKDGVKKLNLYLIINYFKGGKLRFKKIKPEAFEANRFYTVINKKSGEIVPMEVNFNFDDPNLIILPLAFGKRQGREFIWNDLLSLETGSLQLANGRVIEKTLYNRRTRQDEPALFVALTFERREVLDSSNIKPMNLIGVDRGENIPAVIALTDPEGCPLSRFKDSLGNPTHILRIGESYKEKQRTIQAKKEVEQRRAGGYSRKYASKAKNLADDMVRNTARDLLYYAVTQDAMLIFENLSRGFGRQGKRTFMAERQYTRMEDWLTAKLAYEGLPSKTYLSKTLAQYTSKTCSNCGFTITSADYDRVLEKLKKTATGWMTTINGKELKVEGQITYYNRYKRQNVVKDLSVELDRLSEESVNNDISSWTKGRSGEALSLLKKRFSHRPVQEKFVCLNCGFETHADEQAALNIARSWLFLRSQEYKKYQTNKTTGNTDKRAFVETWQSFYRKKLKEVWKPAV

SEQ ID NO: 48548 - protein, 978 aa, synthetic construct
  REGION 1..978: note = engineered CasX variant
QEIKRINKIRRRLVKDSNTKKAGKTGPMKTLLVRVMTPDLRERLENLRKKPENIPQPISNTSRANLNKLLTDYTEMKKAILHVYWEEFQKDPVGLMSRVAQPASKKIDQNKLKPEMDEKGNLTTAGFACSQCGQPLFVYKLEQVSEKGKAYTNYFGRCNVAEHEKLILLAQLKPEKDSDEAVTYSLGKFGQRALDFYSIHVTKESTHPVKPLAQIAGNRYASAPVGKALSDACMGTIASFLSKYQDIIIEHQKVVKGNQKRLESLRELAGKENLEYPSVTLPPQPHTKEGVDAYNEVIARVRMWVNLNLWQKLKLSRDDAKPLLRLKGFPSFPLVERQANEVDWWDMVCNVKKLINEKKEDGKVFWQNLAGYKRQEALRPYLSSEEDRQKGKKFARYQLGDLLLHLEKKHGEDWGKVYDEAWERIDKKVEGLSKHIKLEEERRSEDAQSKAALTDWLRAKASFVIEGLKEADKDEFCRCELKLQKWYGDLRGKPFAIEAENSILDISGFSKQYNCAFIWQKDGVKKLNLYLIINYFKGGKLRFKKIKPEAFEANRFYTVINKKSGEIVPMEVNFNFDDPNLIILPLAFGKRQGREFIWNDLLSLETGSLQLANGRVIEKTLYNRRTRQDEPALFVALTFERREVLDSSNIKPMNLIGVDRGENIPAVIALTDPEGCPLSRFKDSLGNPTHILRIGESYKEKQRTIQAKKEVEQRRAGGYSRKYASKAKNLADDMVRNTARDLLYYAVTQDAMLIFENLSRGFGRQGKRTFMAERQYTRMEDWLTAKLAYEGLPSKTYLSKTLAQYTSKTCSNCGFTITSADYDRVLEKLKKTATGWMTTINGKELKVEGQITYYNRYKRQNVVKDLSVELDRLSEESVNNDISSWTKGRSGEALSLLKKRFSHRPVQEKFVCLNCGFETHADEQAALNIARSWLFLRSQEYKKYQTNKTTGNTDKRAFVETWQSFYRKKLKEVWKPAV

SEQ ID NO: 48549 - protein, 978 aa, synthetic construct
  REGION 1..978: note = engineered CasX variant
QEIKRINKIRRRLVKDSNTKKAGKTGPMKTLLVRVMTPDLRERLENLRKKPENIPQPISNTSRANLNKLLTDYTEMKKAILHVYWEEFQKDPVGLMSRVAQPASKKIDQNKLKPEMDEKGNLTTAGFACSQCGQPLFVYKLEQVSEKGKAYTNYFGRCNVAEHEKLILLAQLKPEKDSDEAVTYSLGKFGQRALDFYSIHVTKESTHPVKPLAQIAGNRYASVPVGKALSDACMGTIASFLSKYQDIIIEHQKVVKGNQKRLESLRELAGKENLEYPSVTLPPQPHTKEGVDAYNEVIARVRMWVNLNLWQKLKLSRDDAKPLLRLKGFPSFPLVERQANEVDWWDMVCNVKKLINEKKEDGKVFWQNLAGYKRQEALRPYLSSEEDRQKGKKFARYQLGDLLLHLEKKHGEDWGKVYDEAWERIDKKVEGLSKHIKLEEERRSEDAQSKAALTDWLRAKASFVIEGLKEADKDEFCRCELKLQKWYGDLRGKPFAIEAENSILDISGFSKQYNCAFIWQKDGVKKLNLYLIINYFKGGKLRFKKIKPEAFEANRFYTVINKKSGEIVPMEVNFNFDDPNLIILPLAFGKRQGREFIWNDLLSLETGSLQLANGRVIEKTLYNRRTRQDEPALFVALTFERREVLDSSNIKPMNLIGVDRGENIPAVIALTDPEGCPLSRFKDSLGNPTHILRIGESYKEKQRTIQAKKEVEQRRAGGYSRKYASKAKNLADDMVRNTARDLLYYAVTQDAMLIFENLSRGFGRQGKRTFMAERQYTRMEDWLTAKLAYEGLPSKTYLSKTLAQYTSKTCSNCGFTITSADYDRVLEKLKKTATGWMTTINGKELKVEGQITYYNRYKRQNVVKDLSVELDRLSEESVNNDISSWTKGRSGEALSLLKKRFSHRPVQEKFVCLNCGFETHADEQAALNIARSWLFLRSQEYKKYQTNKTTGNTDKRAFVETWQSFYRKKLKEVWKPAV

SEQ ID NO: 48550 - protein, 978 aa, synthetic construct
  REGION 1..978: note = engineered CasX variant
QEIKRINKIRRRLVKDSNTKKAGKTGPMKTLLVRVMTPDLRERLENLRKKPENIPQPISNTSRANLNKLLTDYTEMKKAILHVYWEEFQKDPVGLMSRVAQPASKKIDQNKLKPEMDEKGNLTTAGFACSQCGQPLFVYKLEQVSEKGKAYTNYFGRCNVAEHEKLIKLAQLKPEKDSDEAVTYSLGKFGQRALDFYSIHVTKESTHPVKPLAQIAGNRYASGPVGKALSDACMGTIASFLSKYQDIIIEHQKVVKGNQKRLESLRELAGKENLEYPSVTLPPQPHTKEGVDAYNEVIARVRMWVNLNLWQKLKLSRDDAKPLLRLKGFPSFPLVERQANEVDWWDMVCNVKKLINEKKEDGKVFWQNLAGYKRQEALRPYLSSEEDRQKGKKFARYQLGDLLLHLEKKHGEDWGKVYDEAWERIDKKVEGLSKHIKLEEERRSEDAQSKAALTDWLRAKASFVIEGLKEADKDEFCRCELKLQKWYGDLRGKPFAIEAENSILDISGFSKQYNCAFIWQKDGVKKLNLYLIINYFKGGKLRFKKIKPEAFEANRFYTVINKKSGEIVPMEVNFNFDDPNLIILPLAFGKRQGREFIWNDLLSLETGSLQLANGRVIEKTLYNRRTRQDEPALFVALTFERREVLDSSNIKPMNLIGVDRGENIPAVIALTDPEGCPLSRFKDSLGNPTHILRIGESYKEKQRTIQAKKEVEQRRAGGYSRKYASKAKNLADDMVRNTARDLLYYAVTQDAMLIFENLSRGFGRQGKRTFMAERQYTRMEDWLTAKLAYEGLPSKTYLSKTLAQYTSKTCSNCGFTITSADYDRVLEKLKKTATGWMTTINGKELKVEGQITYYNRYKRQNVVKDLSVELDRLSEESVNNDISSWTKGRSGEALSLLKKRFSHRPVQEKFVCLNCGFETHADEQAALNIARSWLFLRSQEYKKYQTNKTTGNTDKRAFVETWQSFYRKKLKEVWKPAV

SEQ ID NO: 48551 - protein, 977 aa, synthetic construct
  REGION 1..977: note = engineered CasX variant
QEIKRINKIRRRLVKDSNTKKAGKTGPMKTLLVRVMTPDLRERLENLRKKPENIPQPISNTSRANLNKLLTDYTEMKKAILHVYWEEFQKDPVGLMSRVAQPASKKIDQNKLKPEMDEKGNLTTAGFACSQCGQPLFVYKLEQVSEKGKAYTNYFGRCNVAEHEKLILLAQLKPEKDSDEAVTYSLGKFGQRALDFYSIHVTKESTHPVKPLAQIAGNRYASPVGKALSDACMGTIASFLSKYQDIIIEHQKVVKGNQKRLESLRELAGKENLEYPSVTLPPQPHTKEGVDAYNEVIARVRMWVNLNLWQKLKLSRDDAKPLLRLKGFPSFPLVERQANEVDWWDMVCNVKKLINEKKEDGKVFWQNLAGYKRQEALRPYLSSEEDRQKGKKFARYQLGDLLLHLEKKHGEDWGKVYDEAWERIDKKVEGLSKHIKLEEERRSEDAQSKAALTDWLRAKASFVIEGLKEADKDEFCRCELKLQKWYGDLRGKPFAIEAENSILDISGFSKQYNCAFIWQKDGVKKLNLYLIINYFKGGKLRFKKIKPEAFEANRFYTVINKKSGEIVPMEVNFNFDDPNLIILPLAFGKRQGREFIWNDLLSLETGSLQLANGRVIEKTLYNRRTRQDEPALFVALTFERREVLDSSNIKPMNLIGVDRGENIPAVIALTDPEGCPLSRFKDSLGNPTHILRIGESYKEKQRTIQAKKEVEQRRAGGYSRKYASKAKNLADDMVRNTARDLLYYAVTQDAMLIFENLSRGFGRQGKRTFMAERQYTRMEDWLTAKLAYEGLPSKTYLSKTLAQYTSKTCSNCGFTITSADYDRVLEKLKKTATGWMTTINGKELKVEGQITYYNRYKRQNVVKDLSVELDRLSEESVNNDISSWTKGRSGEALSLLKKRFSHRPVQEKFVCLNCGFETHADEQAALNIARSWLFLRSQEYKKYQTNKTTGNTDKRAFVETWQSFYRKKLKEVWKPAV

SEQ ID NO: 48552 - protein, 978 aa, synthetic construct
  REGION 1..978: note = engineered CasX variant
QEIKRINKIRRRLVKDSNTKKAGKTGPMKTLLVRVMTPDLRERLENLRKKPENIPQPISNTSRANLNKLLTDYTEMKKAILHVYWEEFQKDPVGLMSRVAQPASKKIDQNKLKPEMDEKGNLTTAGFACSQCGQPLFVYKLEQVSEKGKAYTNYFGRCNVAEHEKLILLAQLKPEKDSDEAVTYSLGKFGQRALDFYSIHVTKESTHPVKPLAQIAGNRYASYPVGKALSDACMGTIASFLSKYQDIIIEHQKVVKGNQKRLESLRELAGKENLEYPSVTLPPQPHTKEGVDAYNEVIARVRMWVNLNLWQKLKLSRDDAKPLLRLKGFPSFPLVERQANEVDWWDMVCNVKKLINEKKEDGKVFWQNLAGYKRQEALRPYLSSEEDRKKGKKFARYQLGDLLLHLEKKHGEDWGKVYDEAWERIDKKVEGLSKHIKLEEERRSEDAQSKAALTDWLRAKASFVIEGLKEADKDEFCRCELKLQKWYGDLRGKPFAIEAENSILDISGFSKQYNCAFIWQKDGVKKLNLYLIINYFKGGKLRFKKIKPEAFEANRFYTVINKKSGEIVPMEVNFNFDDPNLIILPLAFGKRQGREFIWNDLLSLETGSLQLANGRVIEKTLYNRRTRQDEPALFVALTFERREVLDSSNIKPMNLIGVDRGENIPAVIALTDPEGCPLSRFKDSLGNPTHILRIGESYKEKQRTIQAKKEVEQRRAGGYSRKYASKAKNLADDMVRNTARDLLYYAVTQDAMLIFENLSRGFGRQGKRTFMAERQYTRMEDWLTAKLAYEGLPSQTYLSKTLAQYTSKTCSNCGFTITSADYDRVLEKLKKTATGWMTTINGKELKVEGQITYYNRYKRQNVVKDLSVELDRLSEESVNNDISSWTKGRSGEALSLLKKRFSHRPVQEKFVCLNCGFETHADEQAALNIARSWLFLRSQEYKKYQTNKTTGNTDKRAFVETWQSFYRKKLKEVWKPAV

SEQ ID NO: 48553 - protein, 978 aa, synthetic construct
  REGION 1..978: note = engineered CasX variant
QEIKRINKIRRRLVKDSNTKKAGKTGPMKTLLVRVMTPDLRERLENLRKKPENIPQPISNTSRANLNKLLTDYTEMKKAILHVYWEEFQKDPVGLMSRVAQPASKKIDQNKLKPEMDEKGNLTTAGFACSQCGQPLFVYKLEQVSEKGKAYTNYFGRCNVAEHEKLILLAQLKPEKDSDEAVTYSLGKFGQRALDFYSIHVTKESTHPVKPLAQIAGNRYASHPVGKALSDACMGTIASFLSKYQDIIIEHQKVVKGNQKRLESLRELAGKENLEYPSVTLPPQPHTKEGVDAYNEVIARVRMWVNLNLWQKLKLSRDDAKPLLRLKGFPSFPLVERQANEVDWWDMVCNVKKLINEKKEDGKVFWQNLAGYKRQEALRPYLSSEEDRKKGKKFARYQLGDLLLHLEKKHGEDWGKVYDEAWERIDKKVEGLSKHIKLEEERRSEDAQSKAALTDWLRAKASFVIEGLKEADKDEFCRCELKLQKWYGDLRGKPFAIEAENSILDISGFSKQYNCAFIWQKDGVKKLNLYLIINYFKGGKLRFKKIKPEAFEANRFYTVINKKSGEIVPMEVNFNFDDPNLIILPLAFGKRQGREFIWNDLLSLETGSLQLANGRVIEKTLYNRRTRQDEPALFVALTFERREVLDSSNIKPMNLIGVDRGENIPAVIALTDPEGCPLSRFKDSLGNPTHILRIGESYKEKQRTIQAKKEVEQRRAGGYSRKYASKAKNLADDMVRNTARDLLYYAVTQDAMLIFENLSRGFGRQGKRTFMAERQYTRMEDWLTAKLAYEGLPSQTYLSKTLAQYTSKTCSNCGFTITSADYDRVLEKLKKTATGWMTTINGKELKVEGQITYYNRYKRQNVVKDLSVELDRLSEESVNNDISSWTKGRSGEALSLLKKRFSHRPVQEKFVCLNCGFETHADEQAALNIARSWLFLRSQEYKKYQTNKTTGNTDKRAFVETWQSFYRKKLKEVWKPAV

SEQ ID NO: 48554 - protein, 978 aa, synthetic construct
  REGION 1..978: note = engineered CasX variant
QEIKRINKIRRRLVKDSNTKKAGKTGPMKTLLVRVMTPDLRERLENLRKKPENIPQPISNTSRANLNKLLTDYTEMKKAILHVYWEEFQKDPVGLMSRVAQPASKKIDQNKLKPEMDEKGNLTTAGFACSQCGQPLFVYKLEQVSEKGKAYTNYFGRCNVAEHEKLILLAQLKPEKDSDEAVTYSLGKFGQRALDFYSIHVTKESTHPVKPLAQIAGNRYASSPVGKALSDACMGTIASFLSKYQDIIIEHQKVVKGNQKRLESLRELAGKENLEYPSVTLPPQPHTKEGVDAYNEVIARVRMWVNLNLWQKLKLSRDDAKPLLRLKGFPSFPLVERQANEVDWWDMVCNVKKLINEKKEDGKVFWQNLAGYKRQEALRPYLSSEEDRKKGKKFARYQLGDLLLHLEKKHGEDWGKVYDEAWERIDKKVEGLSKHIKLEEERRSEDAQSKAALTDWLRAKASFVIEGLKEADKDEFCRCELKLQKWYGDLRGKPFAIEAENSILDISGFSKQYNCAFIWQKDGVKKLNLYLIINYFKGGKLRFKKIKPEAFEANRFYTVINKKSGEIVPMEVNFNFDDPNLIILPLAFGKRQGREFIWNDLLSLETGSLQLANGRVIEKTLYNRRTRQDEPALFVALTFERREVLDSSNIKPMNLIGVDRGENIPAVIALTDPEGCPLSRFKDSLGNPTHILRIGESYKEKQRTIQAKKEVEQRRAGGYSRKYASKAKNLADDMVRNTARDLLYYAVTQDAMLIFENLSRGFGRQGKRTFMAERQYTRMEDWLTAKLAYEGLPSQTYLSKTLAQYTSKTCSNCGFTITSADYDRVLEKLKKTATGWMTTINGKELKVEGQITYYNRYKRQNVVKDLSVELDRLSEESVNNDISSWTKGRSGEALSLLKKRFSHRPVQEKFVCLNCGFETHADEQAALNIARSWLFLRSQEYKKYQTNKTTGNTDKRAFVETWQSFYRKKLKEVWKPAV

SEQ ID NO: 48555 - protein, 978 aa, synthetic construct
  REGION 1..978: note = engineered CasX variant
QEIKRINKIRRRLVKDSNTKKAGKTGPMKTLLVRVMTPDLRERLENLRKKPENIPQPISNTSRANLNKLLTDYTEMKKAILHVYWEEFQKDPVGLMSRVAQPASKKIDQNKLKPEMDEKGNLTTAGFACSQCGQPLFVYKLEQVSEKGKAYTNYFGRCNVAEHEKLILLAQLKPEKDSDEAVTYSLGKFGQRALDFYSIHVTKESTHPVKPLAQIAGNRYASTPVGKALSDACMGTIASFLSKYQDIIIEHQKVVKGNQKRLESLRELAGKENLEYPSVTLPPQPHTKEGVDAYNEVIARVRMWVNLNLWQKLKLSRDDAKPLLRLKGFPSFPLVERQANEVDWWDMVCNVKKLINEKKEDGKVFWQNLAGYKRQEALRPYLSSEEDRKKGKKFARYQLGDLLLHLEKKHGEDWGKVYDEAWERIDKKVEGLSKHIKLEEERRSEDAQSKAALTDWLRAKASFVIEGLKEADKDEFCRCELKLQKWYGDLRGKPFAIEAENSILDISGFSKQYNCAFIWQKDGVKKLNLYLIINYFKGGKLRFKKIKPEAFEANRFYTVINKKSGEIVPMEVNFNFDDPNLIILPLAFGKRQGREFIWNDLLSLETGSLQLANGRVIEKTLYNRRTRQDEPALFVALTFERREVLDSSNIKPMNLIGVDRGENIPAVIALTDPEGCPLSRFKDSLGNPTHILRIGESYKEKQRTIQAKKEVEQRRAGGYSRKYASKAKNLADDMVRNTARDLLYYAVTQDAMLIFENLSRGFGRQGKRTFMAERQYTRMEDWLTAKLAYEGLPSQTYLSKTLAQYTSKTCSNCGFTITSADYDRVLEKLKKTATGWMTTINGKELKVEGQITYYNRYKRQNVVKDLSVELDRLSEESVNNDISSWTKGRSGEALSLLKKRFSHRPVQEKFVCLNCGFETHADEQAALNIARSWLFLRSQEYKKYQTNKTTGNTDKRAFVETWQSFYRKKLKEVWKPAV

SEQ ID NO: 48556 - protein, 978 aa, synthetic construct
  REGION 1..978: note = engineered CasX variant
QEIKRINKIRRRLVKDSNTKKAGKTGPMKTLLVRVMTPDLRERLENLRKKPENIPQPISNTSRANLNKLLTDYTEMKKAILHVYWEEFQKDPVGLMSRVAQPASKKIDQNKLKPEMDEKGNLTTAGFACSQCGQPLFVYKLEQVSEKGKAYTNYFGRCNVAEHEKLILLAQLKPEKDSDEAVTYSLGKFGQRALDFYSIHVTKESTHPVKPLAQIAGNRYASAPVGKALSDACMGTIASFLSKYQDIIIEHQKVVKGNQKRLESLRELAGKENLEYPSVTLPPQPHTKEGVDAYNEVIARVRMWVNLNLWQKLKLSRDDAKPLLRLKGFPSFPLVERQANEVDWWDMVCNVKKLINEKKEDGKVFWQNLAGYKRQEALRPYLSSEEDRKKGKKFARYQLGDLLLHLEKKHGEDWGKVYDEAWERIDKKVEGLSKHIKLEEERRSEDAQSKAALTDWLRAKASFVIEGLKEADKDEFCRCELKLQKWYGDLRGKPFAIEAENSILDISGFSKQYNCAFIWQKDGVKKLNLYLIINYFKGGKLRFKKIKPEAFEANRFYTVINKKSGEIVPMEVNFNFDDPNLIILPLAFGKRQGREFIWNDLLSLETGSLQLANGRVIEKTLYNRRTRQDEPALFVALTFERREVLDSSNIKPMNLIGVDRGENIPAVIALTDPEGCPLSRFKDSLGNPTHILRIGESYKEKQRTIQAKKEVEQRRAGGYSRKYASKAKNLADDMVRNTARDLLYYAVTQDAMLIFENLSRGFGRQGKRTFMAERQYTRMEDWLTAKLAYEGLPSQTYLSKTLAQYTSKTCSNCGFTITSADYDRVLEKLKKTATGWMTTINGKELKVEGQITYYNRYKRQNVVKDLSVELDRLSEESVNNDISSWTKGRSGEALSLLKKRFSHRPVQEKFVCLNCGFETHADEQAALNIARSWLFLRSQEYKKYQTNKTTGNTDKRAFVETWQSFYRKKLKEVWKPAV

SEQ ID NO: 48557 - protein, 978 aa, synthetic construct
  REGION 1..978: note = engineered CasX variant
QEIKRINKIRRRLVKDSNTKKAGKTGPMKTLLVRVMTPDLRERLENLRKKPENIPQPISNTSRANLNKLLTDYTEMKKAILHVYWEEFQKDPVGLMSRVAQPASKKIDQNKLKPEMDEKGNLTTAGFACSQCGQPLFVYKLEQVSEKGKAYTNYFGRCNVAEHEKLILLAQLKPEKDSDEAVTYSLGKFGQRALDFYSIHVTKESTHPVKPLAQIAGNRYASVPVGKALSDACMGTIASFLSKYQDIIIEHQKVVKGNQKRLESLRELAGKENLEYPSVTLPPQPHTKEGVDAYNEVIARVRMWVNLNLWQKLKLSRDDAKPLLRLKGFPSFPLVERQANEVDWWDMVCNVKKLINEKKEDGKVFWQNLAGYKRQEALRPYLSSEEDRKKGKKFARYQLGDLLLHLEKKHGEDWGKVYDEAWERIDKKVEGLSKHIKLEEERRSEDAQSKAALTDWLRAKASFVIEGLKEADKDEFCRCELKLQKWYGDLRGKPFAIEAENSILDISGFSKQYNCAFIWQKDGVKKLNLYLIINYFKGGKLRFKKIKPEAFEANRFYTVINKKSGEIVPMEVNFNFDDPNLIILPLAFGKRQGREFIWNDLLSLETGSLQLANGRVIEKTLYNRRTRQDEPALFVALTFERREVLDSSNIKPMNLIGVDRGENIPAVIALTDPEGCPLSRFKDSLGNPTHILRIGESYKEKQRTIQAKKEVEQRRAGGYSRKYASKAKNLADDMVRNTARDLLYYAVTQDAMLIFENLSRGFGRQGKRTFMAERQYTRMEDWLTAKLAYEGLPSQTYLSKTLAQYTSKTCSNCGFTITSADYDRVLEKLKKTATGWMTTINGKELKVEGQITYYNRYKRQNVVKDLSVELDRLSEESVNNDISSWTKGRSGEALSLLKKRFSHRPVQEKFVCLNCGFETHADEQAALNIARSWLFLRSQEYKKYQTNKTTGNTDKRAFVETWQSFYRKKLKEVWKPAV

SEQ ID NO: 48558 - protein, 978 aa, synthetic construct
  REGION 1..978: note = engineered CasX variant
QEIKRINKIRRRLVKDSNTKKAGKTGPMKTLLVRVMTPDLRERLENLRKKPENIPQPISNTSRANLNKLLTDYTEMKKAILHVYWEEFQKDPVGLMSRVAQPASKKIDQNKLKPEMDEKGNLTTAGFACSQCGQPLFVYKLEQVSEKGKAYTNYFGRCNVAEHEKLIKLAQLKPEKDSDEAVTYSLGKFGQRALDFYSIHVTKESTHPVKPLAQIAGNRYASGPVGKALSDACMGTIASFLSKYQDIIIEHQKVVKGNQKRLESLRELAGKENLEYPSVTLPPQPHTKEGVDAYNEVIARVRMWVNLNLWQKLKLSRDDAKPLLRLKGFPSFPLVERQANEVDWWDMVCNVKKLINEKKEDGKVFWQNLAGYKRQEALRPYLSSEEDRKKGKKFARYQLGDLLLHLEKKHGEDWGKVYDEAWERIDKKVEGLSKHIKLEEERRSEDAQSKAALTDWLRAKASFVIEGLKEADKDEFCRCELKLQKWYGDLRGKPFAIEAENSILDISGFSKQYNCAFIWQKDGVKKLNLYLIINYFKGGKLRFKKIKPEAFEANRFYTVINKKSGEIVPMEVNFNFDDPNLIILPLAFGKRQGREFIWNDLLSLETGSLQLANGRVIEKTLYNRRTRQDEPALFVALTFERREVLDSSNIKPMNLIGVDRGENIPAVIALTDPEGCPLSRFKDSLGNPTHILRIGESYKEKQRTIQAKKEVEQRRAGGYSRKYASKAKNLADDMVRNTARDLLYYAVTQDAMLIFENLSRGFGRQGKRTFMAERQYTRMEDWLTAKLAYEGLPSQTYLSKTLAQYTSKTCSNCGFTITSADYDRVLEKLKKTATGWMTTINGKELKVEGQITYYNRYKRQNVVKDLSVELDRLSEESVNNDISSWTKGRSGEALSLLKKRFSHRPVQEKFVCLNCGFETHADEQAALNIARSWLFLRSQEYKKYQTNKTTGNTDKRAFVETWQSFYRKKLKEVWKPAV

SEQ ID NO: 48559 - protein, 977 aa, synthetic construct
  REGION 1..977: note = engineered CasX variant
QEIKRINKIRRRLVKDSNTKKAGKTGPMKTLLVRVMTPDLRERLENLRKKPENIPQPISNTSRANLNKLLTDYTEMKKAILHVYWEEFQKDPVGLMSRVAQPASKKIDQNKLKPEMDEKGNLTTAGFACSQCGQPLFVYKLEQVSEKGKAYTNYFGRCNVAEHEKLILLAQLKPEKDSDEAVTYSLGKFGQRALDFYSIHVTKESTHPVKPLAQIAGNRYASPVGKALSDACMGTIASFLSKYQDIIIEHQKVVKGNQKRLESLRELAGKENLEYPSVTLPPQPHTKEGVDAYNEVIARVRMWVNLNLWQKLKLSRDDAKPLLRLKGFPSFPLVERQANEVDWWDMVCNVKKLINEKKEDGKVFWQNLAGYKRQEALRPYLSSEEDRKKGKKFARYQLGDLLLHLEKKHGEDWGKVYDEAWERIDKKVEGLSKHIKLEEERRSEDAQSKAALTDWLRAKASFVIEGLKEADKDEFCRCELKLQKWYGDLRGKPFAIEAENSILDISGFSKQYNCAFIWQKDGVKKLNLYLIINYFKGGKLRFKKIKPEAFEANRFYTVINKKSGEIVPMEVNFNFDDPNLIILPLAFGKRQGREFIWNDLLSLETGSLQLANGRVIEKTLYNRRTRQDEPALFVALTFERREVLDSSNIKPMNLIGVDRGENIPAVIALTDPEGCPLSRFKDSLGNPTHILRIGESYKEKQRTIQAKKEVEQRRAGGYSRKYASKAKNLADDMVRNTARDLLYYAVTQDAMLIFENLSRGFGRQGKRTFMAERQYTRMEDWLTAKLAYEGLPSQTYLSKTLAQYTSKTCSNCGFTITSADYDRVLEKLKKTATGWMTTINGKELKVEGQITYYNRYKRQNVVKDLSVELDRLSEESVNNDISSWTKGRSGEALSLLKKRFSHRPVQEKFVCLNCGFETHADEQAALNIARSWLFLRSQEYKKYQTNKTTGNTDKRAFVETWQSFYRKKLKEVWKPAV

SEQ ID NO: 48560 - protein, 978 aa, synthetic construct
  REGION 1..978: note = engineered CasX variant
QEIKRINKIRRRLVKDSNTKKAGKTGPMKTLLVRVMTPDLRERLENLRKKPENIPQPISNTSRANLNKLLTDYTEMKKAILHVYWEEFQKDPVGLMSRVAQPASKKIDQNKLKPEMDEKGNLTTAGFACSQCGQPLFVYKLEQVSEKGKAYTNYFGRCNVAEHEKLILLAQLKPEKDSDEAVTYSLGKFGQRALDFYSIHVTKESTHPVKPLAQIAGNRYASYPVGKALSDACMGTIASFLSKYQDIIIEHQKVVKGNQKRLESLRELAGKENLEYPSVTLPPQPHTKEGVDAYNEVIARVRMWVNLNLWQKLKLSRDDAKPLLRLKGFPSFPLVERQANEVDWWDMVCNVKKLINEKKEDGKVFWQNLAGYKRQEALRPYLSSEEDRKKGKKFARYQLGDLLLHLEKKHGEDWGKVYDEAWERIDKKVEGLSKHIKLEEERRSEDAQSKAALTDWLRAKASFVIEGLKEADKDEFCRCELKLQKWYGDLRGKPFAIEAENSILDISGFSKQYNCAFIWQKDGVKKLNLYLIINYFKGGKLRFKKIKPEAFEANRFYTVINKKSGEIVPMEVNFNFDDPNLIILPLAFGKRQGREFIWNDLLSLETGSLQLANGRVIEKTLYNRRTRQDEPALFVALTFERREVLDSSNIKPMNLIGVDRGENIPAVIALTDPEGCPLSRFKDSLGNPTHILRIGESYKEKQRTIQAKKEVEQRRAGGYSRKYASKAKNLADDMVRNTARDLLYYAVTQDAMLIFENLSRGFGRQGKRTFMAERQYTRMEDWLTAKLAYNGLPSKTYLSKTLAQYTSKTCSNCGFTITSADYDRVLEKLKKTATGWMTTINGKELKVEGQITYYNRYKRQNVVKDLSVELDRLSEESVNNDISSWTKGRSGEALSLLKKRFSHRPVQEKFVCLNCGFETHADEQAALNIARSWLFLRSQEYKKYQTNKTTGNTDKRAFVETWQSFYRKKLKEVWKPAV

SEQ ID NO: 48561 - protein, 978 aa, synthetic construct
  REGION 1..978: note = engineered CasX variant
QEIKRINKIRRRLVKDSNTKKAGKTGPMKTLLVRVMTPDLRERLENLRKKPENIPQPISNTSRANLNKLLTDYTEMKKAILHVYWEEFQKDPVGLMSRVAQPASKKIDQNKLKPEMDEKGNLTTAGFACSQCGQPLFVYKLEQVSEKGKAYTNYFGRCNVAEHEKLILLAQLKPEKDSDEAVTYSLGKFGQRALDFYSIHVTKESTHPVKPLAQIAGNRYASHPVGKALSDACMGTIASFLSKYQDIIIEHQKVVKGNQKRLESLRELAGKENLEYPSVTLPPQPHTKEGVDAYNEVIARVRMWVNLNLWQKLKLSRDDAKPLLRLKGFPSFPLVERQANEVDWWDMVCNVKKLINEKKEDGKVFWQNLAGYKRQEALRPYLSSEEDRKKGKKFARYQLGDLLLHLEKKHGEDWGKVYDEAWERIDKKVEGLSKHIKLEEERRSEDAQSKAALTDWLRAKASFVIEGLKEADKDEFCRCELKLQKWYGDLRGKPFAIEAENSILDISGFSKQYNCAFIWQKDGVKKLNLYLIINYFKGGKLRFKKIKPEAFEANRFYTVINKKSGEIVPMEVNFNFDDPNLIILPLAFGKRQGREFIWNDLLSLETGSLQLANGRVIEKTLYNRRTRQDEPALFVALTFERREVLDSSNIKPMNLIGVDRGENIPAVIALTDPEGCPLSRFKDSLGNPTHILRIGESYKEKQRTIQAKKEVEQRRAGGYSRKYASKAKNLADDMVRNTARDLLYYAVTQDAMLIFENLSRGFGRQGKRTFMAERQYTRMEDWLTAKLAYNGLPSKTYLSKTLAQYTSKTCSNCGFTITSADYDRVLEKLKKTATGWMTTINGKELKVEGQITYYNRYKRQNVVKDLSVELDRLSEESVNNDISSWTKGRSGEALSLLKKRFSHRPVQEKFVCLNCGFETHADEQAALNIARSWLFLRSQEYKKYQTNKTTGNTDKRAFVETWQSFYRKKLKEVWKPAV

SEQ ID NO: 48562 - protein, 978 aa, synthetic construct
  REGION 1..978: note = engineered CasX variant
QEIKRINKIRRRLVKDSNTKKAGKTGPMKTLLVRVMTPDLRERLENLRKKPENIPQPISNTSRANLNKLLTDYTEMKKAILHVYWEEFQKDPVGLMSRVAQPASKKIDQNKLKPEMDEKGNLTTAGFACSQCGQPLFVYKLEQVSEKGKAYTNYFGRCNVAEHEKLILLAQLKPEKDSDEAVTYSLGKFGQRALDFYSIHVTKESTHPVKPLAQIAGNRYASSPVGKALSDACMGTIASFLSKYQDIIIEHQKVVKGNQKRLESLRELAGKENLEYPSVTLPPQPHTKEGVDAYNEVIARVRMWVNLNLWQKLKLSRDDAKPLLRLKGFPSFPLVERQANEVDWWDMVCNVKKLINEKKEDGKVFWQNLAGYKRQEALRPYLSSEEDRKKGKKFARYQLGDLLLHLEKKHGEDWGKVYDEAWERIDKKVEGLSKHIKLEEERRSEDAQSKAALTDWLRAKASFVIEGLKEADKDEFCRCELKLQKWYGDLRGKPFAIEAENSILDISGFSKQYNCAFIWQKDGVKKLNLYLIINYFKGGKLRFKKIKPEAFEANRFYTVINKKSGEIVPMEVNFNFDDPNLIILPLAFGKRQGREFIWNDLLSLETGSLQLANGRVIEKTLYNRRTRQDEPALFVALTFERREVLDSSNIKPMNLIGVDRGENIPAVIALTDPEGCPLSRFKDSLGNPTHILRIGESYKEKQRTIQAKKEVEQRRAGGYSRKYASKAKNLADDMVRNTARDLLYYAVTQDAMLIFENLSRGFGRQGKRTFMAERQYTRMEDWLTAKLAYNGLPSKTYLSKTLAQYTSKTCSNCGFTITSADYDRVLEKLKKTATGWMTTINGKELKVEGQITYYNRYKRQNVVKDLSVELDRLSEESVNNDISSWTKGRSGEALSLLKKRFSHRPVQEKFVCLNCGFETHADEQAALNIARSWLFLRSQEYKKYQTNKTTGNTDKRAFVETWQSFYRKKLKEVWKPAV

SEQ ID NO: 48563 - protein, 978 aa, synthetic construct
  REGION 1..978: note = engineered CasX variant
QEIKRINKIRRRLVKDSNTKKAGKTGPMKTLLVRVMTPDLRERLENLRKKPENIPQPISNTSRANLNKLLTDYTEMKKAILHVYWEEFQKDPVGLMSRVAQPASKKIDQNKLKPEMDEKGNLTTAGFACSQCGQPLFVYKLEQVSEKGKAYTNYFGRCNVAEHEKLILLAQLKPEKDSDEAVTYSLGKFGQRALDFYSIHVTKESTHPVKPLAQIAGNRYASTPVGKALSDACMGTIASFLSKYQDIIIEHQKVVKGNQKRLESLRELAGKENLEYPSVTLPPQPHTKEGVDAYNEVIARVRMWVNLNLWQKLKLSRDDAKPLLRLKGFPSFPLVERQANEVDWWDMVCNVKKLINEKKEDGKVFWQNLAGYKRQEALRPYLSSEEDRKKGKKFARYQLGDLLLHLEKKHGEDWGKVYDEAWERIDKKVEGLSKHIKLEEERRSEDAQSKAALTDWLRAKASFVIEGLKEADKDEFCRCELKLQKWYGDLRGKPFAIEAENSILDISGFSKQYNCAFIWQKDGVKKLNLYLIINYFKGGKLRFKKIKPEAFEANRFYTVINKKSGEIVPMEVNFNFDDPNLIILPLAFGKRQGREFIWNDLLSLETGSLQLANGRVIEKTLYNRRTRQDEPALFVALTFERREVLDSSNIKPMNLIGVDRGENIPAVIALTDPEGCPLSRFKDSLGNPTHILRIGESYKEKQRTIQAKKEVEQRRAGGYSRKYASKAKNLADDMVRNTARDLLYYAVTQDAMLIFENLSRGFGRQGKRTFMAERQYTRMEDWLTAKLAYNGLPSKTYLSKTLAQYTSKTCSNCGFTITSADYDRVLEKLKKTATGWMTTINGKELKVEGQITYYNRYKRQNVVKDLSVELDRLSEESVNNDISSWTKGRSGEALSLLKKRFSHRPVQEKFVCLNCGFETHADEQAALNIARSWLFLRSQEYKKYQTNKTTGNTDKRAFVETWQSFYRKKLKEVWKPAV

SEQ ID NO: 48564 - protein, 978 aa, synthetic construct
  REGION 1..978: note = engineered CasX variant
QEIKRINKIRRRLVKDSNTKKAGKTGPMKTLLVRVMTPDLRERLENLRKKPENIPQPISNTSRANLNKLLTDYTEMKKAILHVYWEEFQKDPVGLMSRVAQPASKKIDQNKLKPEMDEKGNLTTAGFACSQCGQPLFVYKLEQVSEKGKAYTNYFGRCNVAEHEKLILLAQLKPEKDSDEAVTYSLGKFGQRALDFYSIHVTKESTHPVKPLAQIAGNRYASAPVGKALSDACMGTIASFLSKYQDIIIEHQKVVKGNQKRLESLRELAGKENLEYPSVTLPPQPHTKEGVDAYNEVIARVRMWVNLNLWQKLKLSRDDAKPLLRLKGFPSFPLVERQANEVDWWDMVCNVKKLINEKKEDGKVFWQNLAGYKRQEALRPYLSSEEDRKKGKKFARYQLGDLLLHLEKKHGEDWGKVYDEAWERIDKKVEGLSKHIKLEEERRSEDAQSKAALTDWLRAKASFVIEGLKEADKDEFCRCELKLQKWYGDLRGKPFAIEAENSILDISGFSKQYNCAFIWQKDGVKKLNLYLIINYFKGGKLRFKKIKPEAFEANRFYTVINKKSGEIVPMEVNFNFDDPNLIILPLAFGKRQGREFIWNDLLSLETGSLQLANGRVIEKTLYNRRTRQDEPALFVALTFERREVLDSSNIKPMNLIGVDRGENIPAVIALTDPEGCPLSRFKDSLGNPTHILRIGESYKEKQRTIQAKKEVEQRRAGGYSRKYASKAKNLADDMVRNTARDLLYYAVTQDAMLIFENLSRGFGRQGKRTFMAERQYTRMEDWLTAKLAYNGLPSKTYLSKTLAQYTSKTCSNCGFTITSADYDRVLEKLKKTATGWMTTINGKELKVEGQITYYNRYKRQNVVKDLSVELDRLSEESVNNDISSWTKGRSGEALSLLKKRFSHRPVQEKFVCLNCGFETHADEQAALNIARSWLFLRSQEYKKYQTNKTTGNTDKRAFVETWQSFYRKKLKEVWKPAV

SEQ ID NO: 48565 - protein, 978 aa, synthetic construct
  REGION 1..978: note = engineered CasX variant
QEIKRINKIRRRLVKDSNTKKAGKTGPMKTLLVRVMTPDLRERLENLRKKPENIPQPISNTSRANLNKLLTDYTEMKKAILHVYWEEFQKDPVGLMSRVAQPASKKIDQNKLKPEMDEKGNLTTAGFACSQCGQPLFVYKLEQVSEKGKAYTNYFGRCNVAEHEKLILLAQLKPEKDSDEAVTYSLGKFGQRALDFYSIHVTKESTHPVKPLAQIAGNRYASVPVGKALSDACMGTIASFLSKYQDIIIEHQKVVKGNQKRLESLRELAGKENLEYPSVTLPPQPHTKEGVDAYNEVIARVRMWVNLNLWQKLKLSRDDAKPLLRLKGFPSFPLVERQANEVDWWDMVCNVKKLINEKKEDGKVFWQNLAGYKRQEALRPYLSSEEDRKKGKKFARYQLGDLLLHLEKKHGEDWGKVYDEAWERIDKKVEGLSKHIKLEEERRSEDAQSKAALTDWLRAKASFVIEGLKEADKDEFCRCELKLQKWYGDLRGKPFAIEAENSILDISGFSKQYNCAFIWQKDGVKKLNLYLIINYFKGGKLRFKKIKPEAFEANRFYTVINKKSGEIVPMEVNFNFDDPNLIILPLAFGKRQGREFIWNDLLSLETGSLQLANGRVIEKTLYNRRTRQDEPALFVALTFERREVLDSSNIKPMNLIGVDRGENIPAVIALTDPEGCPLSRFKDSLGNPTHILRIGESYKEKQRTIQAKKEVEQRRAGGYSRKYASKAKNLADDMVRNTARDLLYYAVTQDAMLIFENLSRGFGRQGKRTFMAERQYTRMEDWLTAKLAYNGLPSKTYLSKTLAQYTSKTCSNCGFTITSADYDRVLEKLKKTATGWMTTINGKELKVEGQITYYNRYKRQNVVKDLSVELDRLSEESVNNDISSWTKGRSGEALSLLKKRFSHRPVQEKFVCLNCGFETHADEQAALNIARSWLFLRSQEYKKYQTNKTTGNTDKRAFVETWQSFYRKKLKEVWKPAV

SEQ ID NO: 48566 - protein, 978 aa, synthetic construct
  REGION 1..978: note = engineered CasX variant
QEIKRINKIRRRLVKDSNTKKAGKTGPMKTLLVRVMTPDLRERLENLRKKPENIPQPISNTSRANLNKLLTDYTEMKKAILHVYWEEFQKDPVGLMSRVAQPASKKIDQNKLKPEMDEKGNLTTAGFACSQCGQPLFVYKLEQVSEKGKAYTNYFGRCNVAEHEKLIKLAQLKPEKDSDEAVTYSLGKFGQRALDFYSIHVTKESTHPVKPLAQIAGNRYASGPVGKALSDACMGTIASFLSKYQDIIIEHQKVVKGNQKRLESLRELAGKENLEYPSVTLPPQPHTKEGVDAYNEVIARVRMWVNLNLWQKLKLSRDDAKPLLRLKGFPSFPLVERQANEVDWWDMVCNVKKLINEKKEDGKVFWQNLAGYKRQEALRPYLSSEEDRKKGKKFARYQLGDLLLHLEKKHGEDWGKVYDEAWERIDKKVEGLSKHIKLEEERRSEDAQSKAALTDWLRAKASFVIEGLKEADKDEFCRCELKLQKWYGDLRGKPFAIEAENSILDISGFSKQYNCAFIWQKDGVKKLNLYLIINYFKGGKLRFKKIKPEAFEANRFYTVINKKSGEIVPMEVNFNFDDPNLIILPLAFGKRQGREFIWNDLLSLETGSLQLANGRVIEKTLYNRRTRQDEPALFVALTFERREVLDSSNIKPMNLIGVDRGENIPAVIALTDPEGCPLSRFKDSLGNPTHILRIGESYKEKQRTIQAKKEVEQRRAGGYSRKYASKAKNLADDMVRNTARDLLYYAVTQDAMLIFENLSRGFGRQGKRTFMAERQYTRMEDWLTAKLAYNGLPSKTYLSKTLAQYTSKTCSNCGFTITSADYDRVLEKLKKTATGWMTTINGKELKVEGQITYYNRYKRQNVVKDLSVELDRLSEESVNNDISSWTKGRSGEALSLLKKRFSHRPVQEKFVCLNCGFETHADEQAALNIARSWLFLRSQEYKKYQTNKTTGNTDKRAFVETWQSFYRKKLKEVWKPAV

SEQ ID NO: 48567 - protein, 977 aa, synthetic construct
  REGION 1..977: note = engineered CasX variant
QEIKRINKIRRRLVKDSNTKKAGKTGPMKTLLVRVMTPDLRERLENLRKKPENIPQPISNTSRANLNKLLTDYTEMKKAILHVYWEEFQKDPVGLMSRVAQPASKKIDQNKLKPEMDEKGNLTTAGFACSQCGQPLFVYKLEQVSEKGKAYTNYFGRCNVAEHEKLILLAQLKPEKDSDEAVTYSLGKFGQRALDFYSIHVTKESTHPVKPLAQIAGNRYASPVGKALSDACMGTIASFLSKYQDIIIEHQKVVKGNQKRLESLRELAGKENLEYPSVTLPPQPHTKEGVDAYNEVIARVRMWVNLNLWQKLKLSRDDAKPLLRLKGFPSFPLVERQANEVDWWDMVCNVKKLINEKKEDGKVFWQNLAGYKRQEALRPYLSSEEDRKKGKKFARYQLGDLLLHLEKKHGEDWGKVYDEAWERIDKKVEGLSKHIKLEEERRSEDAQSKAALTDWLRAKASFVIEGLKEADKDEFCRCELKLQKWYGDLRGKPFAIEAENSILDISGFSKQYNCAFIWQKDGVKKLNLYLIINYFKGGKLRFKKIKPEAFEANRFYTVINKKSGEIVPMEVNFNFDDPNLIILPLAFGKRQGREFIWNDLLSLETGSLQLANGRVIEKTLYNRRTRQDEPALFVALTFERREVLDSSNIKPMNLIGVDRGENIPAVIALTDPEGCPLSRFKDSLGNPTHILRIGESYKEKQRTIQAKKEVEQRRAGGYSRKYASKAKNLADDMVRNTARDLLYYAVTQDAMLIFENLSRGFGRQGKRTFMAERQYTRMEDWLTAKLAYNGLPSKTYLSKTLAQYTSKTCSNCGFTITSADYDRVLEKLKKTATGWMTTINGKELKVEGQITYYNRYKRQNVVKDLSVELDRLSEESVNNDISSWTKGRSGEALSLLKKRFSHRPVQEKFVCLNCGFETHADEQAALNIARSWLFLRSQEYKKYQTNKTTGNTDKRAFVETWQSFYRKKLKEVWKPAV

SEQ ID NO: 48568 - protein, 978 aa, synthetic construct
  REGION 1..978: note = engineered CasX variant
QEIKRINKIRRRLVKDSNTKKAGKTGPMKTLLVRVMTPDLRERLENLRKKPENIPQPISNTSRANLNKLLTDYTEMKKAILHVYWEEFQKDPVGLMSRVAQPASKKIDQNKLKPEMDEKGNLTTAGFACSQCGQPLFVYKLEQVSEKGKAYTNYFGRCNVAEHEKLIQLAQLKPEKDSDEAVTYSLGKFGQRALDFYSIHVTKESTHPVKPLAQIAGNRYASYPVGKALSDACMGTIASFLSKYQDIIIEHQKVVKGNQKRLESLRELAGKENLEYPSVTLPPQPHTKEGVDAYNEVIARVRMWVNLNLWQKLKLSRDDAKPLLRLKGFPSFPLVERQANEVDWWDMVCNVKKLINEKKEDGKVFWQNLAGYKRQEALRPYLSSEEDRKKGKKFARYQLGDLLLHLEKKHGEDWGKVYDEAWERIDKKVEGLSKHIKLEEERRSEDAQSKAALTDWLRAKASFVIEGLKEADKDEFCRCELKLQKWYGDLRGKPFAIEAENSILDISGFSKQYNCAFIWQKDGVKKLNLYLIINYFKGGKLRFKKIKPEAFEANRFYTVINKKSGEIVPMEVNFNFDDPNLIILPLAFGKRQGREFIWNDLLSLETGSLQLANGRVIEKTLYNRRTRQDEPALFVALTFERREVLDSSNIKPMNLIGVDRGENIPAVIALTDPEGCPLSRFKDSLGNPTHILRIGESYKEKQRTIQAKKEVEQRRAGGYSRKYASKAKNLADDMVRNTARDLLYYAVTQDAMLIFENLSRGFGRQGKRTFMAERQYTRMEDWLTAKLAYEGLPSKTYLSKTLAQYTSKTCSNCGFTITSADYDRVLEKLKKTATGWMTTINGKELKVEGQITYYNRYKRQNVVKDLSVELDRLSEESVNNDISSWTKGRSGEALSLLKKRFSHRPVQEKFVCLNCGFETHADEQAALNIARSWLFLRSQEYKKYQTNKTTGNTDKRAFVETWQSFYRKKLKEVWKPAV

SEQ ID NO: 48569 - protein, 978 aa, synthetic construct
  REGION 1..978: note = engineered CasX variant
QEIKRINKIRRRLVKDSNTKKAGKTGPMKTLLVRVMTPDLRERLENLRKKPENIPQPISNTSRANLNKLLTDYTEMKKAILHVYWEEFQKDPVGLMSRVAQPASKKIDQNKLKPEMDEKGNLTTAGFACSQCGQPLFVYKLEQVSEKGKAYTNYFGRCNVAEHEKLIQLAQLKPEKDSDEAVTYSLGKFGQRALDFYSIHVTKESTHPVKPLAQIAGNRYASHPVGKALSDACMGTIASFLSKYQDIIIEHQKVVKGNQKRLESLRELAGKENLEYPSVTLPPQPHTKEGVDAYNEVIARVRMWVNLNLWQKLKLSRDDAKPLLRLKGFPSFPLVERQANEVDWWDMVCNVKKLINEKKEDGKVFWQNLAGYKRQEALRPYLSSEEDRKKGKKFARYQLGDLLLHLEKKHGEDWGKVYDEAWERIDKKVEGLSKHIKLEEERRSEDAQSKAALTDWLRAKASFVIEGLKEADKDEFCRCELKLQKWYGDLRGKPFAIEAENSILDISGFSKQYNCAFIWQKDGVKKLNLYLIINYFKGGKLRFKKIKPEAFEANRFYTVINKKSGEIVPMEVNFNFDDPNLIILPLAFGKRQGREFIWNDLLSLETGSLQLANGRVIEKTLYNRRTRQDEPALFVALTFERREVLDSSNIKPMNLIGVDRGENIPAVIALTDPEGCPLSRFKDSLGNPTHILRIGESYKEKQRTIQAKKEVEQRRAGGYSRKYASKAKNLADDMVRNTARDLLYYAVTQDAMLIFENLSRGFGRQGKRTFMAERQYTRMEDWLTAKLAYEGLPSKTYLSKTLAQYTSKTCSNCGFTITSADYDRVLEKLKKTATGWMTTINGKELKVEGQITYYNRYKRQNVVKDLSVELDRLSEESVNNDISSWTKGRSGEALSLLKKRFSHRPVQEKFVCLNCGFETHADEQAALNIARSWLFLRSQEYKKYQTNKTTGNTDKRAFVETWQSFYRKKLKEVWKPAV

SEQ ID NO: 48570 - protein, 978 aa, synthetic construct
  REGION 1..978: note = engineered CasX variant
QEIKRINKIRRRLVKDSNTKKAGKTGPMKTLLVRVMTPDLRERLENLRKKPENIPQPISNTSRANLNKLLTDYTEMKKAILHVYWEEFQKDPVGLMSRVAQPASKKIDQNKLKPEMDEKGNLTTAGFACSQCGQPLFVYKLEQVSEKGKAYTNYFGRCNVAEHEKLIQLAQLKPEKDSDEAVTYSLGKFGQRALDFYSIHVTKESTHPVKPLAQIAGNRYASSPVGKALSDACMGTIASFLSKYQDIIIEHQKVVKGNQKRLESLRELAGKENLEYPSVTLPPQPHTKEGVDAYNEVIARVRMWVNLNLWQKLKLSRDDAKPLLRLKGFPSFPLVERQANEVDWWDMVCNVKKLINEKKEDGKVFWQNLAGYKRQEALRPYLSSEEDRKKGKKFARYQLGDLLLHLEKKHGEDWGKVYDEAWERIDKKVEGLSKHIKLEEERRSEDAQSKAALTDWLRAKASFVIEGLKEADKDEFCRCELKLQKWYGDLRGKPFAIEAENSILDISGFSKQYNCAFIWQKDGVKKLNLYLIINYFKGGKLRFKKIKPEAFEANRFYTVINKKSGEIVPMEVNFNFDDPNLIILPLAFGKRQGREFIWNDLLSLETGSLQLANGRVIEKTLYNRRTRQDEPALFVALTFERREVLDSSNIKPMNLIGVDRGENIPAVIALTDPEGCPLSRFKDSLGNPTHILRIGESYKEKQRTIQAKKEVEQRRAGGYSRKYASKAKNLADDMVRNTARDLLYYAVTQDAMLIFENLSRGFGRQGKRTFMAERQYTRMEDWLTAKLAYEGLPSKTYLSKTLAQYTSKTCSNCGFTITSADYDRVLEKLKKTATGWMTTINGKELKVEGQITYYNRYKRQNVVKDLSVELDRLSEESVNNDISSWTKGRSGEALSLLKKRFSHRPVQEKFVCLNCGFETHADEQAALNIARSWLFLRSQEYKKYQTNKTTGNTDKRAFVETWQSFYRKKLKEVWKPAV

SEQ ID NO: 48571 - protein, 978 aa, synthetic construct
  REGION 1..978: note = engineered CasX variant
QEIKRINKIRRRLVKDSNTKKAGKTGPMKTLLVRVMTPDLRERLENLRKKPENIPQPISNTSRANLNKLLTDYTEMKKAILHVYWEEFQKDPVGLMSRVAQPASKKIDQNKLKPEMDEKGNLTTAGFACSQCGQPLFVYKLEQVSEKGKAYTNYFGRCNVAEHEKLIQLAQLKPEKDSDEAVTYSLGKFGQRALDFYSIHVTKESTHPVKPLAQIAGNRYASTPVGKALSDACMGTIASFLSKYQDIIIEHQKVVKGNQKRLESLRELAGKENLEYPSVTLPPQPHTKEGVDAYNEVIARVRMWVNLNLWQKLKLSRDDAKPLLRLKGFPSFPLVERQANEVDWWDMVCNVKKLINEKKEDGKVFWQNLAGYKRQEALRPYLSSEEDRKKGKKFARYQLGDLLLHLEKKHGEDWGKVYDEAWERIDKKVEGLSKHIKLEEERRSEDAQSKAALTDWLRAKASFVIEGLKEADKDEFCRCELKLQKWYGDLRGKPFAIEAENSILDISGFSKQYNCAFIWQKDGVKKLNLYLIINYFKGGKLRFKKIKPEAFEANRFYTVINKKSGEIVPMEVNFNFDDPNLIILPLAFGKRQGREFIWNDLLSLETGSLQLANGRVIEKTLYNRRTRQDEPALFVALTFERREVLDSSNIKPMNLIGVDRGENIPAVIALTDPEGCPLSRFKDSLGNPTHILRIGESYKEKQRTIQAKKEVEQRRAGGYSRKYASKAKNLADDMVRNTARDLLYYAVTQDAMLIFENLSRGFGRQGKRTFMAERQYTRMEDWLTAKLAYEGLPSKTYLSKTLAQYTSKTCSNCGFTITSADYDRVLEKLKKTATGWMTTINGKELKVEGQITYYNRYKRQNVVKDLSVELDRLSEESVNNDISSWTKGRSGEALSLLKKRFSHRPVQEKFVCLNCGFETHADEQAALNIARSWLFLRSQEYKKYQTNKTTGNTDKRAFVETWQSFYRKKLKEVWKPAV

SEQ ID NO: 48572 - protein, 978 aa, synthetic construct
  REGION 1..978: note = engineered CasX variant
QEIKRINKIRRRLVKDSNTKKAGKTGPMKTLLVRVMTPDLRERLENLRKKPENIPQPISNTSRANLNKLLTDYTEMKKAILHVYWEEFQKDPVGLMSRVAQPASKKIDQNKLKPEMDEKGNLTTAGFACSQCGQPLFVYKLEQVSEKGKAYTNYFGRCNVAEHEKLIQLAQLKPEKDSDEAVTYSLGKFGQRALDFYSIHVTKESTHPVKPLAQIAGNRYASAPVGKALSDACMGTIASFLSKYQDIIIEHQKVVKGNQKRLESLRELAGKENLEYPSVTLPPQPHTKEGVDAYNEVIARVRMWVNLNLWQKLKLSRDDAKPLLRLKGFPSFPLVERQANEVDWWDMVCNVKKLINEKKEDGKVFWQNLAGYKRQEALRPYLSSEEDRKKGKKFARYQLGDLLLHLEKKHGEDWGKVYDEAWERIDKKVEGLSKHIKLEEERRSEDAQSKAALTDWLRAKASFVIEGLKEADKDEFCRCELKLQKWYGDLRGKPFAIEAENSILDISGFSKQYNCAFIWQKDGVKKLNLYLIINYFKGGKLRFKKIKPEAFEANRFYTVINKKSGEIVPMEVNFNFDDPNLIILPLAFGKRQGREFIWNDLLSLETGSLQLANGRVIEKTLYNRRTRQDEPALFVALTFERREVLDSSNIKPMNLIGVDRGENIPAVIALTDPEGCPLSRFKDSLGNPTHILRIGESYKEKQRTIQAKKEVEQRRAGGYSRKYASKAKNLADDMVRNTARDLLYYAVTQDAMLIFENLSRGFGRQGKRTFMAERQYTRMEDWLTAKLAYEGLPSKTYLSKTLAQYTSKTCSNCGFTITSADYDRVLEKLKKTATGWMTTINGKELKVEGQITYYNRYKRQNVVKDLSVELDRLSEESVNNDISSWTKGRSGEALSLLKKRFSHRPVQEKFVCLNCGFETHADEQAALNIARSWLFLRSQEYKKYQTNKTTGNTDKRAFVETWQSFYRKKLKEVWKPAV

SEQ ID NO: 48573 - protein, 978 aa, synthetic construct
  REGION 1..978: note = engineered CasX variant
QEIKRINKIRRRLVKDSNTKKAGKTGPMKTLLVRVMTPDLRERLENLRKKPENIPQPISNTSRANLNKLLTDYTEMKKAILHVYWEEFQKDPVGLMSRVAQPASKKIDQNKLKPEMDEKGNLTTAGFACSQCGQPLFVYKLEQVSEKGKAYTNYFGRCNVAEHEKLIQLAQLKPEKDSDEAVTYSLGKFGQRALDFYSIHVTKESTHPVKPLAQIAGNRYASVPVGKALSDACMGTIASFLSKYQDIIIEHQKVVKGNQKRLESLRELAGKENLEYPSVTLPPQPHTKEGVDAYNEVIARVRMWVNLNLWQKLKLSRDDAKPLLRLKGFPSFPLVERQANEVDWWDMVCNVKKLINEKKEDGKVFWQNLAGYKRQEALRPYLSSEEDRKKGKKFARYQLGDLLLHLEKKHGEDWGKVYDEAWERIDKKVEGLSKHIKLEEERRSEDAQSKAALTDWLRAKASFVIEGLKEADKDEFCRCELKLQKWYGDLRGKPFAIEAENSILDISGFSKQYNCAFIWQKDGVKKLNLYLIINYFKGGKLRFKKIKPEAFEANRFYTVINKKSGEIVPMEVNFNFDDPNLIILPLAFGKRQGREFIWNDLLSLETGSLQLANGRVIEKTLYNRRTRQDEPALFVALTFERREVLDSSNIKPMNLIGVDRGENIPAVIALTDPEGCPLSRFKDSLGNPTHILRIGESYKEKQRTIQAKKEVEQRRAGGYSRKYASKAKNLADDMVRNTARDLLYYAVTQDAMLIFENLSRGFGRQGKRTFMAERQYTRMEDWLTAKLAYEGLPSKTYLSKTLAQYTSKTCSNCGFTITSADYDRVLEKLKKTATGWMTTINGKELKVEGQITYYNRYKRQNVVKDLSVELDRLSEESVNNDISSWTKGRSGEALSLLKKRFSHRPVQEKFVCLNCGFETHADEQAALNIARSWLFLRSQEYKKYQTNKTTGNTDKRAFVETWQSFYRKKLKEVWKPAV

SEQ ID NO: 48574 - protein, 979 aa, synthetic construct
  REGION 1..979: note = engineered CasX variant
QEIKRINKIRRRLVKDSNTKKAGKTGPMKTLLVRVMTPDLRERLENLRKKPENIPQPISNTSRANLNKLLTDYTEMKKAILHVYWEEFQKDPVGLMSRVAQPASKKIDQNKLKPEMDEKGNLTTAGFACSQCGQPLFVYKLEQVSEKGKAYTNYFGRCNVAEHEKLIQKLAQLKPEKDSDEAVTYSLGKFGQRALDFYSIHVTKESTHPVKPLAQIAGNRYASGPVGKALSDACMGTIASFLSKYQDIIIEHQKVVKGNQKRLESLRELAGKENLEYPSVTLPPQPHTKEGVDAYNEVIARVRMWVNLNLWQKLKLSRDDAKPLLRLKGFPSFPLVERQANEVDWWDMVCNVKKLINEKKEDGKVFWQNLAGYKRQEALRPYLSSEEDRKKGKKFARYQLGDLLLHLEKKHGEDWGKVYDEAWERIDKKVEGLSKHIKLEEERRSEDAQSKAALTDWLRAKASFVIEGLKEADKDEFCRCELKLQKWYGDLRGKPFAIEAENSILDISGFSKQYNCAFIWQKDGVKKLNLYLIINYFKGGKLRFKKIKPEAFEANRFYTVINKKSGEIVPMEVNFNFDDPNLIILPLAFGKRQGREFIWNDLLSLETGSLQLANGRVIEKTLYNRRTRQDEPALFVALTFERREVLDSSNIKPMNLIGVDRGENIPAVIALTDPEGCPLSRFKDSLGNPTHILRIGESYKEKQRTIQAKKEVEQRRAGGYSRKYASKAKNLADDMVRNTARDLLYYAVTQDAMLIFENLSRGFGRQGKRTFMAERQYTRMEDWLTAKLAYEGLPSKTYLSKTLAQYTSKTCSNCGFTITSADYDRVLEKLKKTATGWMTTINGKELKVEGQITYYNRYKRQNVVKDLSVELDRLSEESVNNDISSWTKGRSGEALSLLKKRFSHRPVQEKFVCLNCGFETHADEQAALNIARSWLFLRSQEYKKYQTNKTTGNTDKRAFVETWQSFYRKKLKEVWKPAV

SEQ ID NO: 48575 - protein, 977 aa, synthetic construct
  REGION 1..977: note = engineered CasX variant
QEIKRINKIRRRLVKDSNTKKAGKTGPMKTLLVRVMTPDLRERLENLRKKPENIPQPISNTSRANLNKLLTDYTEMKKAILHVYWEEFQKDPVGLMSRVAQPASKKIDQNKLKPEMDEKGNLTTAGFACSQCGQPLFVYKLEQVSEKGKAYTNYFGRCNVAEHEKLIQLAQLKPEKDSDEAVTYSLGKFGQRALDFYSIHVTKESTHPVKPLAQIAGNRYASPVGKALSDACMGTIASFLSKYQDIIIEHQKVVKGNQKRLESLRELAGKENLEYPSVTLPPQPHTKEGVDAYNEVIARVRMWVNLNLWQKLKLSRDDAKPLLRLKGFPSFPLVERQANEVDWWDMVCNVKKLINEKKEDGKVFWQNLAGYKRQEALRPYLSSEEDRKKGKKFARYQLGDLLLHLEKKHGEDWGKVYDEAWERIDKKVEGLSKHIKLEEERRSEDAQSKAALTDWLRAKASFVIEGLKEADKDEFCRCELKLQKWYGDLRGKPFAIEAENSILDISGFSKQYNCAFIWQKDGVKKLNLYLIINYFKGGKLRFKKIKPEAFEANRFYTVINKKSGEIVPMEVNFNFDDPNLIILPLAFGKRQGREFIWNDLLSLETGSLQLANGRVIEKTLYNRRTRQDEPALFVALTFERREVLDSSNIKPMNLIGVDRGENIPAVIALTDPEGCPLSRFKDSLGNPTHILRIGESYKEKQRTIQAKKEVEQRRAGGYSRKYASKAKNLADDMVRNTARDLLYYAVTQDAMLIFENLSRGFGRQGKRTFMAERQYTRMEDWLTAKLAYEGLPSKTYLSKTLAQYTSKTCSNCGFTITSADYDRVLEKLKKTATGWMTTINGKELKVEGQITYYNRYKRQNVVKDLSVELDRLSEESVNNDISSWTKGRSGEALSLLKKRFSHRPVQEKFVCLNCGFETHADEQAALNIARSWLFLRSQEYKKYQTNKTTGNTDKRAFVETWQSFYRKKLKEVWKPAV

SEQ ID NO: 48576 - protein, 978 aa, synthetic construct
  REGION 1..978: note = engineered CasX variant
QEIKRINKIRRRLVKDSNTKKAGKTGPMKTLLVRVMTPDLRERLENLRKKPENIPQPISNTSRANLNKLLTDYTEMKKAILHVYWEEFQKDPVGLMSRVAQPASKKIDQNKLKPEMDEKGNLTTAGFACSQCGQPLFVYKLEQVSEKGKAYTNYFGRCNVAEHEKLILLAQLKPEKDSDEAVTYSLGKFGQRALDFYSIHVTKESTHPVKPLAQIAGNRYASYPVGKALSDACMGTIASFLSKYQDIIIEHQKVVKGNQKRLESLRELAGKENLEYPSVTLPPQPHTKEGVDAYNEVIARVRMWVNLNLWQKLKLSRDDAKPLLRLKGFPSFPLVERQANEVDWWDMVCNVKKLINEKKEDGKVFWQNLAIYKRQEALRPYLSSEEDRKKGKKFARYQLGDLLLHLEKKHGEDWGKVYDEAWERIDKKVEGLSKHIKLEEERRSEDAQSKAALTDWLRAKASFVIEGLKEADKDEFCRCELKLQKWYGDLRGKPFAIEAENSILDISGFSKQYNCAFIWQKDGVKKLNLYLIINYFKGGKLRFKKIKPEAFEANRFYTVINKKSGEIVPMEVNFNFDDPNLIILPLAFGKRQGREFIWNDLLSLETGSLQLANGRVIEKTLYNRRTRQDEPALFVALTFERREVLDSSNIKPMNLIGVDRGENIPAVIALTDPEGCPLSRFKDSLGNPTHILRIGESYKEKQRTIQAKKEVEQRRAGGYSRKYASKAKNLADDMVRNTARDLLYYAVTQDAMLIFENLSRGFGRQGKRTFMAERQYTRMEDWLTAKLAYEGLPSKTYLSKTLAQYTSKTCSNCGFTITSADYDRVLEKLKKTATGWMTTINGKELKVEGQITYYNRYKRQNVVKDLSVELDRLSEESVNNDISSWTKGRSGEALSLLKKRFSHRPVQEKFVCLNCGFETHADEQAALNIARSWLFLRSQEYKKYQTNKTTGNTDKRAFVETWQSFYRKKLKEVWKPAV

SEQ ID NO: 48577 - protein, 978 aa, synthetic construct
  REGION 1..978: note = engineered CasX variant
QEIKRINKIRRRLVKDSNTKKAGKTGPMKTLLVRVMTPDLRERLENLRKKPENIPQPISNTSRANLNKLLTDYTEMKKAILHVYWEEFQKDPVGLMSRVAQPASKKIDQNKLKPEMDEKGNLTTAGFACSQCGQPLFVYKLEQVSEKGKAYTNYFGRCNVAEHEKLILLAQLKPEKDSDEAVTYSLGKFGQRALDFYSIHVTKESTHPVKPLAQIAGNRYASHPVGKALSDACMGTIASFLSKYQDIIIEHQKVVKGNQKRLESLRELAGKENLEYPSVTLPPQPHTKEGVDAYNEVIARVRMWVNLNLWQKLKLSRDDAKPLLRLKGFPSFPLVERQANEVDWWDMVCNVKKLINEKKEDGKVFWQNLAIYKRQEALRPYLSSEEDRKKGKKFARYQLGDLLLHLEKKHGEDWGKVYDEAWERIDKKVEGLSKHIKLEEERRSEDAQSKAALTDWLRAKASFVIEGLKEADKDEFCRCELKLQKWYGDLRGKPFAIEAENSILDISGFSKQYNCAFIWQKDGVKKLNLYLIINYFKGGKLRFKKIKPEAFEANRFYTVINKKSGEIVPMEVNFNFDDPNLIILPLAFGKRQGREFIWNDLLSLETGSLQLANGRVIEKTLYNRRTRQDEPALFVALTFERREVLDSSNIKPMNLIGVDRGENIPAVIALTDPEGCPLSRFKDSLGNPTHILRIGESYKEKQRTIQAKKEVEQRRAGGYSRKYASKAKNLADDMVRNTARDLLYYAVTQDAMLIFENLSRGFGRQGKRTFMAERQYTRMEDWLTAKLAYEGLPSKTYLSKTLAQYTSKTCSNCGFTITSADYDRVLEKLKKTATGWMTTINGKELKVEGQITYYNRYKRQNVVKDLSVELDRLSEESVNNDISSWTKGRSGEALSLLKKRFSHRPVQEKFVCLNCGFETHADEQAALNIARSWLFLRSQEYKKYQTNKTTGNTDKRAFVETWQSFYRKKLKEVWKPAV

SEQ ID NO: 48578 - protein, 978 aa, synthetic construct
  REGION 1..978: note = engineered CasX variant
QEIKRINKIRRRLVKDSNTKKAGKTGPMKTLLVRVMTPDLRERLENLRKKPENIPQPISNTSRANLNKLLTDYTEMKKAILHVYWEEFQKDPVGLMSRVAQPASKKIDQNKLKPEMDEKGNLTTAGFACSQCGQPLFVYKLEQVSEKGKAYTNYFGRCNVAEHEKLILLAQLKPEKDSDEAVTYSLGKFGQRALDFYSIHVTKESTHPVKPLAQIAGNRYASSPVGKALSDACMGTIASFLSKYQDIIIEHQKVVKGNQKRLESLRELAGKENLEYPSVTLPPQPHTKEGVDAYNEVIARVRMWVNLNLWQKLKLSRDDAKPLLRLKGFPSFPLVERQANEVDWWDMVCNVKKLINEKKEDGKVFWQNLAIYKRQEALRPYLSSEEDRKKGKKFARYQLGDLLLHLEKKHGEDWGKVYDEAWERIDKKVEGLSKHIKLEEERRSEDAQSKAALTDWLRAKASFVIEGLKEADKDEFCRCELKLQKWYGDLRGKPFAIEAENSILDISGFSKQYNCAFIWQKDGVKKLNLYLIINYFKGGKLRFKKIKPEAFEANRFYTVINKKSGEIVPMEVNFNFDDPNLIILPLAFGKRQGREFIWNDLLSLETGSLQLANGRVIEKTLYNRRTRQDEPALFVALTFERREVLDSSNIKPMNLIGVDRGENIPAVIALTDPEGCPLSRFKDSLGNPTHILRIGESYKEKQRTIQAKKEVEQRRAGGYSRKYASKAKNLADDMVRNTARDLLYYAVTQDAMLIFENLSRGFGRQGKRTFMAERQYTRMEDWLTAKLAYEGLPSKTYLSKTLAQYTSKTCSNCGFTITSADYDRVLEKLKKTATGWMTTINGKELKVEGQITYYNRYKRQNVVKDLSVELDRLSEESVNNDISSWTKGRSGEALSLLKKRFSHRPVQEKFVCLNCGFETHADEQAALNIARSWLFLRSQEYKKYQTNKTTGNTDKRAFVETWQSFYRKKLKEVWKPAV

SEQ ID NO: 48579 - protein, 978 aa, synthetic construct
  REGION 1..978: note = engineered CasX variant
QEIKRINKIRRRLVKDSNTKKAGKTGPMKTLLVRVMTPDLRERLENLRKKPENIPQPISNTSRANLNKLLTDYTEMKKAILHVYWEEFQKDPVGLMSRVAQPASKKIDQNKLKPEMDEKGNLTTAGFACSQCGQPLFVYKLEQVSEKGKAYTNYFGRCNVAEHEKLILLAQLKPEKDSDEAVTYSLGKFGQRALDFYSIHVTKESTHPVKPLAQIAGNRYASTPVGKALSDACMGTIASFLSKYQDIIIEHQKVVKGNQKRLESLRELAGKENLEYPSVTLPPQPHTKEGVDAYNEVIARVRMWVNLNLWQKLKLSRDDAKPLLRLKGFPSFPLVERQANEVDWWDMVCNVKKLINEKKEDGKVFWQNLAIYKRQEALRPYLSSEEDRKKGKKFARYQLGDLLLHLEKKHGEDWGKVYDEAWERIDKKVEGLSKHIKLEEERRSEDAQSKAALTDWLRAKASFVIEGLKEADKDEFCRCELKLQKWYGDLRGKPFAIEAENSILDISGFSKQYNCAFIWQKDGVKKLNLYLIINYFKGGKLRFKKIKPEAFEANRFYTVINKKSGEIVPMEVNFNFDDPNLIILPLAFGKRQGREFIWNDLLSLETGSLQLANGRVIEKTLYNRRTRQDEPALFVALTFERREVLDSSNIKPMNLIGVDRGENIPAVIALTDPEGCPLSRFKDSLGNPTHILRIGESYKEKQRTIQAKKEVEQRRAGGYSRKYASKAKNLADDMVRNTARDLLYYAVTQDAMLIFENLSRGFGRQGKRTFMAERQYTRMEDWLTAKLAYEGLPSKTYLSKTLAQYTSKTCSNCGFTITSADYDRVLEKLKKTATGWMTTINGKELKVEGQITYYNRYKRQNVVKDLSVELDRLSEESVNNDISSWTKGRSGEALSLLKKRFSHRPVQEKFVCLNCGFETHADEQAALNIARSWLFLRSQEYKKYQTNKTTGNTDKRAFVETWQSFYRKKLKEVWKPAV

SEQ ID NO: 48580 - protein, 978 aa, synthetic construct
  REGION 1..978: note = engineered CasX variant
QEIKRINKIRRRLVKDSNTKKAGKTGPMKTLLVRVMTPDLRERLENLRKKPENIPQPISNTSRANLNKLLTDYTEMKKAILHVYWEEFQKDPVGLMSRVAQPASKKIDQNKLKPEMDEKGNLTTAGFACSQCGQPLFVYKLEQVSEKGKAYTNYFGRCNVAEHEKLILLAQLKPEKDSDEAVTYSLGKFGQRALDFYSIHVTKESTHPVKPLAQIAGNRYASAPVGKALSDACMGTIASFLSKYQDIIIEHQKVVKGNQKRLESLRELAGKENLEYPSVTLPPQPHTKEGVDAYNEVIARVRMWVNLNLWQKLKLSRDDAKPLLRLKGFPSFPLVERQANEVDWWDMVCNVKKLINEKKEDGKVFWQNLAIYKRQEALRPYLSSEEDRKKGKKFARYQLGDLLLHLEKKHGEDWGKVYDEAWERIDKKVEGLSKHIKLEEERRSEDAQSKAALTDWLRAKASFVIEGLKEADKDEFCRCELKLQKWYGDLRGKPFAIEAENSILDISGFSKQYNCAFIWQKDGVKKLNLYLIINYFKGGKLRFKKIKPEAFEANRFYTVINKKSGEIVPMEVNFNFDDPNLIILPLAFGKRQGREFIWNDLLSLETGSLQLANGRVIEKTLYNRRTRQDEPALFVALTFERREVLDSSNIKPMNLIGVDRGENIPAVIALTDPEGCPLSRFKDSLGNPTHILRIGESYKEKQRTIQAKKEVEQRRAGGYSRKYASKAKNLADDMVRNTARDLLYYAVTQDAMLIFENLSRGFGRQGKRTFMAERQYTRMEDWLTAKLAYEGLPSKTYLSKTLAQYTSKTCSNCGFTITSADYDRVLEKLKKTATGWMTTINGKELKVEGQITYYNRYKRQNVVKDLSVELDRLSEESVNNDISSWTKGRSGEALSLLKKRFSHRPVQEKFVCLNCGFETHADEQAALNIARSWLFLRSQEYKKYQTNKTTGNTDKRAFVETWQSFYRKKLKEVWKPAV

SEQ ID NO: 48581 - protein, 978 aa, synthetic construct
  REGION 1..978: note = engineered CasX variant
QEIKRINKIRRRLVKDSNTKKAGKTGPMKTLLVRVMTPDLRERLENLRKKPENIPQPISNTSRANLNKLLTDYTEMKKAILHVYWEEFQKDPVGLMSRVAQPASKKIDQNKLKPEMDEKGNLTTAGFACSQCGQPLFVYKLEQVSEKGKAYTNYFGRCNVAEHEKLILLAQLKPEKDSDEAVTYSLGKFGQRALDFYSIHVTKESTHPVKPLAQIAGNRYASVPVGKALSDACMGTIASFLSKYQDIIIEHQKVVKGNQKRLESLRELAGKENLEYPSVTLPPQPHTKEGVDAYNEVIARVRMWVNLNLWQKLKLSRDDAKPLLRLKGFPSFPLVERQANEVDWWDMVCNVKKLINEKKEDGKVFWQNLAIYKRQEALRPYLSSEEDRKKGKKFARYQLGDLLLHLEKKHGEDWGKVYDEAWERIDKKVEGLSKHIKLEEERRSEDAQSKAALTDWLRAKASFVIEGLKEADKDEFCRCELKLQKWYGDLRGKPFAIEAENSILDISGFSKQYNCAFIWQKDGVKKLNLYLIINYFKGGKLRFKKIKPEAFEANRFYTVINKKSGEIVPMEVNFNFDDPNLIILPLAFGKRQGREFIWNDLLSLETGSLQLANGRVIEKTLYNRRTRQDEPALFVALTFERREVLDSSNIKPMNLIGVDRGENIPAVIALTDPEGCPLSRFKDSLGNPTHILRIGESYKEKQRTIQAKKEVEQRRAGGYSRKYASKAKNLADDMVRNTARDLLYYAVTQDAMLIFENLSRGFGRQGKRTFMAERQYTRMEDWLTAKLAYEGLPSKTYLSKTLAQYTSKTCSNCGFTITSADYDRVLEKLKKTATGWMTTINGKELKVEGQITYYNRYKRQNVVKDLSVELDRLSEESVNNDISSWTKGRSGEALSLLKKRFSHRPVQEKFVCLNCGFETHADEQAALNIARSWLFLRSQEYKKYQTNKTTGNTDKRAFVETWQSFYRKKLKEVWKPAV

SEQ ID NO: 48582 - protein, 978 aa, synthetic construct
  REGION 1..978: note = engineered CasX variant
QEIKRINKIRRRLVKDSNTKKAGKTGPMKTLLVRVMTPDLRERLENLRKKPENIPQPISNTSRANLNKLLTDYTEMKKAILHVYWEEFQKDPVGLMSRVAQPASKKIDQNKLKPEMDEKGNLTTAGFACSQCGQPLFVYKLEQVSEKGKAYTNYFGRCNVAEHEKLIKLAQLKPEKDSDEAVTYSLGKFGQRALDFYSIHVTKESTHPVKPLAQIAGNRYASGPVGKALSDACMGTIASFLSKYQDIIIEHQKVVKGNQKRLESLRELAGKENLEYPSVTLPPQPHTKEGVDAYNEVIARVRMWVNLNLWQKLKLSRDDAKPLLRLKGFPSFPLVERQANEVDWWDMVCNVKKLINEKKEDGKVFWQNLAIYKRQEALRPYLSSEEDRKKGKKFARYQLGDLLLHLEKKHGEDWGKVYDEAWERIDKKVEGLSKHIKLEEERRSEDAQSKAALTDWLRAKASFVIEGLKEADKDEFCRCELKLQKWYGDLRGKPFAIEAENSILDISGFSKQYNCAFIWQKDGVKKLNLYLIINYFKGGKLRFKKIKPEAFEANRFYTVINKKSGEIVPMEVNFNFDDPNLIILPLAFGKRQGREFIWNDLLSLETGSLQLANGRVIEKTLYNRRTRQDEPALFVALTFERREVLDSSNIKPMNLIGVDRGENIPAVIALTDPEGCPLSRFKDSLGNPTHILRIGESYKEKQRTIQAKKEVEQRRAGGYSRKYASKAKNLADDMVRNTARDLLYYAVTQDAMLIFENLSRGFGRQGKRTFMAERQYTRMEDWLTAKLAYEGLPSKTYLSKTLAQYTSKTCSNCGFTITSADYDRVLEKLKKTATGWMTTINGKELKVEGQITYYNRYKRQNVVKDLSVELDRLSEESVNNDISSWTKGRSGEALSLLKKRFSHRPVQEKFVCLNCGFETHADEQAALNIARSWLFLRSQEYKKYQTNKTTGNTDKRAFVETWQSFYRKKLKEVWKPAV

SEQ ID NO: 48583 - protein, 977 aa, synthetic construct
  REGION 1..977: note = engineered CasX variant
QEIKRINKIRRRLVKDSNTKKAGKTGPMKTLLVRVMTPDLRERLENLRKKPENIPQPISNTSRANLNKLLTDYTEMKKAILHVYWEEFQKDPVGLMSRVAQPASKKIDQNKLKPEMDEKGNLTTAGFACSQCGQPLFVYKLEQVSEKGKAYTNYFGRCNVAEHEKLILLAQLKPEKDSDEAVTYSLGKFGQRALDFYSIHVTKESTHPVKPLAQIAGNRYASPVGKALSDACMGTIASFLSKYQDIIIEHQKVVKGNQKRLESLRELAGKENLEYPSVTLPPQPHTKEGVDAYNEVIARVRMWVNLNLWQKLKLSRDDAKPLLRLKGFPSFPLVERQANEVDWWDMVCNVKKLINEKKEDGKVFWQNLAIYKRQEALRPYLSSEEDRKKGKKFARYQLGDLLLHLEKKHGEDWGKVYDEAWERIDKKVEGLSKHIKLEEERRSEDAQSKAALTDWLRAKASFVIEGLKEADKDEFCRCELKLQKWYGDLRGKPFAIEAENSILDISGFSKQYNCAFIWQKDGVKKLNLYLIINYFKGGKLRFKKIKPEAFEANRFYTVINKKSGEIVPMEVNFNFDDPNLIILPLAFGKRQGREFIWNDLLSLETGSLQLANGRVIEKTLYNRRTRQDEPALFVALTFERREVLDSSNIKPMNLIGVDRGENIPAVIALTDPEGCPLSRFKDSLGNPTHILRIGESYKEKQRTIQAKKEVEQRRAGGYSRKYASKAKNLADDMVRNTARDLLYYAVTQDAMLIFENLSRGFGRQGKRTFMAERQYTRMEDWLTAKLAYEGLPSKTYLSKTLAQYTSKTCSNCGFTITSADYDRVLEKLKKTATGWMTTINGKELKVEGQITYYNRYKRQNVVKDLSVELDRLSEESVNNDISSWTKGRSGEALSLLKKRFSHRPVQEKFVCLNCGFETHADEQAALNIARSWLFLRSQEYKKYQTNKTTGNTDKRAFVETWQSFYRKKLKEVWKPAV

SEQ ID NO: 48584 - protein, 978 aa, synthetic construct
  REGION 1..978: note = engineered CasX variant
QEIKRINKIRRRLVKDSNTKKAGKTGPMKTLLVRVMTPDLRERLENLRKKPENIPQPISNTSRANLNKLLTDYTEMKKAILHVYWEEFQKDPVGLMSRVAQPASKKIDQNKLKPEMDEKGNLTTAGFACSQCGQPLFVYKLEQVSEKGKAYTNYFGRCNVAEHEKLILLAQLKPEKDSDEAVTYSLGKFGQRALDFYSIHVTKESTHPVKPLAQIAGNRYASYPVGKALSDACMGTIASFLSKYQDIIIEHQKVVKGNQKRLESLRELAGKENLEYPSVTLPPQPHTKEGVDAYNEVIARVRMWVNLNLWQKLKLSRDDAKPLLRLKGFPSFPLVERQANEVDWWDMVCNVKKLINEKKEDGKVFWQNLAGYKRQEALRPYLSSEEDREKGKKFARYQLGDLLLHLEKKHGEDWGKVYDEAWERIDKKVEGLSKHIKLEEERRSEDAQSKAALTDWLRAKASFVIEGLKEADKDEFCRCELKLQKWYGDLRGKPFAIEAENSILDISGFSKQYNCAFIWQKDGVKKLNLYLIINYFKGGKLRFKKIKPEAFEANRFYTVINKKSGEIVPMEVNFNFDDPNLIILPLAFGKRQGREFIWNDLLSLETGSLQLANGRVIEKTLYNRRTRQDEPALFVALTFERREVLDSSNIKPMNLIGVDRGENIPAVIALTDPEGCPLSRFKDSLGNPTHILRIGESYKEKQRTIQAKKEVEQRRAGGYSRKYASKAKNLADDMVRNTARDLLYYAVTQDAMLIFENLSRGFGRQGKRTFMAERQYTRMEDWLTAKLAYEGLPSKTYLSKTLAQYTSKTCSNCGFTITSADYDRVLEKLKKTATGWMTTINGKELKVEGQITYYNRYKRQNVVKDLSVELDRLSEESVNNDISSWTKGRSGEALSLLKKRFSHRPVQEKFVCLNCGFETHADEQAALNIARSWLFLRSQEYKKYQTNKTTGNTDKRAFVETWQSFYRKKLKEVWKPAV

SEQ ID NO: 48585 - protein, 978 aa, synthetic construct
  REGION 1..978: note = engineered CasX variant
QEIKRINKIRRRLVKDSNTKKAGKTGPMKTLLVRVMTPDLRERLENLRKKPENIPQPISNTSRANLNKLLTDYTEMKKAILHVYWEEFQKDPVGLMSRVAQPASKKIDQNKLKPEMDEKGNLTTAGFACSQCGQPLFVYKLEQVSEKGKAYTNYFGRCNVAEHEKLILLAQLKPEKDSDEAVTYSLGKFGQRALDFYSIHVTKESTHPVKPLAQIAGNRYASHPVGKALSDACMGTIASFLSKYQDIIIEHQKVVKGNQKRLESLRELAGKENLEYPSVTLPPQPHTKEGVDAYNEVIARVRMWVNLNLWQKLKLSRDDAKPLLRLKGFPSFPLVERQANEVDWWDMVCNVKKLINEKKEDGKVFWQNLAGYKRQEALRPYLSSEEDREKGKKFARYQLGDLLLHLEKKHGEDWGKVYDEAWERIDKKVEGLSKHIKLEEERRSEDAQSKAALTDWLRAKASFVIEGLKEADKDEFCRCELKLQKWYGDLRGKPFAIEAENSILDISGFSKQYNCAFIWQKDGVKKLNLYLIINYFKGGKLRFKKIKPEAFEANRFYTVINKKSGEIVPMEVNFNFDDPNLIILPLAFGKRQGREFIWNDLLSLETGSLQLANGRVIEKTLYNRRTRQDEPALFVALTFERREVLDSSNIKPMNLIGVDRGENIPAVIALTDPEGCPLSRFKDSLGNPTHILRIGESYKEKQRTIQAKKEVEQRRAGGYSRKYASKAKNLADDMVRNTARDLLYYAVTQDAMLIFENLSRGFGRQGKRTFMAERQYTRMEDWLTAKLAYEGLPSKTYLSKTLAQYTSKTCSNCGFTITSADYDRVLEKLKKTATGWMTTINGKELKVEGQITYYNRYKRQNVVKDLSVELDRLSEESVNNDISSWTKGRSGEALSLLKKRFSHRPVQEKFVCLNCGFETHADEQAALNIARSWLFLRSQEYKKYQTNKTTGNTDKRAFVETWQSFYRKKLKEVWKPAV

SEQ ID NO: 48586 - protein, 978 aa, synthetic construct
  REGION 1..978: note = engineered CasX variant
QEIKRINKIRRRLVKDSNTKKAGKTGPMKTLLVRVMTPDLRERLENLRKKPENIPQPISNTSRANLNKLLTDYTEMKKAILHVYWEEFQKDPVGLMSRVAQPASKKIDQNKLKPEMDEKGNLTTAGFACSQCGQPLFVYKLEQVSEKGKAYTNYFGRCNVAEHEKLILLAQLKPEKDSDEAVTYSLGKFGQRALDFYSIHVTKESTHPVKPLAQIAGNRYASSPVGKALSDACMGTIASFLSKYQDIIIEHQKVVKGNQKRLESLRELAGKENLEYPSVTLPPQPHTKEGVDAYNEVIARVRMWVNLNLWQKLKLSRDDAKPLLRLKGFPSFPLVERQANEVDWWDMVCNVKKLINEKKEDGKVFWQNLAGYKRQEALRPYLSSEEDREKGKKFARYQLGDLLLHLEKKHGEDWGKVYDEAWERIDKKVEGLSKHIKLEEERRSEDAQSKAALTDWLRAKASFVIEGLKEADKDEFCRCELKLQKWYGDLRGKPFAIEAENSILDISGFSKQYNCAFIWQKDGVKKLNLYLIINYFKGGKLRFKKIKPEAFEANRFYTVINKKSGEIVPMEVNFNFDDPNLIILPLAFGKRQGREFIWNDLLSLETGSLQLANGRVIEKTLYNRRTRQDEPALFVALTFERREVLDSSNIKPMNLIGVDRGENIPAVIALTDPEGCPLSRFKDSLGNPTHILRIGESYKEKQRTIQAKKEVEQRRAGGYSRKYASKAKNLADDMVRNTARDLLYYAVTQDAMLIFENLSRGFGRQGKRTFMAERQYTRMEDWLTAKLAYEGLPSKTYLSKTLAQYTSKTCSNCGFTITSADYDRVLEKLKKTATGWMTTINGKELKVEGQITYYNRYKRQNVVKDLSVELDRLSEESVNNDISSWTKGRSGEALSLLKKRFSHRPVQEKFVCLNCGFETHADEQAALNIARSWLFLRSQEYKKYQTNKTTGNTDKRAFVETWQSFYRKKLKEVWKPAV

SEQ ID NO: 48587 - protein, 978 aa, synthetic construct
  REGION 1..978: note = engineered CasX variant
QEIKRINKIRRRLVKDSNTKKAGKTGPMKTLLVRVMTPDLRERLENLRKKPENIPQPISNTSRANLNKLLTDYTEMKKAILHVYWEEFQKDPVGLMSRVAQPASKKIDQNKLKPEMDEKGNLTTAGFACSQCGQPLFVYKLEQVSEKGKAYTNYFGRCNVAEHEKLILLAQLKPEKDSDEAVTYSLGKFGQRALDFYSIHVTKESTHPVKPLAQIAGNRYASTPVGKALSDACMGTIASFLSKYQDIIIEHQKVVKGNQKRLESLRELAGKENLEYPSVTLPPQPHTKEGVDAYNEVIARVRMWVNLNLWQKLKLSRDDAKPLLRLKGFPSFPLVERQANEVDWWDMVCNVKKLINEKKEDGKVFWQNLAGYKRQEALRPYLSSEEDREKGKKFARYQLGDLLLHLEKKHGEDWGKVYDEAWERIDKKVEGLSKHIKLEEERRSEDAQSKAALTDWLRAKASFVIEGLKEADKDEFCRCELKLQKWYGDLRGKPFAIEAENSILDISGFSKQYNCAFIWQKDGVKKLNLYLIINYFKGGKLRFKKIKPEAFEANRFYTVINKKSGEIVPMEVNFNFDDPNLIILPLAFGKRQGREFIWNDLLSLETGSLQLANGRVIEKTLYNRRTRQDEPALFVALTFERREVLDSSNIKPMNLIGVDRGENIPAVIALTDPEGCPLSRFKDSLGNPTHILRIGESYKEKQRTIQAKKEVEQRRAGGYSRKYASKAKNLADDMVRNTARDLLYYAVTQDAMLIFENLSRGFGRQGKRTFMAERQYTRMEDWLTAKLAYEGLPSKTYLSKTLAQYTSKTCSNCGFTITSADYDRVLEKLKKTATGWMTTINGKELKVEGQITYYNRYKRQNVVKDLSVELDRLSEESVNNDISSWTKGRSGEALSLLKKRFSHRPVQEKFVCLNCGFETHADEQAALNIARSWLFLRSQEYKKYQTNKTTGNTDKRAFVETWQSFYRKKLKEVWKPAV

SEQ ID NO: 48588 - protein, 978 aa, synthetic construct
  REGION 1..978: note = engineered CasX variant
QEIKRINKIRRRLVKDSNTKKAGKTGPMKTLLVRVMTPDLRERLENLRKKPENIPQPISNTSRANLNKLLTDYTEMKKAILHVYWEEFQKDPVGLMSRVAQPASKKIDQNKLKPEMDEKGNLTTAGFACSQCGQPLFVYKLEQVSEKGKAYTNYFGRCNVAEHEKLILLAQLKPEKDSDEAVTYSLGKFGQRALDFYSIHVTKESTHPVKPLAQIAGNRYASAPVGKALSDACMGTIASFLSKYQDIIIEHQKVVKGNQKRLESLRELAGKENLEYPSVTLPPQPHTKEGVDAYNEVIARVRMWVNLNLWQKLKLSRDDAKPLLRLKGFPSFPLVERQANEVDWWDMVCNVKKLINEKKEDGKVFWQNLAGYKRQEALRPYLSSEEDREKGKKFARYQLGDLLLHLEKKHGEDWGKVYDEAWERIDKKVEGLSKHIKLEEERRSEDAQSKAALTDWLRAKASFVIEGLKEADKDEFCRCELKLQKWYGDLRGKPFAIEAENSILDISGFSKQYNCAFIWQKDGVKKLNLYLIINYFKGGKLRFKKIKPEAFEANRFYTVINKKSGEIVPMEVNFNFDDPNLIILPLAFGKRQGREFIWNDLLSLETGSLQLANGRVIEKTLYNRRTRQDEPALFVALTFERREVLDSSNIKPMNLIGVDRGENIPAVIALTDPEGCPLSRFKDSLGNPTHILRIGESYKEKQRTIQAKKEVEQRRAGGYSRKYASKAKNLADDMVRNTARDLLYYAVTQDAMLIFENLSRGFGRQGKRTFMAERQYTRMEDWLTAKLAYEGLPSKTYLSKTLAQYTSKTCSNCGFTITSADYDRVLEKLKKTATGWMTTINGKELKVEGQITYYNRYKRQNVVKDLSVELDRLSEESVNNDISSWTKGRSGEALSLLKKRFSHRPVQEKFVCLNCGFETHADEQAALNIARSWLFLRSQEYKKYQTNKTTGNTDKRAFVETWQSFYRKKLKEVWKPAV

SEQ ID NO: 48589 - protein, 978 aa, synthetic construct
  REGION 1..978: note = engineered CasX variant
QEIKRINKIRRRLVKDSNTKKAGKTGPMKTLLVRVMTPDLRERLENLRKKPENIPQPISNTSRANLNKLLTDYTEMKKAILHVYWEEFQKDPVGLMSRVAQPASKKIDQNKLKPEMDEKGNLTTAGFACSQCGQPLFVYKLEQVSEKGKAYTNYFGRCNVAEHEKLILLAQLKPEKDSDEAVTYSLGKFGQRALDFYSIHVTKESTHPVKPLAQIAGNRYASVPVGKALSDACMGTIASFLSKYQDIIIEHQKVVKGNQKRLESLRELAGKENLEYPSVTLPPQPHTKEGVDAYNEVIARVRMWVNLNLWQKLKLSRDDAKPLLRLKGFPSFPLVERQANEVDWWDMVCNVKKLINEKKEDGKVFWQNLAGYKRQEALRPYLSSEEDREKGKKFARYQLGDLLLHLEKKHGEDWGKVYDEAWERIDKKVEGLSKHIKLEEERRSEDAQSKAALTDWLRAKASFVIEGLKEADKDEFCRCELKLQKWYGDLRGKPFAIEAENSILDISGFSKQYNCAFIWQKDGVKKLNLYLIINYFKGGKLRFKKIKPEAFEANRFYTVINKKSGEIVPMEVNFNFDDPNLIILPLAFGKRQGREFIWNDLLSLETGSLQLANGRVIEKTLYNRRTRQDEPALFVALTFERREVLDSSNIKPMNLIGVDRGENIPAVIALTDPEGCPLSRFKDSLGNPTHILRIGESYKEKQRTIQAKKEVEQRRAGGYSRKYASKAKNLADDMVRNTARDLLYYAVTQDAMLIFENLSRGFGRQGKRTFMAERQYTRMEDWLTAKLAYEGLPSKTYLSKTLAQYTSKTCSNCGFTITSADYDRVLEKLKKTATGWMTTINGKELKVEGQITYYNRYKRQNVVKDLSVELDRLSEESVNNDISSWTKGRSGEALSLLKKRFSHRPVQEKFVCLNCGFETHADEQAALNIARSWLFLRSQEYKKYQTNKTTGNTDKRAFVETWQSFYRKKLKEVWKPAV

SEQ ID NO: 48590 - protein, 978 aa, synthetic construct
  REGION 1..978: note = engineered CasX variant
QEIKRINKIRRRLVKDSNTKKAGKTGPMKTLLVRVMTPDLRERLENLRKKPENIPQPISNTSRANLNKLLTDYTEMKKAILHVYWEEFQKDPVGLMSRVAQPASKKIDQNKLKPEMDEKGNLTTAGFACSQCGQPLFVYKLEQVSEKGKAYTNYFGRCNVAEHEKLIKLAQLKPEKDSDEAVTYSLGKFGQRALDFYSIHVTKESTHPVKPLAQIAGNRYASGPVGKALSDACMGTIASFLSKYQDIIIEHQKVVKGNQKRLESLRELAGKENLEYPSVTLPPQPHTKEGVDAYNEVIARVRMWVNLNLWQKLKLSRDDAKPLLRLKGFPSFPLVERQANEVDWWDMVCNVKKLINEKKEDGKVFWQNLAGYKRQEALRPYLSSEEDREKGKKFARYQLGDLLLHLEKKHGEDWGKVYDEAWERIDKKVEGLSKHIKLEEERRSEDAQSKAALTDWLRAKASFVIEGLKEADKDEFCRCELKLQKWYGDLRGKPFAIEAENSILDISGFSKQYNCAFIWQKDGVKKLNLYLIINYFKGGKLRFKKIKPEAFEANRFYTVINKKSGEIVPMEVNFNFDDPNLIILPLAFGKRQGREFIWNDLLSLETGSLQLANGRVIEKTLYNRRTRQDEPALFVALTFERREVLDSSNIKPMNLIGVDRGENIPAVIALTDPEGCPLSRFKDSLGNPTHILRIGESYKEKQRTIQAKKEVEQRRAGGYSRKYASKAKNLADDMVRNTARDLLYYAVTQDAMLIFENLSRGFGRQGKRTFMAERQYTRMEDWLTAKLAYEGLPSKTYLSKTLAQYTSKTCSNCGFTITSADYDRVLEKLKKTATGWMTTINGKELKVEGQITYYNRYKRQNVVKDLSVELDRLSEESVNNDISSWTKGRSGEALSLLKKRFSHRPVQEKFVCLNCGFETHADEQAALNIARSWLFLRSQEYKKYQTNKTTGNTDKRAFVETWQSFYRKKLKEVWKPAV

SEQ ID NO: 48591 - protein, 977 aa, synthetic construct
  REGION 1..977: note = engineered CasX variant
QEIKRINKIRRRLVKDSNTKKAGKTGPMKTLLVRVMTPDLRERLENLRKKPENIPQPISNTSRANLNKLLTDYTEMKKAILHVYWEEFQKDPVGLMSRVAQPASKKIDQNKLKPEMDEKGNLTTAGFACSQCGQPLFVYKLEQVSEKGKAYTNYFGRCNVAEHEKLILLAQLKPEKDSDEAVTYSLGKFGQRALDFYSIHVTKESTHPVKPLAQIAGNRYASPVGKALSDACMGTIASFLSKYQDIIIEHQKVVKGNQKRLESLRELAGKENLEYPSVTLPPQPHTKEGVDAYNEVIARVRMWVNLNLWQKLKLSRDDAKPLLRLKGFPSFPLVERQANEVDWWDMVCNVKKLINEKKEDGKVFWQNLAGYKRQEALRPYLSSEEDREKGKKFARYQLGDLLLHLEKKHGEDWGKVYDEAWERIDKKVEGLSKHIKLEEERRSEDAQSKAALTDWLRAKASFVIEGLKEADKDEFCRCELKLQKWYGDLRGKPFAIEAENSILDISGFSKQYNCAFIWQKDGVKKLNLYLIINYFKGGKLRFKKIKPEAFEANRFYTVINKKSGEIVPMEVNFNFDDPNLIILPLAFGKRQGREFIWNDLLSLETGSLQLANGRVIEKTLYNRRTRQDEPALFVALTFERREVLDSSNIKPMNLIGVDRGENIPAVIALTDPEGCPLSRFKDSLGNPTHILRIGESYKEKQRTIQAKKEVEQRRAGGYSRKYASKAKNLADDMVRNTARDLLYYAVTQDAMLIFENLSRGFGRQGKRTFMAERQYTRMEDWLTAKLAYEGLPSKTYLSKTLAQYTSKTCSNCGFTITSADYDRVLEKLKKTATGWMTTINGKELKVEGQITYYNRYKRQNVVKDLSVELDRLSEESVNNDISSWTKGRSGEALSLLKKRFSHRPVQEKFVCLNCGFETHADEQAALNIARSWLFLRSQEYKKYQTNKTTGNTDKRAFVETWQSFYRKKLKEVWKPAV

SEQ ID NO: 48592 - protein, 978 aa, synthetic construct
  REGION 1..978: note = engineered CasX variant
QEIKRINKIRRRLVKDSNTKKAGKTGPMKTLLVRVMTPDLRERLENLRKKPENIPQPISNTSRANLNKLLTDYTEMKKAILHVYWEEFQKDPVGLMSRVAQPASKKIDQNKLKPEMDEKGNLTTAGFACSQCGQPLFVYKLEQVSEKGKAYTNYFGRCNVAEHEKLILLAQLKPEKDSDEAVTYSLGKFGQRALDFYSIHVTKESTHPVKPLAQIAGNRYASYPVGKALSDACMGTIASFLSKYQDIIIEHQKVVKGNQKRLESLRELAGKENLEYPSVTLPPQPHTKEGVDAYNEVIARVRMWVNLNLWQKLKLSRDDAKPLLRLKGFPSFPLVERQANEVDWWDMVCNVKKLINEKKEDGKVFWQNLAGYKRQEALRPYLSSEEDRKKGKKFARYQLGDLLLHLEKKHGEDWGKVYDEAWERIDKKVEGLSKHIKLEEERRSEDAQSKAALTDWLRAKASFVIEGLKEADKDEFCRCELKLQKWYGDLRGKPFAIEAENSILDISGFSKQYNCAFIWQKDGVKKLNLYLIINYFKGGKLRFKKIKPEAFEANRFYTVINKKSGEIVIMEVNFNFDDPNLIILPLAFGKRQGREFIWNDLLSLETGSLQLANGRVIEKTLYNRRTRQDEPALFVALTFERREVLDSSNIKPMNLIGVDRGENIPAVIALTDPEGCPLSRFKDSLGNPTHILRIGESYKEKQRTIQAKKEVEQRRAGGYSRKYASKAKNLADDMVRNTARDLLYYAVTQDAMLIFENLSRGFGRQGKRTFMAERQYTRMEDWLTAKLAYEGLPSKTYLSKTLAQYTSKTCSNCGFTITSADYDRVLEKLKKTATGWMTTINGKELKVEGQITYYNRYKRQNVVKDLSVELDRLSEESVNNDISSWTKGRSGEALSLLKKRFSHRPVQEKFVCLNCGFETHADEQAALNIARSWLFLRSQEYKKYQTNKTTGNTDKRAFVETWQSFYRKKLKEVWKPAV

SEQ ID NO: 48593 - protein, 978 aa, synthetic construct
  REGION 1..978: note = engineered CasX variant
QEIKRINKIRRRLVKDSNTKKAGKTGPMKTLLVRVMTPDLRERLENLRKKPENIPQPISNTSRANLNKLLTDYTEMKKAILHVYWEEFQKDPVGLMSRVAQPASKKIDQNKLKPEMDEKGNLTTAGFACSQCGQPLFVYKLEQVSEKGKAYTNYFGRCNVAEHEKLILLAQLKPEKDSDEAVTYSLGKFGQRALDFYSIHVTKESTHPVKPLAQIAGNRYASHPVGKALSDACMGTIASFLSKYQDIIIEHQKVVKGNQKRLESLRELAGKENLEYPSVTLPPQPHTKEGVDAYNEVIARVRMWVNLNLWQKLKLSRDDAKPLLRLKGFPSFPLVERQANEVDWWDMVCNVKKLINEKKEDGKVFWQNLAGYKRQEALRPYLSSEEDRKKGKKFARYQLGDLLLHLEKKHGEDWGKVYDEAWERIDKKVEGLSKHIKLEEERRSEDAQSKAALTDWLRAKASFVIEGLKEADKDEFCRCELKLQKWYGDLRGKPFAIEAENSILDISGFSKQYNCAFIWQKDGVKKLNLYLIINYFKGGKLRFKKIKPEAFEANRFYTVINKKSGEIVIMEVNFNFDDPNLIILPLAFGKRQGREFIWNDLLSLETGSLQLANGRVIEKTLYNRRTRQDEPALFVALTFERREVLDSSNIKPMNLIGVDRGENIPAVIALTDPEGCPLSRFKDSLGNPTHILRIGESYKEKQRTIQAKKEVEQRRAGGYSRKYASKAKNLADDMVRNTARDLLYYAVTQDAMLIFENLSRGFGRQGKRTFMAERQYTRMEDWLTAKLAYEGLPSKTYLSKTLAQYTSKTCSNCGFTITSADYDRVLEKLKKTATGWMTTINGKELKVEGQITYYNRYKRQNVVKDLSVELDRLSEESVNNDISSWTKGRSGEALSLLKKRFSHRPVQEKFVCLNCGFETHADEQAALNIARSWLFLRSQEYKKYQTNKTTGNTDKRAFVETWQSFYRKKLKEVWKPAV

SEQ ID NO: 48594 - protein, 978 aa, synthetic construct
  REGION 1..978: note = engineered CasX variant
QEIKRINKIRRRLVKDSNTKKAGKTGPMKTLLVRVMTPDLRERLENLRKKPENIPQPISNTSRANLNKLLTDYTEMKKAILHVYWEEFQKDPVGLMSRVAQPASKKIDQNKLKPEMDEKGNLTTAGFACSQCGQPLFVYKLEQVSEKGKAYTNYFGRCNVAEHEKLILLAQLKPEKDSDEAVTYSLGKFGQRALDFYSIHVTKESTHPVKPLAQIAGNRYASSPVGKALSDACMGTIASFLSKYQDIIIEHQKVVKGNQKRLESLRELAGKENLEYPSVTLPPQPHTKEGVDAYNEVIARVRMWVNLNLWQKLKLSRDDAKPLLRLKGFPSFPLVERQANEVDWWDMVCNVKKLINEKKEDGKVFWQNLAGYKRQEALRPYLSSEEDRKKGKKFARYQLGDLLLHLEKKHGEDWGKVYDEAWERIDKKVEGLSKHIKLEEERRSEDAQSKAALTDWLRAKASFVIEGLKEADKDEFCRCELKLQKWYGDLRGKPFAIEAENSILDISGFSKQYNCAFIWQKDGVKKLNLYLIINYFKGGKLRFKKIKPEAFEANRFYTVINKKSGEIVIMEVNFNFDDPNLIILPLAFGKRQGREFIWNDLLSLETGSLQLANGRVIEKTLYNRRTRQDEPALFVALTFERREVLDSSNIKPMNLIGVDRGENIPAVIALTDPEGCPLSRFKDSLGNPTHILRIGESYKEKQRTIQAKKEVEQRRAGGYSRKYASKAKNLADDMVRNTARDLLYYAVTQDAMLIFENLSRGFGRQGKRTFMAERQYTRMEDWLTAKLAYEGLPSKTYLSKTLAQYTSKTCSNCGFTITSADYDRVLEKLKKTATGWMTTINGKELKVEGQITYYNRYKRQNVVKDLSVELDRLSEESVNNDISSWTKGRSGEALSLLKKRFSHRPVQEKFVCLNCGFETHADEQAALNIARSWLFLRSQEYKKYQTNKTTGNTDKRAFVETWQSFYRKKLKEVWKPAV

SEQ ID NO: 48595 - protein, 978 aa, synthetic construct
  REGION 1..978: note = engineered CasX variant
QEIKRINKIRRRLVKDSNTKKAGKTGPMKTLLVRVMTPDLRERLENLRKKPENIPQPISNTSRANLNKLLTDYTEMKKAILHVYWEEFQKDPVGLMSRVAQPASKKIDQNKLKPEMDEKGNLTTAGFACSQCGQPLFVYKLEQVSEKGKAYTNYFGRCNVAEHEKLILLAQLKPEKDSDEAVTYSLGKFGQRALDFYSIHVTKESTHPVKPLAQIAGNRYASTPVGKALSDACMGTIASFLSKYQDIIIEHQKVVKGNQKRLESLRELAGKENLEYPSVTLPPQPHTKEGVDAYNEVIARVRMWVNLNLWQKLKLSRDDAKPLLRLKGFPSFPLVERQANEVDWWDMVCNVKKLINEKKEDGKVFWQNLAGYKRQEALRPYLSSEEDRKKGKKFARYQLGDLLLHLEKKHGEDWGKVYDEAWERIDKKVEGLSKHIKLEEERRSEDAQSKAALTDWLRAKASFVIEGLKEADKDEFCRCELKLQKWYGDLRGKPFAIEAENSILDISGFSKQYNCAFIWQKDGVKKLNLYLIINYFKGGKLRFKKIKPEAFEANRFYTVINKKSGEIVIMEVNFNFDDPNLIILPLAFGKRQGREFIWNDLLSLETGSLQLANGRVIEKTLYNRRTRQDEPALFVALTFERREVLDSSNIKPMNLIGVDRGENIPAVIALTDPEGCPLSRFKDSLGNPTHILRIGESYKEKQRTIQAKKEVEQRRAGGYSRKYASKAKNLADDMVRNTARDLLYYAVTQDAMLIFENLSRGFGRQGKRTFMAERQYTRMEDWLTAKLAYEGLPSKTYLSKTLAQYTSKTCSNCGFTITSADYDRVLEKLKKTATGWMTTINGKELKVEGQITYYNRYKRQNVVKDLSVELDRLSEESVNNDISSWTKGRSGEALSLLKKRFSHRPVQEKFVCLNCGFETHADEQAALNIARSWLFLRSQEYKKYQTNKTTGNTDKRAFVETWQSFYRKKLKEVWKPAV

SEQ ID NO: 48596 - protein, 978 aa, synthetic construct
  REGION 1..978: note = engineered CasX variant
QEIKRINKIRRRLVKDSNTKKAGKTGPMKTLLVRVMTPDLRERLENLRKKPENIPQPISNTSRANLNKLLTDYTEMKKAILHVYWEEFQKDPVGLMSRVAQPASKKIDQNKLKPEMDEKGNLTTAGFACSQCGQPLFVYKLEQVSEKGKAYTNYFGRCNVAEHEKLILLAQLKPEKDSDEAVTYSLGKFGQRALDFYSIHVTKESTHPVKPLAQIAGNRYASAPVGKALSDACMGTIASFLSKYQDIIIEHQKVVKGNQKRLESLRELAGKENLEYPSVTLPPQPHTKEGVDAYNEVIARVRMWVNLNLWQKLKLSRDDAKPLLRLKGFPSFPLVERQANEVDWWDMVCNVKKLINEKKEDGKVFWQNLAGYKRQEALRPYLSSEEDRKKGKKFARYQLGDLLLHLEKKHGEDWGKVYDEAWERIDKKVEGLSKHIKLEEERRSEDAQSKAALTDWLRAKASFVIEGLKEADKDEFCRCELKLQKWYGDLRGKPFAIEAENSILDISGFSKQYNCAFIWQKDGVKKLNLYLIINYFKGGKLRFKKIKPEAFEANRFYTVINKKSGEIVIMEVNFNFDDPNLIILPLAFGKRQGREFIWNDLLSLETGSLQLANGRVIEKTLYNRRTRQDEPALFVALTFERREVLDSSNIKPMNLIGVDRGENIPAVIALTDPEGCPLSRFKDSLGNPTHILRIGESYKEKQRTIQAKKEVEQRRAGGYSRKYASKAKNLADDMVRNTARDLLYYAVTQDAMLIFENLSRGFGRQGKRTFMAERQYTRMEDWLTAKLAYEGLPSKTYLSKTLAQYTSKTCSNCGFTITSADYDRVLEKLKKTATGWMTTINGKELKVEGQITYYNRYKRQNVVKDLSVELDRLSEESVNNDISSWTKGRSGEALSLLKKRFSHRPVQEKFVCLNCGFETHADEQAALNIARSWLFLRSQEYKKYQTNKTTGNTDKRAFVETWQSFYRKKLKEVWKPAV

SEQ ID NO: 48597 - protein, 978 aa, synthetic construct
  REGION 1..978: note = engineered CasX variant
QEIKRINKIRRRLVKDSNTKKAGKTGPMKTLLVRVMTPDLRERLENLRKKPENIPQPISNTSRANLNKLLTDYTEMKKAILHVYWEEFQKDPVGLMSRVAQPASKKIDQNKLKPEMDEKGNLTTAGFACSQCGQPLFVYKLEQVSEKGKAYTNYFGRCNVAEHEKLILLAQLKPEKDSDEAVTYSLGKFGQRALDFYSIHVTKESTHPVKPLAQIAGNRYASVPVGKALSDACMGTIASFLSKYQDIIIEHQKVVKGNQKRLESLRELAGKENLEYPSVTLPPQPHTKEGVDAYNEVIARVRMWVNLNLWQKLKLSRDDAKPLLRLKGFPSFPLVERQANEVDWWDMVCNVKKLINEKKEDGKVFWQNLAGYKRQEALRPYLSSEEDRKKGKKFARYQLGDLLLHLEKKHGEDWGKVYDEAWERIDKKVEGLSKHIKLEEERRSEDAQSKAALTDWLRAKASFVIEGLKEADKDEFCRCELKLQKWYGDLRGKPFAIEAENSILDISGFSKQYNCAFIWQKDGVKKLNLYLIINYFKGGKLRFKKIKPEAFEANRFYTVINKKSGEIVIMEVNFNFDDPNLIILPLAFGKRQGREFIWNDLLSLETGSLQLANGRVIEKTLYNRRTRQDEPALFVALTFERREVLDSSNIKPMNLIGVDRGENIPAVIALTDPEGCPLSRFKDSLGNPTHILRIGESYKEKQRTIQAKKEVEQRRAGGYSRKYASKAKNLADDMVRNTARDLLYYAVTQDAMLIFENLSRGFGRQGKRTFMAERQYTRMEDWLTAKLAYEGLPSKTYLSKTLAQYTSKTCSNCGFTITSADYDRVLEKLKKTATGWMTTINGKELKVEGQITYYNRYKRQNVVKDLSVELDRLSEESVNNDISSWTKGRSGEALSLLKKRFSHRPVQEKFVCLNCGFETHADEQAALNIARSWLFLRSQEYKKYQTNKTTGNTDKRAFVETWQSFYRKKLKEVWKPAV

SEQ ID NO: 48598 - protein, 978 aa, synthetic construct
  REGION 1..978: note = engineered CasX variant
QEIKRINKIRRRLVKDSNTKKAGKTGPMKTLLVRVMTPDLRERLENLRKKPENIPQPISNTSRANLNKLLTDYTEMKKAILHVYWEEFQKDPVGLMSRVAQPASKKIDQNKLKPEMDEKGNLTTAGFACSQCGQPLFVYKLEQVSEKGKAYTNYFGRCNVAEHEKLIKLAQLKPEKDSDEAVTYSLGKFGQRALDFYSIHVTKESTHPVKPLAQIAGNRYASGPVGKALSDACMGTIASFLSKYQDIIIEHQKVVKGNQKRLESLRELAGKENLEYPSVTLPPQPHTKEGVDAYNEVIARVRMWVNLNLWQKLKLSRDDAKPLLRLKGFPSFPLVERQANEVDWWDMVCNVKKLINEKKEDGKVFWQNLAGYKRQEALRPYLSSEEDRKKGKKFARYQLGDLLLHLEKKHGEDWGKVYDEAWERIDKKVEGLSKHIKLEEERRSEDAQSKAALTDWLRAKASFVIEGLKEADKDEFCRCELKLQKWYGDLRGKPFAIEAENSILDISGFSKQYNCAFIWQKDGVKKLNLYLIINYFKGGKLRFKKIKPEAFEANRFYTVINKKSGEIVIMEVNFNFDDPNLIILPLAFGKRQGREFIWNDLLSLETGSLQLANGRVIEKTLYNRRTRQDEPALFVALTFERREVLDSSNIKPMNLIGVDRGENIPAVIALTDPEGCPLSRFKDSLGNPTHILRIGESYKEKQRTIQAKKEVEQRRAGGYSRKYASKAKNLADDMVRNTARDLLYYAVTQDAMLIFENLSRGFGRQGKRTFMAERQYTRMEDWLTAKLAYEGLPSKTYLSKTLAQYTSKTCSNCGFTITSADYDRVLEKLKKTATGWMTTINGKELKVEGQITYYNRYKRQNVVKDLSVELDRLSEESVNNDISSWTKGRSGEALSLLKKRFSHRPVQEKFVCLNCGFETHADEQAALNIARSWLFLRSQEYKKYQTNKTTGNTDKRAFVETWQSFYRKKLKEVWKPAV

SEQ ID NO: 48599 - protein, 977 aa, synthetic construct
  REGION 1..977: note = engineered CasX variant
QEIKRINKIRRRLVKDSNTKKAGKTGPMKTLLVRVMTPDLRERLENLRKKPENIPQPISNTSRANLNKLLTDYTEMKKAILHVYWEEFQKDPVGLMSRVAQPASKKIDQNKLKPEMDEKGNLTTAGFACSQCGQPLFVYKLEQVSEKGKAYTNYFGRCNVAEHEKLILLAQLKPEKDSDEAVTYSLGKFGQRALDFYSIHVTKESTHPVKPLAQIAGNRYASPVGKALSDACMGTIASFLSKYQDIIIEHQKVVKGNQKRLESLRELAGKENLEYPSVTLPPQPHTKEGVDAYNEVIARVRMWVNLNLWQKLKLSRDDAKPLLRLKGFPSFPLVERQANEVDWWDMVCNVKKLINEKKEDGKVFWQNLAGYKRQEALRPYLSSEEDRKKGKKFARYQLGDLLLHLEKKHGEDWGKVYDEAWERIDKKVEGLSKHIKLEEERRSEDAQSKAALTDWLRAKASFVIEGLKEADKDEFCRCELKLQKWYGDLRGKPFAIEAENSILDISGFSKQYNCAFIWQKDGVKKLNLYLIINYFKGGKLRFKKIKPEAFEANRFYTVINKKSGEIVIMEVNFNFDDPNLIILPLAFGKRQGREFIWNDLLSLETGSLQLANGRVIEKTLYNRRTRQDEPALFVALTFERREVLDSSNIKPMNLIGVDRGENIPAVIALTDPEGCPLSRFKDSLGNPTHILRIGESYKEKQRTIQAKKEVEQRRAGGYSRKYASKAKNLADDMVRNTARDLLYYAVTQDAMLIFENLSRGFGRQGKRTFMAERQYTRMEDWLTAKLAYEGLPSKTYLSKTLAQYTSKTCSNCGFTITSADYDRVLEKLKKTATGWMTTINGKELKVEGQITYYNRYKRQNVVKDLSVELDRLSEESVNNDISSWTKGRSGEALSLLKKRFSHRPVQEKFVCLNCGFETHADEQAALNIARSWLFLRSQEYKKYQTNKTTGNTDKRAFVETWQSFYRKKLKEVWKPAV

SEQ ID NO: 48600 - protein, 979 aa, synthetic construct
  REGION 1..979: note = engineered CasX variant
QEIKRINKIRRRLVKDSNTKKAGKTRGPMKTLLVRVMTPDLRERLENLRKKPENIPQPISNTSRANLNKLLTDYTEMKKAILHVYWEEFQKDPVGLMSRVAQPASKKIDQNKLKPEMDEKGNLTTAGFACSQCGQPLFVYKLEQVSEKGKAYTNYFGRCNVAEHEKLILLAQLKPEKDSDEAVTYSLGKFGQRALDFYSIHVTKESTHPVKPLAQIAGNRYASGPVGKALRGACMGTIASFLSKYQDIIIEHQKVVKGNQKRLESLRELAGKENLEYPSVTLPPQPHTKEGVDAYNEVIARVRMWVNLNLWQKLKLSRDDAKPLLRLKGFPSFPLVERQANEVDWWDMVCNVKKLINEKKEDGKVFWQNLAGYKRQEALRPYLSSEEDRKKGKKFARYQLGDLLLHLEKKHGEDWGKVYDEAWERIDKKVEGLSKHIKLEEERRSEDAQSKAALTDWLRAKASFVIEGLKEADKDEFCRCELKLQKWYGDLRGKPFAIEAENSILDISGFSKQYNCAFIWQKDGVKKLNLYLIINYFKGGKLRFKKIKPEAFEANRFYTVINKKSGEIVPMEVNFNFDDPNLIILPLAFGKRQGREFIWNDLLSLETGSLKLANGRVIEKTLYNRRTRQDEPALFVALTFERREVLDSSNIKPMNLIGVDRGENIPAVIALTDPEGCPLSRFKDSLGNPTHILRIGESYKEKQRTIQAKKEVEQRRAGGYSRKYASKAKNLADDMVRNTARDLLYYAVTQDAMLIFENLSRGFGRQGKRTFMAERQYTRMEDWLTAKLAYEGLPSKTYLSKTLAQYTSKTCSNCGFTITSADYDRVLEKLKKTATGWMTTINGKELKVEGQITYYNRYKRQNVVKDLSVELDRLSEESVNNDISSWTKGRSGEALSLLKKRFSHRPVQEKFVCLNCGFETHADEQAALNIARSWLFLRSQEYKKYQTNKTTGNTDKRAFVETWQSFYRKKLKEVWKPAV

SEQ ID NO: 48601 - protein, 979 aa, synthetic construct
  REGION 1..979: note = engineered CasX variant
QEIKRINKIRRRLVKDSNTKKAGKTRGPMKTLLVRVMTPDLRERLENLRKKPENIPQPISNTSRANLNKLLTDYTEMKKAILHVYWEEFQKDPVGLMSRVAQPASKKIDQNKLKPEMDEKGNLTTAGFACSQCGQPLFVYKLEQVSEKGKAYTNYFGRCNVAEHEKLILLAQLKPEKDSDEAVTYSLGKFGQRALDFYSIHVTKESTHPVKPLAQIAGNRYASGPVGKALRDACMGTIASFLSKYQDIIIEHQKVVKGNQKRLESLRELAGKENLEYPSVTLPPQPHTKEGVDAYNEVIARVRMWVNLNLWQKLKLSRDDAKPLLRLKNFPSFPLVERQANEVDWWDMVCNVKKLINEKKEDGKVFWQNLAGYKRQEALRPYLSSEEDRKKGKKFARYQLGDLLLHLEKKHGEDWGKVYDEAWERIDKKVEGLSKHIKLEEERRSEDAQSKAALTDWLRAKASFVIEGLKEADKDEFCRCELKLQKWYGDLRGKPFAIEAENSILDISGFSKQYNCAFIWQKDGVKKLNLYLIINYFKGGKLRFKKIKPEAFEANRFYTVINKKSGEIVPMEVNFNFDDPNLIILPLAFGKRQGREFIWNDLLSLETGSLKLANGRVIEKTLYNRRTRQDEPALFVALTFERREVLDSSNIKPMNLIGVDRGENIPAVIALTDPEGCPLSRFKDSLGNPTHILRIGESYKEKQRTIQAKKEVEQRRAGGYSRKYASKAKNLADDMVRNTARDLLYYAVTQDAMLIFENLSRGFGRQGKRTFMAERQYTRMEDWLTAKLAYEGLPSKTYLSKTLAQYTSKTCSNCGFTITSADYDRVLEKLKKTATGWMTTINGKELKVEGQITYYNRYKRQNVVKDLSVELDRLSEESVNNDISSWTKGRSGEALSLLKKRFSHRPVQEKFVCLNCGFETHADEQAALNIARSWLFLRSQEYKKYQTNKTTGNTDKRAFVETWQSFYRKKLKEVWKPAV

SEQ ID NO: 48602 - protein, 979 aa, synthetic construct
  REGION 1..979: note = engineered CasX variant
QEIKRINKIRRRLVKDSNTKKAGKTRGPMKTLLVRVMTPDLRERLENLRKKPENIPQPISNTSRANLNKLLTDYTEMKKAILHVYWEEFQKDPVGLMSRVAQPASKKIDQNKLKPEMDEKGNLTTAGFACSQCGQPLFVYKLEQVSEKGKAYTNYFGRCNVAEHEKLILLAQLKPEKDSDEAVTYSLGKFGQRALDFYSIHVTKESTHPVKPLAQIAGNRYASGPVGKALRDACMGTIASFLSKYQDIIIEHQKVVKGNQKRLESLRELAGKENLEYPSVTLPPQPHTKEGVDAYNEVIARVRMWVNLNLWQKLKLSRDDAKPLLRLKGFPSFPLVERQANEVDWWDMVCNVKKLINEKKEDGKVFWQNLAGYKRQEALRPYLSSEEDRKKGKKFARYQLGDLLNHLEKKHGEDWGKVYDEAWERIDKKVEGLSKHIKLEEERRSEDAQSKAALTDWLRAKASFVIEGLKEADKDEFCRCELKLQKWYGDLRGKPFAIEAENSILDISGFSKQYNCAFIWQKDGVKKLNLYLIINYFKGGKLRFKKIKPEAFEANRFYTVINKKSGEIVPMEVNFNFDDPNLIILPLAFGKRQGREFIWNDLLSLETGSLKLANGRVIEKTLYNRRTRQDEPALFVALTFERREVLDSSNIKPMNLIGVDRGENIPAVIALTDPEGCPLSRFKDSLGNPTHILRIGESYKEKQRTIQAKKEVEQRRAGGYSRKYASKAKNLADDMVRNTARDLLYYAVTQDAMLIFENLSRGFGRQGKRTFMAERQYTRMEDWLTAKLAYEGLPSKTYLSKTLAQYTSKTCSNCGFTITSADYDRVLEKLKKTATGWMTTINGKELKVEGQITYYNRYKRQNVVKDLSVELDRLSEESVNNDISSWTKGRSGEALSLLKKRFSHRPVQEKFVCLNCGFETHADEQAALNIARSWLFLRSQEYKKYQTNKTTGNTDKRAFVETWQSFYRKKLKEVWKPAV

SEQ ID NO: 48603 - protein, 979 aa, synthetic construct
  REGION 1..979: note = engineered CasX variant
QEIKRINKIRRRLVKDSNTKKAGKTRGPMKTLLVRVMTPDLRERLENLRKKPENIPQPISNTSRANLNKLLTDYTEMKKAILHVYWEEFQKDPVGLMSRVAQPASKKIDQNKLKPEMDEKGNLTTAGFACSQCGQPLFVYKLEQVSEKGKAYTNYFGRCNVAEHEKLILLAQLKPEKDSDEAVTYSLGKFGQRALDFYSIHVTKESTHPVKPLAQIAGNRYASGPVGKALRDACMGTIASFLSKYQDIIIEHQKVVKGNQKRLESLRELAGKENLEYPSVTLPPQPHTKEGVDAYNEVIARVRMWVNLNLWQKLKLSRDDAKPLLRLKGFPSFPLVERQANEVDWWDMVCNVKKLINEKKEDGKVFWQNLAGYKRQEALRPYLSSEEDRKKGKKFARYQLGDLLWHLEKKHGEDWGKVYDEAWERIDKKVEGLSKHIKLEEERRSEDAQSKAALTDWLRAKASFVIEGLKEADKDEFCRCELKLQKWYGDLRGKPFAIEAENSILDISGFSKQYNCAFIWQKDGVKKLNLYLIINYFKGGKLRFKKIKPEAFEANRFYTVINKKSGEIVPMEVNFNFDDPNLIILPLAFGKRQGREFIWNDLLSLETGSLKLANGRVIEKTLYNRRTRQDEPALFVALTFERREVLDSSNIKPMNLIGVDRGENIPAVIALTDPEGCPLSRFKDSLGNPTHILRIGESYKEKQRTIQAKKEVEQRRAGGYSRKYASKAKNLADDMVRNTARDLLYYAVTQDAMLIFENLSRGFGRQGKRTFMAERQYTRMEDWLTAKLAYEGLPSKTYLSKTLAQYTSKTCSNCGFTITSADYDRVLEKLKKTATGWMTTINGKELKVEGQITYYNRYKRQNVVKDLSVELDRLSEESVNNDISSWTKGRSGEALSLLKKRFSHRPVQEKFVCLNCGFETHADEQAALNIARSWLFLRSQEYKKYQTNKTTGNTDKRAFVETWQSFYRKKLKEVWKPAV

SEQ ID NO: 48604 - protein, 979 aa, synthetic construct
  REGION 1..979: note = engineered CasX variant
QEIKRINKIRRRLVKDSNTKKAGKTRGPMKTLLVRVMTPDLRERLENLRKKPENIPQPISNTSRANLNKLLTDYTEMKKAILHVYWEEFQKDPVGLMSRVAQPASKKIDQNKLKPEMDEKGNLTTAGFACSQCGQPLFVYKLEQVSEKGKAYTNYFGRCNVAEHEKLILLAQLKPEKDSDEAVTYSLGKFGQRALDFYSIHVTKESTHPVKPLAQIAGNRYASGPVGKALRDACMGTIASFLSKYQDIIIEHQKVVKGNQKRLESLRELAGKENLEYPSVTLPPQPHTKEGVDAYNEVIARVRMWVNLNLWQKLKLSRDDAKPLLRLKGFPSFPLVERQANEVDWWDMVCNVKKLINEKKEDGKVFWQNLAGYKRQEALRPYLSSEEDRKKGKKFARYQLGDLLLHLYKKHGEDWGKVYDEAWERIDKKVEGLSKHIKLEEERRSEDAQSKAALTDWLRAKASFVIEGLKEADKDEFCRCELKLQKWYGDLRGKPFAIEAENSILDISGFSKQYNCAFIWQKDGVKKLNLYLIINYFKGGKLRFKKIKPEAFEANRFYTVINKKSGEIVPMEVNFNFDDPNLIILPLAFGKRQGREFIWNDLLSLETGSLKLANGRVIEKTLYNRRTRQDEPALFVALTFERREVLDSSNIKPMNLIGVDRGENIPAVIALTDPEGCPLSRFKDSLGNPTHILRIGESYKEKQRTIQAKKEVEQRRAGGYSRKYASKAKNLADDMVRNTARDLLYYAVTQDAMLIFENLSRGFGRQGKRTFMAERQYTRMEDWLTAKLAYEGLPSKTYLSKTLAQYTSKTCSNCGFTITSADYDRVLEKLKKTATGWMTTINGKELKVEGQITYYNRYKRQNVVKDLSVELDRLSEESVNNDISSWTKGRSGEALSLLKKRFSHRPVQEKFVCLNCGFETHADEQAALNIARSWLFLRSQEYKKYQTNKTTGNTDKRAFVETWQSFYRKKLKEVWKPAV

SEQ ID NO: 48605 - protein, 979 aa, synthetic construct
  REGION 1..979: note = engineered CasX variant
QEIKRINKIRRRLVKDSNTKKAGKTRGPMKTLLVRVMTPDLRERLENLRKKPENIPQPISNTSRANLNKLLTDYTEMKKAILHVYWEEFQKDPVGLMSRVAQPASKKIDQNKLKPEMDEKGNLTTAGFACSQCGQPLFVYKLEQVSEKGKAYTNYFGRCNVAEHEKLILLAQLKPEKDSDEAVTYSLGKFGQRALDFYSIHVTKESTHPVKPLAQIAGNRYASGPVGKALRDACMGTIASFLSKYQDIIIEHQKVVKGNQKRLESLRELAGKENLEYPSVTLPPQPHTKEGVDAYNEVIARVRMWVNLNLWQKLKLSRDDAKPLLRLKGFPSFPLVERQANEVDWWDMVCNVKKLINEKKEDGKVFWQNLAGYKRQEALRPYLSSEEDRKKGKKFARYQLGDLLLHLEKKHPEDWGKVYDEAWERIDKKVEGLSKHIKLEEERRSEDAQSKAALTDWLRAKASFVIEGLKEADKDEFCRCELKLQKWYGDLRGKPFAIEAENSILDISGFSKQYNCAFIWQKDGVKKLNLYLIINYFKGGKLRFKKIKPEAFEANRFYTVINKKSGEIVPMEVNFNFDDPNLIILPLAFGKRQGREFIWNDLLSLETGSLKLANGRVIEKTLYNRRTRQDEPALFVALTFERREVLDSSNIKPMNLIGVDRGENIPAVIALTDPEGCPLSRFKDSLGNPTHILRIGESYKEKQRTIQAKKEVEQRRAGGYSRKYASKAKNLADDMVRNTARDLLYYAVTQDAMLIFENLSRGFGRQGKRTFMAERQYTRMEDWLTAKLAYEGLPSKTYLSKTLAQYTSKTCSNCGFTITSADYDRVLEKLKKTATGWMTTINGKELKVEGQITYYNRYKRQNVVKDLSVELDRLSEESVNNDISSWTKGRSGEALSLLKKRFSHRPVQEKFVCLNCGFETHADEQAALNIARSWLFLRSQEYKKYQTNKTTGNTDKRAFVETWQSFYRKKLKEVWKPAV

SEQ ID NO: 48606 - protein, 980 aa, synthetic construct
  REGION 1..980: note = engineered CasX variant
QEIKRINKIRRRLVKDSNTKKAGKTRGPMKTLLVRVMTPDLRERLENLRKKPENIPQPISNTSRANLNKLLTDYTEMKKAILHVYWEEFQKDPVGLMSRVAQPASKKIDQNKLKPEMDEKGNLTTAGFACSQCGQPLFVYKLEQVSEKGKAYTNYFGRCNVAEHEKLILLAQLKPEKDSDEAVTYSLGKFGQRALDFYSIHVTKESTHPVKPLAQIAGNRYASGPVGKALRDACMGTIASFLSKYQDIIIEHQKVVKGNQKRLESLRELAGKENLEYPSVTLPPQPHTKEGVDAYNEVIARVRMWVNLNLWQKLKLSRDDAKPLLRLKGFPSFPLVERQANEVDWWDMVCNVKKLINEKKEDGKVFWQNLAGYKRQEALRPYLSSEEDRKKGKKFARYQLGDLLLHLEKKHGERDWGKVYDEAWERIDKKVEGLSKHIKLEEERRSEDAQSKAALTDWLRAKASFVIEGLKEADKDEFCRCELKLQKWYGDLRGKPFAIEAENSILDISGFSKQYNCAFIWQKDGVKKLNLYLIINYFKGGKLRFKKIKPEAFEANRFYTVINKKSGEIVPMEVNFNFDDPNLIILPLAFGKRQGREFIWNDLLSLETGSLKLANGRVIEKTLYNRRTRQDEPALFVALTFERREVLDSSNIKPMNLIGVDRGENIPAVIALTDPEGCPLSRFKDSLGNPTHILRIGESYKEKQRTIQAKKEVEQRRAGGYSRKYASKAKNLADDMVRNTARDLLYYAVTQDAMLIFENLSRGFGRQGKRTFMAERQYTRMEDWLTAKLAYEGLPSKTYLSKTLAQYTSKTCSNCGFTITSADYDRVLEKLKKTATGWMTTINGKELKVEGQITYYNRYKRQNVVKDLSVELDRLSEESVNNDISSWTKGRSGEALSLLKKRFSHRPVQEKFVCLNCGFETHADEQAALNIARSWLFLRSQEYKKYQTNKTTGNTDKRAFVETWQSFYRKKLKEVWKPAV

SEQ ID NO: 48607 - protein, 980 aa, synthetic construct
  REGION 1..980: note = engineered CasX variant
QEIKRINKIRRRLVKDSNTKKAGKTRGPMKTLLVRVMTPDLRERLENLRKKPENIPQPISNTSRANLNKLLTDYTEMKKAILHVYWEEFQKDPVGLMSRVAQPASKKIDQNKLKPEMDEKGNLTTAGFACSQCGQPLFVYKLEQVSEKGKAYTNYFGRCNVAEHEKLILLAQLKPEKDSDEAVTYSLGKFGQRALDFYSIHVTKESTHPVKPLAQIAGNRYASGPVGKALRDACMGTIASFLSKYQDIIIEHQKVVKGNQKRLESLRELAGKENLEYPSVTLPPQPHTKEGVDAYNEVIARVRMWVNLNLWQKLKLSRDDAKPLLRLKGFPSFPLVERQANEVDWWDMVCNVKKLINEKKEDGKVFWQNLAGYKRQEALRPYLSSEEDRKKGKKFARYQLGDLLLHLEKKHGEYDWGKVYDEAWERIDKKVEGLSKHIKLEEERRSEDAQSKAALTDWLRAKASFVIEGLKEADKDEFCRCELKLQKWYGDLRGKPFAIEAENSILDISGFSKQYNCAFIWQKDGVKKLNLYLIINYFKGGKLRFKKIKPEAFEANRFYTVINKKSGEIVPMEVNFNFDDPNLIILPLAFGKRQGREFIWNDLLSLETGSLKLANGRVIEKTLYNRRTRQDEPALFVALTFERREVLDSSNIKPMNLIGVDRGENIPAVIALTDPEGCPLSRFKDSLGNPTHILRIGESYKEKQRTIQAKKEVEQRRAGGYSRKYASKAKNLADDMVRNTARDLLYYAVTQDAMLIFENLSRGFGRQGKRTFMAERQYTRMEDWLTAKLAYEGLPSKTYLSKTLAQYTSKTCSNCGFTITSADYDRVLEKLKKTATGWMTTINGKELKVEGQITYYNRYKRQNVVKDLSVELDRLSEESVNNDISSWTKGRSGEALSLLKKRFSHRPVQEKFVCLNCGFETHADEQAALNIARSWLFLRSQEYKKYQTNKTTGNTDKRAFVETWQSFYRKKLKEVWKPAV

SEQ ID NO: 48608 - protein, 979 aa, synthetic construct
  REGION 1..979: note = engineered CasX variant
QEIKRINKIRRRLVKDSNTKKAGKTRGPMKTLLVRVMTPDLRERLENLRKKPENIPQPISNTSRANLNKLLTDYTEMKKAILHVYWEEFQKDPVGLMSRVAQPASKKIDQNKLKPEMDEKGNLTTAGFACSQCGQPLFVYKLEQVSEKGKAYTNYFGRCNVAEHEKLILLAQLKPEKDSDEAVTYSLGKFGQRALDFYSIHVTKESTHPVKPLAQIAGNRYASGPVGKALRDACMGTIASFLSKYQDIIIEHQKVVKGNQKRLESLRELAGKENLEYPSVTLPPQPHTKEGVDAYNEVIARVRMWVNLNLWQKLKLSRDDAKPLLRLKGFPSFPLVERQANEVDWWDMVCNVKKLINEKKEDGKVFWQNLAGYKRQEALRPYLSSEEDRKKGKKFARYQLGDLLLHLEKKHGEDWGDVYDEAWERIDKKVEGLSKHIKLEEERRSEDAQSKAALTDWLRAKASFVIEGLKEADKDEFCRCELKLQKWYGDLRGKPFAIEAENSILDISGFSKQYNCAFIWQKDGVKKLNLYLIINYFKGGKLRFKKIKPEAFEANRFYTVINKKSGEIVPMEVNFNFDDPNLIILPLAFGKRQGREFIWNDLLSLETGSLKLANGRVIEKTLYNRRTRQDEPALFVALTFERREVLDSSNIKPMNLIGVDRGENIPAVIALTDPEGCPLSRFKDSLGNPTHILRIGESYKEKQRTIQAKKEVEQRRAGGYSRKYASKAKNLADDMVRNTARDLLYYAVTQDAMLIFENLSRGFGRQGKRTFMAERQYTRMEDWLTAKLAYEGLPSKTYLSKTLAQYTSKTCSNCGFTITSADYDRVLEKLKKTATGWMTTINGKELKVEGQITYYNRYKRQNVVKDLSVELDRLSEESVNNDISSWTKGRSGEALSLLKKRFSHRPVQEKFVCLNCGFETHADEQAALNIARSWLFLRSQEYKKYQTNKTTGNTDKRAFVETWQSFYRKKLKEVWKPAV

SEQ ID NO: 48609 - protein, 979 aa, synthetic construct
  REGION 1..979: note = engineered CasX variant
QEIKRINKIRRRLVKDSNTKKAGKTRGPMKTLLVRVMTPDLRERLENLRKKPENIPQPISNTSRANLNKLLTDYTEMKKAILHVYWEEFQKDPVGLMSRVAQPASKKIDQNKLKPEMDEKGNLTTAGFACSQCGQPLFVYKLEQVSEKGKAYTNYFGRCNVAEHEKLILLAQLKPEKDSDEAVTYSLGKFGQRALDFYSIHVTKESTHPVKPLAQIAGNRYASGPVGKALRDACMGTIASFLSKYQDIIIEHQKVVKGNQKRLESLRELAGKENLEYPSVTLPPQPHTKEGVDAYNEVIARVRMWVNLNLWQKLKLSRDDAKPLLRLKGFPSFPLVERQANEVDWWDMVCNVKKLINEKKEDGKVFWQNLAGYKRQEALRPYLSSEEDRKKGKKFARYQLGDLLLHLEKKHGEDWGKVYGEAWERIDKKVEGLSKHIKLEEERRSEDAQSKAALTDWLRAKASFVIEGLKEADKDEFCRCELKLQKWYGDLRGKPFAIEAENSILDISGFSKQYNCAFIWQKDGVKKLNLYLIINYFKGGKLRFKKIKPEAFEANRFYTVINKKSGEIVPMEVNFNFDDPNLIILPLAFGKRQGREFIWNDLLSLETGSLKLANGRVIEKTLYNRRTRQDEPALFVALTFERREVLDSSNIKPMNLIGVDRGENIPAVIALTDPEGCPLSRFKDSLGNPTHILRIGESYKEKQRTIQAKKEVEQRRAGGYSRKYASKAKNLADDMVRNTARDLLYYAVTQDAMLIFENLSRGFGRQGKRTFMAERQYTRMEDWLTAKLAYEGLPSKTYLSKTLAQYTSKTCSNCGFTITSADYDRVLEKLKKTATGWMTTINGKELKVEGQITYYNRYKRQNVVKDLSVELDRLSEESVNNDISSWTKGRSGEALSLLKKRFSHRPVQEKFVCLNCGFETHADEQAALNIARSWLFLRSQEYKKYQTNKTTGNTDKRAFVETWQSFYRKKLKEVWKPAV

SEQ ID NO: 48610 - protein, 979 aa, synthetic construct
  REGION 1..979: note = engineered CasX variant
QEIKRINKIRRRLVKDSNTKKAGKTRGPMKTLLVRVMTPDLRERLENLRKKPENIPQPISNTSRANLNKLLTDYTEMKKAILHVYWEEFQKDPVGLMSRVAQPASKKIDQNKLKPEMDEKGNLTTAGFACSQCGQPLFVYKLEQVSEKGKAYTNYFGRCNVAEHEKLILLAQLKPEKDSDEAVTYSLGKFGQRALDFYSIHVTKESTHPVKPLAQIAGNRYASGPVGKALRDACMGTIASFLSKYQDIIIEHQKVVKGNQKRLESLRELAGKENLEYPSVTLPPQPHTKEGVDAYNEVIARVRMWVNLNLWQKLKLSRDDAKPLLRLKGFPSFPLVERQANEVDWWDMVCNVKKLINEKKEDGKVFWQNLAGYKRQEALRPYLSSEEDRKKGKKFARYQLGDLLLHLEKKHGEDWGKVYDEAWERIDKKVEGLSKHIKLEEERRSEDAQSKAALTDWLRAKASFVIEGKKEADKDEFCRCELKLQKWYGDLRGKPFAIEAENSILDISGFSKQYNCAFIWQKDGVKKLNLYLIINYFKGGKLRFKKIKPEAFEANRFYTVINKKSGEIVPMEVNFNFDDPNLIILPLAFGKRQGREFIWNDLLSLETGSLKLANGRVIEKTLYNRRTRQDEPALFVALTFERREVLDSSNIKPMNLIGVDRGENIPAVIALTDPEGCPLSRFKDSLGNPTHILRIGESYKEKQRTIQAKKEVEQRRAGGYSRKYASKAKNLADDMVRNTARDLLYYAVTQDAMLIFENLSRGFGRQGKRTFMAERQYTRMEDWLTAKLAYEGLPSKTYLSKTLAQYTSKTCSNCGFTITSADYDRVLEKLKKTATGWMTTINGKELKVEGQITYYNRYKRQNVVKDLSVELDRLSEESVNNDISSWTKGRSGEALSLLKKRFSHRPVQEKFVCLNCGFETHADEQAALNIARSWLFLRSQEYKKYQTNKTTGNTDKRAFVETWQSFYRKKLKEVWKPAV

SEQ ID NO: 48611 - protein, 979 aa, synthetic construct
  REGION 1..979: note = engineered CasX variant
QEIKRINKIRRRLVKDSNTKKAGKTRGPMKTLLVRVMTPDLRERLENLRKKPENIPQPISNTSRANLNKLLTDYTEMKKAILHVYWEEFQKDPVGLMSRVAQPASKKIDQNKLKPEMDEKGNLTTAGFACSQCGQPLFVYKLEQVSEKGKAYTNYFGRCNVAEHEKLILLAQLKPEKDSDEAVTYSLGKFGQRALDFYSIHVTKESTHPVKPLAQIAGNRYASGPVGKALRDACMGTIASFLSKYQDIIIEHQKVVKGNQKRLESLRELAGKENLEYPSVTLPPQPHTKEGVDAYNEVIARVRMWVNLNLWQKLKLSRDDAKPLLRLKGFPSFPLVERQANEVDWWDMVCNVKKLINEKKEDGKVFWQNLAGYKRQEALRPYLSSEEDRKKGKKFARYQLGDLLLHLEKKHGEDWGKVYDEAWERIDKKVEGLSKHIKLEEERRSEDAQSKAALTDWLRAKASFVIEGSKEADKDEFCRCELKLQKWYGDLRGKPFAIEAENSILDISGFSKQYNCAFIWQKDGVKKLNLYLIINYFKGGKLRFKKIKPEAFEANRFYTVINKKSGEIVPMEVNFNFDDPNLIILPLAFGKRQGREFIWNDLLSLETGSLKLANGRVIEKTLYNRRTRQDEPALFVALTFERREVLDSSNIKPMNLIGVDRGENIPAVIALTDPEGCPLSRFKDSLGNPTHILRIGESYKEKQRTIQAKKEVEQRRAGGYSRKYASKAKNLADDMVRNTARDLLYYAVTQDAMLIFENLSRGFGRQGKRTFMAERQYTRMEDWLTAKLAYEGLPSKTYLSKTLAQYTSKTCSNCGFTITSADYDRVLEKLKKTATGWMTTINGKELKVEGQITYYNRYKRQNVVKDLSVELDRLSEESVNNDISSWTKGRSGEALSLLKKRFSHRPVQEKFVCLNCGFETHADEQAALNIARSWLFLRSQEYKKYQTNKTTGNTDKRAFVETWQSFYRKKLKEVWKPAV

SEQ ID NO: 48612 - protein, 980 aa, synthetic construct
  REGION 1..980: note = engineered CasX variant
QEIKRINKIRRRLVKDSNTKKAGKTRGPMKTLLVRVMTPDLRERLENLRKKPENIPQPISNTSRANLNKLLTDYTEMKKAILHVYWEEFQKDPVGLMSRVAQPASKKIDQNKLKPEMDEKGNLTTAGFACSQCGQPLFVYKLEQVSEKGKAYTNYFGRCNVAEHEKLILLAQLKPEKDSDEAVTYSLGKFGQRALDFYSIHVTKESTHPVKPLAQIAGNRYASGPVGKALRDACMGTIASFLSKYQDIIIEHQKVVKGNQKRLESLRELAGKENLEYPSVTLPPQPHTKEGVDAYNEVIARVRMWVNLNLWQKLKLSRDDAKPLLRLKGFPSFPLVERQANEVDWWDMVCNVKKLINEKKEDGKVFWQNLAGYKRQEALRPYLSSEEDRKKGKKFARYQLGDLLLHLEKKHGEDWGKVYDEAWERIDKKVEGLSKHIKLEEERRSEDAQSKAALTDWLRAKASFVIEGLKEADDKDEFCRCELKLQKWYGDLRGKPFAIEAENSILDISGFSKQYNCAFIWQKDGVKKLNLYLIINYFKGGKLRFKKIKPEAFEANRFYTVINKKSGEIVPMEVNFNFDDPNLIILPLAFGKRQGREFIWNDLLSLETGSLKLANGRVIEKTLYNRRTRQDEPALFVALTFERREVLDSSNIKPMNLIGVDRGENIPAVIALTDPEGCPLSRFKDSLGNPTHILRIGESYKEKQRTIQAKKEVEQRRAGGYSRKYASKAKNLADDMVRNTARDLLYYAVTQDAMLIFENLSRGFGRQGKRTFMAERQYTRMEDWLTAKLAYEGLPSKTYLSKTLAQYTSKTCSNCGFTITSADYDRVLEKLKKTATGWMTTINGKELKVEGQITYYNRYKRQNVVKDLSVELDRLSEESVNNDISSWTKGRSGEALSLLKKRFSHRPVQEKFVCLNCGFETHADEQAALNIARSWLFLRSQEYKKYQTNKTTGNTDKRAFVETWQSFYRKKLKEVWKPAV

SEQ ID NO: 48613 - protein, 980 aa, synthetic construct
  REGION 1..980: note = engineered CasX variant
QEIKRINKIRRRLVKDSNTKKAGKTRGPMKTLLVRVMTPDLRERLENLRKKPENIPQPISNTSRANLNKLLTDYTEMKKAILHVYWEEFQKDPVGLMSRVAQPASKKIDQNKLKPEMDEKGNLTTAGFACSQCGQPLFVYKLEQVSEKGKAYTNYFGRCNVAEHEKLILLAQLKPEKDSDEAVTYSLGKFGQRALDFYSIHVTKESTHPVKPLAQIAGNRYASGPVGKALRDACMGTIASFLSKYQDIIIEHQKVVKGNQKRLESLRELAGKENLEYPSVTLPPQPHTKEGVDAYNEVIARVRMWVNLNLWQKLKLSRDDAKPLLRLKGFPSFPLVERQANEVDWWDMVCNVKKLINEKKEDGKVFWQNLAGYKRQEALRPYLSSEEDRKKGKKFARYQLGDLLLHLEKKHGEDWGKVYDEAWERIDKKVEGLSKHIKLEEERRSEDAQSKAALTDWLRAKASFVIEGLKEADKDEFCRCELKLQKWYGDLRGKPFAIEAENSILDISGFSKQYNCAFIWQKDGVKKLNLYLIINYFKGGKLRFKKIKPEAFEANRFYTVINKKSGEIVPMEVNFNFDDPNLIILPLAFGKRQGREFIWNDLLSLETGSLKLANGRVIEKTLYNRRTRQDEPALFVALTFERREVLDSSNIKPMNLIGVDRGENIPAVIALTDPEGCPLSRFKDSLGNPTHILRIGESYKEKQRTIQAKKEVEQRRAGGYSRKYASKAKNLADDMVRNTARDLLYYAVTQDAMLIFENLSRGFGRQGKRTFMAERQYTRMEDWLTAKLAYEGLPSKTYLSKTLAQYTSKTCSNCGFTITSADYDRVLEKLKKTATGWMTTINGKELKVEGQITYYNRYKRQNVVKDLSVELDRLSEESVNNDISSWTKGRSGNEALSLLKKRFSHRPVQEKFVCLNCGFETHADEQAALNIARSWLFLRSQEYKKYQTNKTTGNTDKRAFVETWQSFYRKKLKEVWKPAV

SEQ ID NO: 48614 - protein, 979 aa, synthetic construct
  REGION 1..979: note = engineered CasX variant
QEIKRINKIRRRLVKDSNTKKAGKTRGPMKTLLVRVMTPDLRERLENLRKKPENIPQPISNTSRANLNKLLTDYTEMKKAILHVYWEEFQKDPVGLMSRVAQPASKKIDQNKLKPEMDEKGNLTTAGFACSQCGQPLFVYKLEQVSEKGKAYTNYFGRCNVAEHEKLILLAQLKPEKDSDEAVTYSLGKFGQRALDFYSIHVTKESTHPVKPLAQIAGNRYASGPVGKALRDACMGTIASFLSKYQDIIIEHQKVVKGNQKRLESLRELAGKENLEYPSVTLPPQPHTKEGVDAYNEVIARVRMWVNLNLWQKLKLSRDDAKPLLRLKGFPSFPLVERQANEVDWWDMVCNVKKLINEKKEDGKVFWQNLAGYKRQEALRPYLSSEEDRQKGKKFARYQLGDLLLHLEKKHGEDWGKVYDEAWERIDKKVEGLSKHIKLEEERRSEDAQSKAALTDWLRAKASFVIEGLKEADKDEFCRCELKLQKWYGDLRGKPFAIEAENSILDISGFSKQYNCAFIWQKDGVKKLNLYLIINYFKGGKLRFKKIKPEAFEANRFYTVINKKSGEIVPMEVNFNFDDPNLIILPLAFGKRQGREFIWNDLLSLETGSLKLANGRVIEKTLYNRRTRQDEPALFVALTFERREVLDSSNIKPMNLIGVDRGENIPAVIALTDPEGCPLSRFKDSLGNPTHILRIGESYKEKQRTIQAKKEVEQRRAGGYSRKYASKAKNLADDMVRNTARDLLYYAVTQDAMLIFENLSRGFGRQGKRTFMAERQYTRMEDWLTAKLAYEGLPSKTYLSKTLAQYTSKTCSNCGFTITSADYDRVLEKLKKTATGWMTTINGKELKVEGQITYYNRYKRQNVVKDLSVELDRLSEESVNNDISSWTKGRSGEALSLLKKRFSHRPVQEKFVCLNCGFETHADEQAALNIARSWLFLRSQEYKKYQTNKTTGNTDKRAFVETWQSFYRKKLKEVWKPAV

SEQ ID NO: 48615 - protein, 979 aa, synthetic construct
  REGION 1..979: note = engineered CasX variant
QEIKRINKIRRRLVKDSNTKKAGKTRGPMKTLLVRVMTPDLRERLENLRKKPENIPQPISNTSRANLNKLLTDYTEMKKAILHVYWEEFQKDPVGLMSRVAQPASKKIDQNKLKPEMDEKGNLTTAGFACSQCGQPLFVYKLEQVSEKGKAYTNYFGRCNVAEHEKLILLAQLKPEKDSDEAVTYSLGKFGQRALDFYSIHVTKESTHPVKPLAQIAGNRYASGPVGKALRDACMGTIASFLSKYQDIIIEHQKVVKGNQKRLESLRELAGKENLEYPSVTLPPQPHTKEGVDAYNEVIARVRMWVNLNLWQKLKLSRDDAKPLLRLKGFPSFPLVERQANEVDWWDMVCNVKKLINEKKEDGKVFWQNLAGYKRQEALRPYLSSEEDRKKGKKFARYQLGDLLLHLEKKHGEDWGKVYDEAWERIDKKVEGLSKHIKLEEERRSEDAQSKAALTDWLRAKASFVIEGLKEADKDEFCRCELKLQKWYGDLRGKPFAIEAENSILDISGFSKQYNCAFIWQKDGVKKLNLYLIINYFKGGKLRFKKIKPEAFEANRFYTVINKKSGEIVPMEVNFNFDDPNLIILPLAFGKRQGREFIWNDLLSLETGSLKLANGRVIEKTLYNRRTRQDEPALFVALTFERREVLDSSNIKPMNLIGVDRGENIPAVIALTDPEGCPLSRFKDSLGNPTHILRIGESYKEKQRTIQAKKEVEQRRAGGYSRKYASKAKNLADDMVRNTARDLLYYAVTQDAMLIFENLSRGFGRQGKRTFMAERQYTRMEDWLTAKLAYEGLPSQTYLSKTLAQYTSKTCSNCGFTITSADYDRVLEKLKKTATGWMTTINGKELKVEGQITYYNRYKRQNVVKDLSVELDRLSEESVNNDISSWTKGRSGEALSLLKKRFSHRPVQEKFVCLNCGFETHADEQAALNIARSWLFLRSQEYKKYQTNKTTGNTDKRAFVETWQSFYRKKLKEVWKPAV

SEQ ID NO: 48616 - protein, 979 aa, synthetic construct
  REGION 1..979: note = engineered CasX variant
QEIKRINKIRRRLVKDSNTKKAGKTRGPMKTLLVRVMTPDLRERLENLRKKPENIPQPISNTSRANLNKLLTDYTEMKKAILHVYWEEFQKDPVGLMSRVAQPASKKIDQNKLKPEMDEKGNLTTAGFACSQCGQPLFVYKLEQVSEKGKAYTNYFGRCNVAEHEKLILLAQLKPEKDSDEAVTYSLGKFGQRALDFYSIHVTKESTHPVKPLAQIAGNRYASGPVGKALRDACMGTIASFLSKYQDIIIEHQKVVKGNQKRLESLRELAGKENLEYPSVTLPPQPHTKEGVDAYNEVIARVRMWVNLNLWQKLKLSRDDAKPLLRLKGFPSFPLVERQANEVDWWDMVCNVKKLINEKKEDGKVFWQNLAGYKRQEALRPYLSSEEDRKKGKKFARYQLGDLLLHLEKKHGEDWGKVYDEAWERIDKKVEGLSKHIKLEEERRSEDAQSKAALTDWLRAKASFVIEGLKEADKDEFCRCELKLQKWYGDLRGKPFAIEAENSILDISGFSKQYNCAFIWQKDGVKKLNLYLIINYFKGGKLRFKKIKPEAFEANRFYTVINKKSGEIVPMEVNFNFDDPNLIILPLAFGKRQGREFIWNDLLSLETGSLKLANGRVIEKTLYNRRTRQDEPALFVALTFERREVLDSSNIKPMNLIGVDRGENIPAVIALTDPEGCPLSRFKDSLGNPTHILRIGESYKEKQRTIQAKKEVEQRRAGGYSRKYASKAKNLADDMVRNTARDLLYYAVTQDAMLIFENLSRGFGRQGKRTFMAERQYTRMEDWLTAKLAYNGLPSKTYLSKTLAQYTSKTCSNCGFTITSADYDRVLEKLKKTATGWMTTINGKELKVEGQITYYNRYKRQNVVKDLSVELDRLSEESVNNDISSWTKGRSGEALSLLKKRFSHRPVQEKFVCLNCGFETHADEQAALNIARSWLFLRSQEYKKYQTNKTTGNTDKRAFVETWQSFYRKKLKEVWKPAV

SEQ ID NO: 48617 - protein, 979 aa, synthetic construct
  REGION 1..979: note = engineered CasX variant
QEIKRINKIRRRLVKDSNTKKAGKTRGPMKTLLVRVMTPDLRERLENLRKKPENIPQPISNTSRANLNKLLTDYTEMKKAILHVYWEEFQKDPVGLMSRVAQPASKKIDQNKLKPEMDEKGNLTTAGFACSQCGQPLFVYKLEQVSEKGKAYTNYFGRCNVAEHEKLIQLAQLKPEKDSDEAVTYSLGKFGQRALDFYSIHVTKESTHPVKPLAQIAGNRYASGPVGKALRDACMGTIASFLSKYQDIIIEHQKVVKGNQKRLESLRELAGKENLEYPSVTLPPQPHTKEGVDAYNEVIARVRMWVNLNLWQKLKLSRDDAKPLLRLKGFPSFPLVERQANEVDWWDMVCNVKKLINEKKEDGKVFWQNLAGYKRQEALRPYLSSEEDRKKGKKFARYQLGDLLLHLEKKHGEDWGKVYDEAWERIDKKVEGLSKHIKLEEERRSEDAQSKAALTDWLRAKASFVIEGLKEADKDEFCRCELKLQKWYGDLRGKPFAIEAENSILDISGFSKQYNCAFIWQKDGVKKLNLYLIINYFKGGKLRFKKIKPEAFEANRFYTVINKKSGEIVPMEVNFNFDDPNLIILPLAFGKRQGREFIWNDLLSLETGSLKLANGRVIEKTLYNRRTRQDEPALFVALTFERREVLDSSNIKPMNLIGVDRGENIPAVIALTDPEGCPLSRFKDSLGNPTHILRIGESYKEKQRTIQAKKEVEQRRAGGYSRKYASKAKNLADDMVRNTARDLLYYAVTQDAMLIFENLSRGFGRQGKRTFMAERQYTRMEDWLTAKLAYEGLPSKTYLSKTLAQYTSKTCSNCGFTITSADYDRVLEKLKKTATGWMTTINGKELKVEGQITYYNRYKRQNVVKDLSVELDRLSEESVNNDISSWTKGRSGEALSLLKKRFSHRPVQEKFVCLNCGFETHADEQAALNIARSWLFLRSQEYKKYQTNKTTGNTDKRAFVETWQSFYRKKLKEVWKPAV

SEQ ID NO: 48618 - protein, 979 aa, synthetic construct
  REGION 1..979: note = engineered CasX variant
QEIKRINKIRRRLVKDSNTKKAGKTRGPMKTLLVRVMTPDLRERLENLRKKPENIPQPISNTSRANLNKLLTDYTEMKKAILHVYWEEFQKDPVGLMSRVAQPASKKIDQNKLKPEMDEKGNLTTAGFACSQCGQPLFVYKLEQVSEKGKAYTNYFGRCNVAEHEKLILLAQLKPEKDSDEAVTYSLGKFGQRALDFYSIHVTKESTHPVKPLAQIAGNRYASGPVGKALRDACMGTIASFLSKYQDIIIEHQKVVKGNQKRLESLRELAGKENLEYPSVTLPPQPHTKEGVDAYNEVIARVRMWVNLNLWQKLKLSRDDAKPLLRLKGFPSFPLVERQANEVDWWDMVCNVKKLINEKKEDGKVFWQNLAIYKRQEALRPYLSSEEDRKKGKKFARYQLGDLLLHLEKKHGEDWGKVYDEAWERIDKKVEGLSKHIKLEEERRSEDAQSKAALTDWLRAKASFVIEGLKEADKDEFCRCELKLQKWYGDLRGKPFAIEAENSILDISGFSKQYNCAFIWQKDGVKKLNLYLIINYFKGGKLRFKKIKPEAFEANRFYTVINKKSGEIVPMEVNFNFDDPNLIILPLAFGKRQGREFIWNDLLSLETGSLKLANGRVIEKTLYNRRTRQDEPALFVALTFERREVLDSSNIKPMNLIGVDRGENIPAVIALTDPEGCPLSRFKDSLGNPTHILRIGESYKEKQRTIQAKKEVEQRRAGGYSRKYASKAKNLADDMVRNTARDLLYYAVTQDAMLIFENLSRGFGRQGKRTFMAERQYTRMEDWLTAKLAYEGLPSKTYLSKTLAQYTSKTCSNCGFTITSADYDRVLEKLKKTATGWMTTINGKELKVEGQITYYNRYKRQNVVKDLSVELDRLSEESVNNDISSWTKGRSGEALSLLKKRFSHRPVQEKFVCLNCGFETHADEQAALNIARSWLFLRSQEYKKYQTNKTTGNTDKRAFVETWQSFYRKKLKEVWKPAV

SEQ ID NO: 48619 - protein, 979 aa, synthetic construct
  REGION 1..979: note = engineered CasX variant
QEIKRINKIRRRLVKDSNTKKAGKTRGPMKTLLVRVMTPDLRERLENLRKKPENIPQPISNTSRANLNKLLTDYTEMKKAILHVYWEEFQKDPVGLMSRVAQPASKKIDQNKLKPEMDEKGNLTTAGFACSQCGQPLFVYKLEQVSEKGKAYTNYFGRCNVAEHEKLILLAQLKPEKDSDEAVTYSLGKFGQRALDFYSIHVTKESTHPVKPLAQIAGNRYASGPVGKALRDACMGTIASFLSKYQDIIIEHQKVVKGNQKRLESLRELAGKENLEYPSVTLPPQPHTKEGVDAYNEVIARVRMWVNLNLWQKLKLSRDDAKPLLRLKGFPSFPLVERQANEVDWWDMVCNVKKLINEKKEDGKVFWQNLAGYKRQEALRPYLSSEEDREKGKKFARYQLGDLLLHLEKKHGEDWGKVYDEAWERIDKKVEGLSKHIKLEEERRSEDAQSKAALTDWLRAKASFVIEGLKEADKDEFCRCELKLQKWYGDLRGKPFAIEAENSILDISGFSKQYNCAFIWQKDGVKKLNLYLIINYFKGGKLRFKKIKPEAFEANRFYTVINKKSGEIVPMEVNFNFDDPNLIILPLAFGKRQGREFIWNDLLSLETGSLKLANGRVIEKTLYNRRTRQDEPALFVALTFERREVLDSSNIKPMNLIGVDRGENIPAVIALTDPEGCPLSRFKDSLGNPTHILRIGESYKEKQRTIQAKKEVEQRRAGGYSRKYASKAKNLADDMVRNTARDLLYYAVTQDAMLIFENLSRGFGRQGKRTFMAERQYTRMEDWLTAKLAYEGLPSKTYLSKTLAQYTSKTCSNCGFTITSADYDRVLEKLKKTATGWMTTINGKELKVEGQITYYNRYKRQNVVKDLSVELDRLSEESVNNDISSWTKGRSGEALSLLKKRFSHRPVQEKFVCLNCGFETHADEQAALNIARSWLFLRSQEYKKYQTNKTTGNTDKRAFVETWQSFYRKKLKEVWKPAV

SEQ ID NO: 48620 - protein, 979 aa, synthetic construct
  REGION 1..979: note = engineered CasX variant
QEIKRINKIRRRLVKDSNTKKAGKTRGPMKTLLVRVMTPDLRERLENLRKKPENIPQPISNTSRANLNKLLTDYTEMKKAILHVYWEEFQKDPVGLMSRVAQPASKKIDQNKLKPEMDEKGNLTTAGFACSQCGQPLFVYKLEQVSEKGKAYTNYFGRCNVAEHEKLILLAQLKPEKDSDEAVTYSLGKFGQRALDFYSIHVTKESTHPVKPLAQIAGNRYASGPVGKALRDACMGTIASFLSKYQDIIIEHQKVVKGNQKRLESLRELAGKENLEYPSVTLPPQPHTKEGVDAYNEVIARVRMWVNLNLWQKLKLSRDDAKPLLRLKGFPSFPLVERQANEVDWWDMVCNVKKLINEKKEDGKVFWQNLAGYKRQEALRPYLSSEEDRKKGKKFARYQLGDLLLHLEKKHGEDWGKVYDEAWERIDKKVEGLSKHIKLEEERRSEDAQSKAALTDWLRAKASFVIEGLKEADKDEFCRCELKLQKWYGDLRGKPFAIEAENSILDISGFSKQYNCAFIWQKDGVKKLNLYLIINYFKGGKLRFKKIKPEAFEANRFYTVINKKSGEIVIMEVNFNFDDPNLIILPLAFGKRQGREFIWNDLLSLETGSLKLANGRVIEKTLYNRRTRQDEPALFVALTFERREVLDSSNIKPMNLIGVDRGENIPAVIALTDPEGCPLSRFKDSLGNPTHILRIGESYKEKQRTIQAKKEVEQRRAGGYSRKYASKAKNLADDMVRNTARDLLYYAVTQDAMLIFENLSRGFGRQGKRTFMAERQYTRMEDWLTAKLAYEGLPSKTYLSKTLAQYTSKTCSNCGFTITSADYDRVLEKLKKTATGWMTTINGKELKVEGQITYYNRYKRQNVVKDLSVELDRLSEESVNNDISSWTKGRSGEALSLLKKRFSHRPVQEKFVCLNCGFETHADEQAALNIARSWLFLRSQEYKKYQTNKTTGNTDKRAFVETWQSFYRKKLKEVWKPAV

SEQ ID NO: 48621 - protein, 978 aa, synthetic construct
  REGION 1..978: note = engineered CasX variant
QEIKRINKIRRRLVKDSNTKKAGKTGPMKTLLVRVMTPDLRERLENLRKKPENIPQPISNTSRANLNKLLTDYTEMKKAILHVYWEEFQKDPVGLMSRVAQPASKKIDQNKLKPEMDEKGNLTTAGFACSQCGQPLFVYKLEQVSEKGKAYTNYFGRCNVAEHEKLILLAQLKPEKDSDEAVTYSLGKFGQRALDFYSIHVTKESTHPVKPLAQIAGNRYASSPVGKALRGACMGTIASFLSKYQDIIIEHQKVVKGNQKRLESLRELAGKENLEYPSVTLPPQPHTKEGVDAYNEVIARVRMWVNLNLWQKLKLSRDDAKPLLRLKGFPSFPLVERQANEVDWWDMVCNVKKLINEKKEDGKVFWQNLAGYKRQEALRPYLSSEEDRKKGKKFARYQLGDLLLHLEKKHGEDWGKVYDEAWERIDKKVEGLSKHIKLEEERRSEDAQSKAALTDWLRAKASFVIEGLKEADKDEFCRCELKLQKWYGDLRGKPFAIEAENSILDISGFSKQYNCAFIWQKDGVKKLNLYLIINYFKGGKLRFKKIKPEAFEANRFYTVINKKSGEIVPMEVNFNFDDPNLIILPLAFGKRQGREFIWNDLLSLETGSLKLANGRVIEKTLYNRRTRQDEPALFVALTFERREVLDSSNIKPMNLIGVDRGENIPAVIALTDPEGCPLSRFKDSLGNPTHILRIGESYKEKQRTIQAKKEVEQRRAGGYSRKYASKAKNLADDMVRNTARDLLYYAVTQDAMLIFENLSRGFGRQGKRTFMAERQYTRMEDWLTAKLAYEGLPSKTYLSKTLAQYTSKTCSNCGFTITSADYDRVLEKLKKTATGWMTTINGKELKVEGQITYYNRYKRQNVVKDLSVELDRLSEESVNNDISSWTKGRSGEALSLLKKRFSHRPVQEKFVCLNCGFETHADEQAALNIARSWLFLRSQEYKKYQTNKTTGNTDKRAFVETWQSFYRKKLKEVWKPAV

SEQ ID NO: 48622 - protein, 978 aa, synthetic construct
  REGION 1..978: note = engineered CasX variant
QEIKRINKIRRRLVKDSNTKKAGKTGPMKTLLVRVMTPDLRERLENLRKKPENIPQPISNTSRANLNKLLTDYTEMKKAILHVYWEEFQKDPVGLMSRVAQPASKKIDQNKLKPEMDEKGNLTTAGFACSQCGQPLFVYKLEQVSEKGKAYTNYFGRCNVAEHEKLILLAQLKPEKDSDEAVTYSLGKFGQRALDFYSIHVTKESTHPVKPLAQIAGNRYASSPVGKALRDACMGTIASFLSKYQDIIIEHQKVVKGNQKRLESLRELAGKENLEYPSVTLPPQPHTKEGVDAYNEVIARVRMWVNLNLWQKLKLSRDDAKPLLRLKNFPSFPLVERQANEVDWWDMVCNVKKLINEKKEDGKVFWQNLAGYKRQEALRPYLSSEEDRKKGKKFARYQLGDLLLHLEKKHGEDWGKVYDEAWERIDKKVEGLSKHIKLEEERRSEDAQSKAALTDWLRAKASFVIEGLKEADKDEFCRCELKLQKWYGDLRGKPFAIEAENSILDISGFSKQYNCAFIWQKDGVKKLNLYLIINYFKGGKLRFKKIKPEAFEANRFYTVINKKSGEIVPMEVNFNFDDPNLIILPLAFGKRQGREFIWNDLLSLETGSLKLANGRVIEKTLYNRRTRQDEPALFVALTFERREVLDSSNIKPMNLIGVDRGENIPAVIALTDPEGCPLSRFKDSLGNPTHILRIGESYKEKQRTIQAKKEVEQRRAGGYSRKYASKAKNLADDMVRNTARDLLYYAVTQDAMLIFENLSRGFGRQGKRTFMAERQYTRMEDWLTAKLAYEGLPSKTYLSKTLAQYTSKTCSNCGFTITSADYDRVLEKLKKTATGWMTTINGKELKVEGQITYYNRYKRQNVVKDLSVELDRLSEESVNNDISSWTKGRSGEALSLLKKRFSHRPVQEKFVCLNCGFETHADEQAALNIARSWLFLRSQEYKKYQTNKTTGNTDKRAFVETWQSFYRKKLKEVWKPAV

SEQ ID NO: 48623 - protein, 978 aa, synthetic construct
  REGION 1..978: note = engineered CasX variant
QEIKRINKIRRRLVKDSNTKKAGKTGPMKTLLVRVMTPDLRERLENLRKKPENIPQPISNTSRANLNKLLTDYTEMKKAILHVYWEEFQKDPVGLMSRVAQPASKKIDQNKLKPEMDEKGNLTTAGFACSQCGQPLFVYKLEQVSEKGKAYTNYFGRCNVAEHEKLILLAQLKPEKDSDEAVTYSLGKFGQRALDFYSIHVTKESTHPVKPLAQIAGNRYASSPVGKALRDACMGTIASFLSKYQDIIIEHQKVVKGNQKRLESLRELAGKENLEYPSVTLPPQPHTKEGVDAYNEVIARVRMWVNLNLWQKLKLSRDDAKPLLRLKGFPSFPLVERQANEVDWWDMVCNVKKLINEKKEDGKVFWQNLAGYKRQEALRPYLSSEEDRKKGKKFARYQLGDLLNHLEKKHGEDWGKVYDEAWERIDKKVEGLSKHIKLEEERRSEDAQSKAALTDWLRAKASFVIEGLKEADKDEFCRCELKLQKWYGDLRGKPFAIEAENSILDISGFSKQYNCAFIWQKDGVKKLNLYLIINYFKGGKLRFKKIKPEAFEANRFYTVINKKSGEIVPMEVNFNFDDPNLIILPLAFGKRQGREFIWNDLLSLETGSLKLANGRVIEKTLYNRRTRQDEPALFVALTFERREVLDSSNIKPMNLIGVDRGENIPAVIALTDPEGCPLSRFKDSLGNPTHILRIGESYKEKQRTIQAKKEVEQRRAGGYSRKYASKAKNLADDMVRNTARDLLYYAVTQDAMLIFENLSRGFGRQGKRTFMAERQYTRMEDWLTAKLAYEGLPSKTYLSKTLAQYTSKTCSNCGFTITSADYDRVLEKLKKTATGWMTTINGKELKVEGQITYYNRYKRQNVVKDLSVELDRLSEESVNNDISSWTKGRSGEALSLLKKRFSHRPVQEKFVCLNCGFETHADEQAALNIARSWLFLRSQEYKKYQTNKTTGNTDKRAFVETWQSFYRKKLKEVWKPAV

SEQ ID NO: 48624 - protein, 978 aa, synthetic construct
  REGION 1..978: note = engineered CasX variant
QEIKRINKIRRRLVKDSNTKKAGKTGPMKTLLVRVMTPDLRERLENLRKKPENIPQPISNTSRANLNKLLTDYTEMKKAILHVYWEEFQKDPVGLMSRVAQPASKKIDQNKLKPEMDEKGNLTTAGFACSQCGQPLFVYKLEQVSEKGKAYTNYFGRCNVAEHEKLILLAQLKPEKDSDEAVTYSLGKFGQRALDFYSIHVTKESTHPVKPLAQIAGNRYASSPVGKALRDACMGTIASFLSKYQDIIIEHQKVVKGNQKRLESLRELAGKENLEYPSVTLPPQPHTKEGVDAYNEVIARVRMWVNLNLWQKLKLSRDDAKPLLRLKGFPSFPLVERQANEVDWWDMVCNVKKLINEKKEDGKVFWQNLAGYKRQEALRPYLSSEEDRKKGKKFARYQLGDLLWHLEKKHGEDWGKVYDEAWERIDKKVEGLSKHIKLEEERRSEDAQSKAALTDWLRAKASFVIEGLKEADKDEFCRCELKLQKWYGDLRGKPFAIEAENSILDISGFSKQYNCAFIWQKDGVKKLNLYLIINYFKGGKLRFKKIKPEAFEANRFYTVINKKSGEIVPMEVNFNFDDPNLIILPLAFGKRQGREFIWNDLLSLETGSLKLANGRVIEKTLYNRRTRQDEPALFVALTFERREVLDSSNIKPMNLIGVDRGENIPAVIALTDPEGCPLSRFKDSLGNPTHILRIGESYKEKQRTIQAKKEVEQRRAGGYSRKYASKAKNLADDMVRNTARDLLYYAVTQDAMLIFENLSRGFGRQGKRTFMAERQYTRMEDWLTAKLAYEGLPSKTYLSKTLAQYTSKTCSNCGFTITSADYDRVLEKLKKTATGWMTTINGKELKVEGQITYYNRYKRQNVVKDLSVELDRLSEESVNNDISSWTKGRSGEALSLLKKRFSHRPVQEKFVCLNCGFETHADEQAALNIARSWLFLRSQEYKKYQTNKTTGNTDKRAFVETWQSFYRKKLKEVWKPAV

SEQ ID NO: 48625 - protein, 978 aa, synthetic construct
  REGION 1..978: note = engineered CasX variant
QEIKRINKIRRRLVKDSNTKKAGKTGPMKTLLVRVMTPDLRERLENLRKKPENIPQPISNTSRANLNKLLTDYTEMKKAILHVYWEEFQKDPVGLMSRVAQPASKKIDQNKLKPEMDEKGNLTTAGFACSQCGQPLFVYKLEQVSEKGKAYTNYFGRCNVAEHEKLILLAQLKPEKDSDEAVTYSLGKFGQRALDFYSIHVTKESTHPVKPLAQIAGNRYASSPVGKALRDACMGTIASFLSKYQDIIIEHQKVVKGNQKRLESLRELAGKENLEYPSVTLPPQPHTKEGVDAYNEVIARVRMWVNLNLWQKLKLSRDDAKPLLRLKGFPSFPLVERQANEVDWWDMVCNVKKLINEKKEDGKVFWQNLAGYKRQEALRPYLSSEEDRKKGKKFARYQLGDLLLHLYKKHGEDWGKVYDEAWERIDKKVEGLSKHIKLEEERRSEDAQSKAALTDWLRAKASFVIEGLKEADKDEFCRCELKLQKWYGDLRGKPFAIEAENSILDISGFSKQYNCAFIWQKDGVKKLNLYLIINYFKGGKLRFKKIKPEAFEANRFYTVINKKSGEIVPMEVNFNFDDPNLIILPLAFGKRQGREFIWNDLLSLETGSLKLANGRVIEKTLYNRRTRQDEPALFVALTFERREVLDSSNIKPMNLIGVDRGENIPAVIALTDPEGCPLSRFKDSLGNPTHILRIGESYKEKQRTIQAKKEVEQRRAGGYSRKYASKAKNLADDMVRNTARDLLYYAVTQDAMLIFENLSRGFGRQGKRTFMAERQYTRMEDWLTAKLAYEGLPSKTYLSKTLAQYTSKTCSNCGFTITSADYDRVLEKLKKTATGWMTTINGKELKVEGQITYYNRYKRQNVVKDLSVELDRLSEESVNNDISSWTKGRSGEALSLLKKRFSHRPVQEKFVCLNCGFETHADEQAALNIARSWLFLRSQEYKKYQTNKTTGNTDKRAFVETWQSFYRKKLKEVWKPAV

SEQ ID NO: 48626 - protein, 978 aa, synthetic construct
  REGION 1..978: note = engineered CasX variant
QEIKRINKIRRRLVKDSNTKKAGKTGPMKTLLVRVMTPDLRERLENLRKKPENIPQPISNTSRANLNKLLTDYTEMKKAILHVYWEEFQKDPVGLMSRVAQPASKKIDQNKLKPEMDEKGNLTTAGFACSQCGQPLFVYKLEQVSEKGKAYTNYFGRCNVAEHEKLILLAQLKPEKDSDEAVTYSLGKFGQRALDFYSIHVTKESTHPVKPLAQIAGNRYASSPVGKALRDACMGTIASFLSKYQDIIIEHQKVVKGNQKRLESLRELAGKENLEYPSVTLPPQPHTKEGVDAYNEVIARVRMWVNLNLWQKLKLSRDDAKPLLRLKGFPSFPLVERQANEVDWWDMVCNVKKLINEKKEDGKVFWQNLAGYKRQEALRPYLSSEEDRKKGKKFARYQLGDLLLHLEKKHPEDWGKVYDEAWERIDKKVEGLSKHIKLEEERRSEDAQSKAALTDWLRAKASFVIEGLKEADKDEFCRCELKLQKWYGDLRGKPFAIEAENSILDISGFSKQYNCAFIWQKDGVKKLNLYLIINYFKGGKLRFKKIKPEAFEANRFYTVINKKSGEIVPMEVNFNFDDPNLIILPLAFGKRQGREFIWNDLLSLETGSLKLANGRVIEKTLYNRRTRQDEPALFVALTFERREVLDSSNIKPMNLIGVDRGENIPAVIALTDPEGCPLSRFKDSLGNPTHILRIGESYKEKQRTIQAKKEVEQRRAGGYSRKYASKAKNLADDMVRNTARDLLYYAVTQDAMLIFENLSRGFGRQGKRTFMAERQYTRMEDWLTAKLAYEGLPSKTYLSKTLAQYTSKTCSNCGFTITSADYDRVLEKLKKTATGWMTTINGKELKVEGQITYYNRYKRQNVVKDLSVELDRLSEESVNNDISSWTKGRSGEALSLLKKRFSHRPVQEKFVCLNCGFETHADEQAALNIARSWLFLRSQEYKKYQTNKTTGNTDKRAFVETWQSFYRKKLKEVWKPAV

SEQ ID NO: 48627 - protein, 979 aa, synthetic construct
  REGION 1..979: note = engineered CasX variant
QEIKRINKIRRRLVKDSNTKKAGKTGPMKTLLVRVMTPDLRERLENLRKKPENIPQPISNTSRANLNKLLTDYTEMKKAILHVYWEEFQKDPVGLMSRVAQPASKKIDQNKLKPEMDEKGNLTTAGFACSQCGQPLFVYKLEQVSEKGKAYTNYFGRCNVAEHEKLILLAQLKPEKDSDEAVTYSLGKFGQRALDFYSIHVTKESTHPVKPLAQIAGNRYASSPVGKALRDACMGTIASFLSKYQDIIIEHQKVVKGNQKRLESLRELAGKENLEYPSVTLPPQPHTKEGVDAYNEVIARVRMWVNLNLWQKLKLSRDDAKPLLRLKGFPSFPLVERQANEVDWWDMVCNVKKLINEKKEDGKVFWQNLAGYKRQEALRPYLSSEEDRKKGKKFARYQLGDLLLHLEKKHGERDWGKVYDEAWERIDKKVEGLSKHIKLEEERRSEDAQSKAALTDWLRAKASFVIEGLKEADKDEFCRCELKLQKWYGDLRGKPFAIEAENSILDISGFSKQYNCAFIWQKDGVKKLNLYLIINYFKGGKLRFKKIKPEAFEANRFYTVINKKSGEIVPMEVNFNFDDPNLIILPLAFGKRQGREFIWNDLLSLETGSLKLANGRVIEKTLYNRRTRQDEPALFVALTFERREVLDSSNIKPMNLIGVDRGENIPAVIALTDPEGCPLSRFKDSLGNPTHILRIGESYKEKQRTIQAKKEVEQRRAGGYSRKYASKAKNLADDMVRNTARDLLYYAVTQDAMLIFENLSRGFGRQGKRTFMAERQYTRMEDWLTAKLAYEGLPSKTYLSKTLAQYTSKTCSNCGFTITSADYDRVLEKLKKTATGWMTTINGKELKVEGQITYYNRYKRQNVVKDLSVELDRLSEESVNNDISSWTKGRSGEALSLLKKRFSHRPVQEKFVCLNCGFETHADEQAALNIARSWLFLRSQEYKKYQTNKTTGNTDKRAFVETWQSFYRKKLKEVWKPAV

SEQ ID NO: 48628 - protein, 979 aa, synthetic construct
  REGION 1..979: note = engineered CasX variant
QEIKRINKIRRRLVKDSNTKKAGKTGPMKTLLVRVMTPDLRERLENLRKKPENIPQPISNTSRANLNKLLTDYTEMKKAILHVYWEEFQKDPVGLMSRVAQPASKKIDQNKLKPEMDEKGNLTTAGFACSQCGQPLFVYKLEQVSEKGKAYTNYFGRCNVAEHEKLILLAQLKPEKDSDEAVTYSLGKFGQRALDFYSIHVTKESTHPVKPLAQIAGNRYASSPVGKALRDACMGTIASFLSKYQDIIIEHQKVVKGNQKRLESLRELAGKENLEYPSVTLPPQPHTKEGVDAYNEVIARVRMWVNLNLWQKLKLSRDDAKPLLRLKGFPSFPLVERQANEVDWWDMVCNVKKLINEKKEDGKVFWQNLAGYKRQEALRPYLSSEEDRKKGKKFARYQLGDLLLHLEKKHGEYDWGKVYDEAWERIDKKVEGLSKHIKLEEERRSEDAQSKAALTDWLRAKASFVIEGLKEADKDEFCRCELKLQKWYGDLRGKPFAIEAENSILDISGFSKQYNCAFIWQKDGVKKLNLYLIINYFKGGKLRFKKIKPEAFEANRFYTVINKKSGEIVPMEVNFNFDDPNLIILPLAFGKRQGREFIWNDLLSLETGSLKLANGRVIEKTLYNRRTRQDEPALFVALTFERREVLDSSNIKPMNLIGVDRGENIPAVIALTDPEGCPLSRFKDSLGNPTHILRIGESYKEKQRTIQAKKEVEQRRAGGYSRKYASKAKNLADDMVRNTARDLLYYAVTQDAMLIFENLSRGFGRQGKRTFMAERQYTRMEDWLTAKLAYEGLPSKTYLSKTLAQYTSKTCSNCGFTITSADYDRVLEKLKKTATGWMTTINGKELKVEGQITYYNRYKRQNVVKDLSVELDRLSEESVNNDISSWTKGRSGEALSLLKKRFSHRPVQEKFVCLNCGFETHADEQAALNIARSWLFLRSQEYKKYQTNKTTGNTDKRAFVETWQSFYRKKLKEVWKPAV

SEQ ID NO: 48629 - protein, 978 aa, synthetic construct
  REGION 1..978: note = engineered CasX variant
QEIKRINKIRRRLVKDSNTKKAGKTGPMKTLLVRVMTPDLRERLENLRKKPENIPQPISNTSRANLNKLLTDYTEMKKAILHVYWEEFQKDPVGLMSRVAQPASKKIDQNKLKPEMDEKGNLTTAGFACSQCGQPLFVYKLEQVSEKGKAYTNYFGRCNVAEHEKLILLAQLKPEKDSDEAVTYSLGKFGQRALDFYSIHVTKESTHPVKPLAQIAGNRYASSPVGKALRDACMGTIASFLSKYQDIIIEHQKVVKGNQKRLESLRELAGKENLEYPSVTLPPQPHTKEGVDAYNEVIARVRMWVNLNLWQKLKLSRDDAKPLLRLKGFPSFPLVERQANEVDWWDMVCNVKKLINEKKEDGKVFWQNLAGYKRQEALRPYLSSEEDRKKGKKFARYQLGDLLLHLEKKHGEDWGDVYDEAWERIDKKVEGLSKHIKLEEERRSEDAQSKAALTDWLRAKASFVIEGLKEADKDEFCRCELKLQKWYGDLRGKPFAIEAENSILDISGFSKQYNCAFIWQKDGVKKLNLYLIINYFKGGKLRFKKIKPEAFEANRFYTVINKKSGEIVPMEVNFNFDDPNLIILPLAFGKRQGREFIWNDLLSLETGSLKLANGRVIEKTLYNRRTRQDEPALFVALTFERREVLDSSNIKPMNLIGVDRGENIPAVIALTDPEGCPLSRFKDSLGNPTHILRIGESYKEKQRTIQAKKEVEQRRAGGYSRKYASKAKNLADDMVRNTARDLLYYAVTQDAMLIFENLSRGFGRQGKRTFMAERQYTRMEDWLTAKLAYEGLPSKTYLSKTLAQYTSKTCSNCGFTITSADYDRVLEKLKKTATGWMTTINGKELKVEGQITYYNRYKRQNVVKDLSVELDRLSEESVNNDISSWTKGRSGEALSLLKKRFSHRPVQEKFVCLNCGFETHADEQAALNIARSWLFLRSQEYKKYQTNKTTGNTDKRAFVETWQSFYRKKLKEVWKPAV

SEQ ID NO: 48630 - protein, 978 aa, synthetic construct
  REGION 1..978: note = engineered CasX variant
QEIKRINKIRRRLVKDSNTKKAGKTGPMKTLLVRVMTPDLRERLENLRKKPENIPQPISNTSRANLNKLLTDYTEMKKAILHVYWEEFQKDPVGLMSRVAQPASKKIDQNKLKPEMDEKGNLTTAGFACSQCGQPLFVYKLEQVSEKGKAYTNYFGRCNVAEHEKLILLAQLKPEKDSDEAVTYSLGKFGQRALDFYSIHVTKESTHPVKPLAQIAGNRYASSPVGKALRDACMGTIASFLSKYQDIIIEHQKVVKGNQKRLESLRELAGKENLEYPSVTLPPQPHTKEGVDAYNEVIARVRMWVNLNLWQKLKLSRDDAKPLLRLKGFPSFPLVERQANEVDWWDMVCNVKKLINEKKEDGKVFWQNLAGYKRQEALRPYLSSEEDRKKGKKFARYQLGDLLLHLEKKHGEDWGKVYGEAWERIDKKVEGLSKHIKLEEERRSEDAQSKAALTDWLRAKASFVIEGLKEADKDEFCRCELKLQKWYGDLRGKPFAIEAENSILDISGFSKQYNCAFIWQKDGVKKLNLYLIINYFKGGKLRFKKIKPEAFEANRFYTVINKKSGEIVPMEVNFNFDDPNLIILPLAFGKRQGREFIWNDLLSLETGSLKLANGRVIEKTLYNRRTRQDEPALFVALTFERREVLDSSNIKPMNLIGVDRGENIPAVIALTDPEGCPLSRFKDSLGNPTHILRIGESYKEKQRTIQAKKEVEQRRAGGYSRKYASKAKNLADDMVRNTARDLLYYAVTQDAMLIFENLSRGFGRQGKRTFMAERQYTRMEDWLTAKLAYEGLPSKTYLSKTLAQYTSKTCSNCGFTITSADYDRVLEKLKKTATGWMTTINGKELKVEGQITYYNRYKRQNVVKDLSVELDRLSEESVNNDISSWTKGRSGEALSLLKKRFSHRPVQEKFVCLNCGFETHADEQAALNIARSWLFLRSQEYKKYQTNKTTGNTDKRAFVETWQSFYRKKLKEVWKPAV

SEQ ID NO: 48631 - protein, 978 aa, synthetic construct
  REGION 1..978: note = engineered CasX variant
QEIKRINKIRRRLVKDSNTKKAGKTGPMKTLLVRVMTPDLRERLENLRKKPENIPQPISNTSRANLNKLLTDYTEMKKAILHVYWEEFQKDPVGLMSRVAQPASKKIDQNKLKPEMDEKGNLTTAGFACSQCGQPLFVYKLEQVSEKGKAYTNYFGRCNVAEHEKLILLAQLKPEKDSDEAVTYSLGKFGQRALDFYSIHVTKESTHPVKPLAQIAGNRYASSPVGKALRDACMGTIASFLSKYQDIIIEHQKVVKGNQKRLESLRELAGKENLEYPSVTLPPQPHTKEGVDAYNEVIARVRMWVNLNLWQKLKLSRDDAKPLLRLKGFPSFPLVERQANEVDWWDMVCNVKKLINEKKEDGKVFWQNLAGYKRQEALRPYLSSEEDRKKGKKFARYQLGDLLLHLEKKHGEDWGKVYDEAWERIDKKVEGLSKHIKLEEERRSEDAQSKAALTDWLRAKASFVIEGKKEADKDEFCRCELKLQKWYGDLRGKPFAIEAENSILDISGFSKQYNCAFIWQKDGVKKLNLYLIINYFKGGKLRFKKIKPEAFEANRFYTVINKKSGEIVPMEVNFNFDDPNLIILPLAFGKRQGREFIWNDLLSLETGSLKLANGRVIEKTLYNRRTRQDEPALFVALTFERREVLDSSNIKPMNLIGVDRGENIPAVIALTDPEGCPLSRFKDSLGNPTHILRIGESYKEKQRTIQAKKEVEQRRAGGYSRKYASKAKNLADDMVRNTARDLLYYAVTQDAMLIFENLSRGFGRQGKRTFMAERQYTRMEDWLTAKLAYEGLPSKTYLSKTLAQYTSKTCSNCGFTITSADYDRVLEKLKKTATGWMTTINGKELKVEGQITYYNRYKRQNVVKDLSVELDRLSEESVNNDISSWTKGRSGEALSLLKKRFSHRPVQEKFVCLNCGFETHADEQAALNIARSWLFLRSQEYKKYQTNKTTGNTDKRAFVETWQSFYRKKLKEVWKPAV

SEQ ID NO: 48632 - protein, 978 aa, synthetic construct
  REGION 1..978: note = engineered CasX variant
QEIKRINKIRRRLVKDSNTKKAGKTGPMKTLLVRVMTPDLRERLENLRKKPENIPQPISNTSRANLNKLLTDYTEMKKAILHVYWEEFQKDPVGLMSRVAQPASKKIDQNKLKPEMDEKGNLTTAGFACSQCGQPLFVYKLEQVSEKGKAYTNYFGRCNVAEHEKLILLAQLKPEKDSDEAVTYSLGKFGQRALDFYSIHVTKESTHPVKPLAQIAGNRYASSPVGKALRDACMGTIASFLSKYQDIIIEHQKVVKGNQKRLESLRELAGKENLEYPSVTLPPQPHTKEGVDAYNEVIARVRMWVNLNLWQKLKLSRDDAKPLLRLKGFPSFPLVERQANEVDWWDMVCNVKKLINEKKEDGKVFWQNLAGYKRQEALRPYLSSEEDRKKGKKFARYQLGDLLLHLEKKHGEDWGKVYDEAWERIDKKVEGLSKHIKLEEERRSEDAQSKAALTDWLRAKASFVIEGSKEADKDEFCRCELKLQKWYGDLRGKPFAIEAENSILDISGFSKQYNCAFIWQKDGVKKLNLYLIINYFKGGKLRFKKIKPEAFEANRFYTVINKKSGEIVPMEVNFNFDDPNLIILPLAFGKRQGREFIWNDLLSLETGSLKLANGRVIEKTLYNRRTRQDEPALFVALTFERREVLDSSNIKPMNLIGVDRGENIPAVIALTDPEGCPLSRFKDSLGNPTHILRIGESYKEKQRTIQAKKEVEQRRAGGYSRKYASKAKNLADDMVRNTARDLLYYAVTQDAMLIFENLSRGFGRQGKRTFMAERQYTRMEDWLTAKLAYEGLPSKTYLSKTLAQYTSKTCSNCGFTITSADYDRVLEKLKKTATGWMTTINGKELKVEGQITYYNRYKRQNVVKDLSVELDRLSEESVNNDISSWTKGRSGEALSLLKKRFSHRPVQEKFVCLNCGFETHADEQAALNIARSWLFLRSQEYKKYQTNKTTGNTDKRAFVETWQSFYRKKLKEVWKPAV

SEQ ID NO: 48633 - protein, 979 aa, synthetic construct
  REGION 1..979: note = engineered CasX variant
QEIKRINKIRRRLVKDSNTKKAGKTGPMKTLLVRVMTPDLRERLENLRKKPENIPQPISNTSRANLNKLLTDYTEMKKAILHVYWEEFQKDPVGLMSRVAQPASKKIDQNKLKPEMDEKGNLTTAGFACSQCGQPLFVYKLEQVSEKGKAYTNYFGRCNVAEHEKLILLAQLKPEKDSDEAVTYSLGKFGQRALDFYSIHVTKESTHPVKPLAQIAGNRYASSPVGKALRDACMGTIASFLSKYQDIIIEHQKVVKGNQKRLESLRELAGKENLEYPSVTLPPQPHTKEGVDAYNEVIARVRMWVNLNLWQKLKLSRDDAKPLLRLKGFPSFPLVERQANEVDWWDMVCNVKKLINEKKEDGKVFWQNLAGYKRQEALRPYLSSEEDRKKGKKFARYQLGDLLLHLEKKHGEDWGKVYDEAWERIDKKVEGLSKHIKLEEERRSEDAQSKAALTDWLRAKASFVIEGLKEADDKDEFCRCELKLQKWYGDLRGKPFAIEAENSILDISGFSKQYNCAFIWQKDGVKKLNLYLIINYFKGGKLRFKKIKPEAFEANRFYTVINKKSGEIVPMEVNFNFDDPNLIILPLAFGKRQGREFIWNDLLSLETGSLKLANGRVIEKTLYNRRTRQDEPALFVALTFERREVLDSSNIKPMNLIGVDRGENIPAVIALTDPEGCPLSRFKDSLGNPTHILRIGESYKEKQRTIQAKKEVEQRRAGGYSRKYASKAKNLADDMVRNTARDLLYYAVTQDAMLIFENLSRGFGRQGKRTFMAERQYTRMEDWLTAKLAYEGLPSKTYLSKTLAQYTSKTCSNCGFTITSADYDRVLEKLKKTATGWMTTINGKELKVEGQITYYNRYKRQNVVKDLSVELDRLSEESVNNDISSWTKGRSGEALSLLKKRFSHRPVQEKFVCLNCGFETHADEQAALNIARSWLFLRSQEYKKYQTNKTTGNTDKRAFVETWQSFYRKKLKEVWKPAV

SEQ ID NO: 48634 - protein, 979 aa, synthetic construct
  REGION 1..979: note = engineered CasX variant
QEIKRINKIRRRLVKDSNTKKAGKTGPMKTLLVRVMTPDLRERLENLRKKPENIPQPISNTSRANLNKLLTDYTEMKKAILHVYWEEFQKDPVGLMSRVAQPASKKIDQNKLKPEMDEKGNLTTAGFACSQCGQPLFVYKLEQVSEKGKAYTNYFGRCNVAEHEKLILLAQLKPEKDSDEAVTYSLGKFGQRALDFYSIHVTKESTHPVKPLAQIAGNRYASSPVGKALRDACMGTIASFLSKYQDIIIEHQKVVKGNQKRLESLRELAGKENLEYPSVTLPPQPHTKEGVDAYNEVIARVRMWVNLNLWQKLKLSRDDAKPLLRLKGFPSFPLVERQANEVDWWDMVCNVKKLINEKKEDGKVFWQNLAGYKRQEALRPYLSSEEDRKKGKKFARYQLGDLLLHLEKKHGEDWGKVYDEAWERIDKKVEGLSKHIKLEEERRSEDAQSKAALTDWLRAKASFVIEGLKEADKDEFCRCELKLQKWYGDLRGKPFAIEAENSILDISGFSKQYNCAFIWQKDGVKKLNLYLIINYFKGGKLRFKKIKPEAFEANRFYTVINKKSGEIVPMEVNFNFDDPNLIILPLAFGKRQGREFIWNDLLSLETGSLKLANGRVIEKTLYNRRTRQDEPALFVALTFERREVLDSSNIKPMNLIGVDRGENIPAVIALTDPEGCPLSRFKDSLGNPTHILRIGESYKEKQRTIQAKKEVEQRRAGGYSRKYASKAKNLADDMVRNTARDLLYYAVTQDAMLIFENLSRGFGRQGKRTFMAERQYTRMEDWLTAKLAYEGLPSKTYLSKTLAQYTSKTCSNCGFTITSADYDRVLEKLKKTATGWMTTINGKELKVEGQITYYNRYKRQNVVKDLSVELDRLSEESVNNDISSWTKGRSGNEALSLLKKRFSHRPVQEKFVCLNCGFETHADEQAALNIARSWLFLRSQEYKKYQTNKTTGNTDKRAFVETWQSFYRKKLKEVWKPAV

SEQ ID NO: 48635 - protein, 978 aa, synthetic construct
  REGION 1..978: note = engineered CasX variant
QEIKRINKIRRRLVKDSNTKKAGKTGPMKTLLVRVMTPDLRERLENLRKKPENIPQPISNTSRANLNKLLTDYTEMKKAILHVYWEEFQKDPVGLMSRVAQPASKKIDQNKLKPEMDEKGNLTTAGFACSQCGQPLFVYKLEQVSEKGKAYTNYFGRCNVAEHEKLILLAQLKPEKDSDEAVTYSLGKFGQRALDFYSIHVTKESTHPVKPLAQIAGNRYASSPVGKALRDACMGTIASFLSKYQDIIIEHQKVVKGNQKRLESLRELAGKENLEYPSVTLPPQPHTKEGVDAYNEVIARVRMWVNLNLWQKLKLSRDDAKPLLRLKGFPSFPLVERQANEVDWWDMVCNVKKLINEKKEDGKVFWQNLAGYKRQEALRPYLSSEEDRQKGKKFARYQLGDLLLHLEKKHGEDWGKVYDEAWERIDKKVEGLSKHIKLEEERRSEDAQSKAALTDWLRAKASFVIEGLKEADKDEFCRCELKLQKWYGDLRGKPFAIEAENSILDISGFSKQYNCAFIWQKDGVKKLNLYLIINYFKGGKLRFKKIKPEAFEANRFYTVINKKSGEIVPMEVNFNFDDPNLIILPLAFGKRQGREFIWNDLLSLETGSLKLANGRVIEKTLYNRRTRQDEPALFVALTFERREVLDSSNIKPMNLIGVDRGENIPAVIALTDPEGCPLSRFKDSLGNPTHILRIGESYKEKQRTIQAKKEVEQRRAGGYSRKYASKAKNLADDMVRNTARDLLYYAVTQDAMLIFENLSRGFGRQGKRTFMAERQYTRMEDWLTAKLAYEGLPSKTYLSKTLAQYTSKTCSNCGFTITSADYDRVLEKLKKTATGWMTTINGKELKVEGQITYYNRYKRQNVVKDLSVELDRLSEESVNNDISSWTKGRSGEALSLLKKRFSHRPVQEKFVCLNCGFETHADEQAALNIARSWLFLRSQEYKKYQTNKTTGNTDKRAFVETWQSFYRKKLKEVWKPAV

SEQ ID NO: 48636 - protein, 978 aa, synthetic construct
  REGION 1..978: note = engineered CasX variant
QEIKRINKIRRRLVKDSNTKKAGKTGPMKTLLVRVMTPDLRERLENLRKKPENIPQPISNTSRANLNKLLTDYTEMKKAILHVYWEEFQKDPVGLMSRVAQPASKKIDQNKLKPEMDEKGNLTTAGFACSQCGQPLFVYKLEQVSEKGKAYTNYFGRCNVAEHEKLILLAQLKPEKDSDEAVTYSLGKFGQRALDFYSIHVTKESTHPVKPLAQIAGNRYASSPVGKALRDACMGTIASFLSKYQDIIIEHQKVVKGNQKRLESLRELAGKENLEYPSVTLPPQPHTKEGVDAYNEVIARVRMWVNLNLWQKLKLSRDDAKPLLRLKGFPSFPLVERQANEVDWWDMVCNVKKLINEKKEDGKVFWQNLAGYKRQEALRPYLSSEEDRKKGKKFARYQLGDLLLHLEKKHGEDWGKVYDEAWERIDKKVEGLSKHIKLEEERRSEDAQSKAALTDWLRAKASFVIEGLKEADKDEFCRCELKLQKWYGDLRGKPFAIEAENSILDISGFSKQYNCAFIWQKDGVKKLNLYLIINYFKGGKLRFKKIKPEAFEANRFYTVINKKSGEIVPMEVNFNFDDPNLIILPLAFGKRQGREFIWNDLLSLETGSLKLANGRVIEKTLYNRRTRQDEPALFVALTFERREVLDSSNIKPMNLIGVDRGENIPAVIALTDPEGCPLSRFKDSLGNPTHILRIGESYKEKQRTIQAKKEVEQRRAGGYSRKYASKAKNLADDMVRNTARDLLYYAVTQDAMLIFENLSRGFGRQGKRTFMAERQYTRMEDWLTAKLAYEGLPSQTYLSKTLAQYTSKTCSNCGFTITSADYDRVLEKLKKTATGWMTTINGKELKVEGQITYYNRYKRQNVVKDLSVELDRLSEESVNNDISSWTKGRSGEALSLLKKRFSHRPVQEKFVCLNCGFETHADEQAALNIARSWLFLRSQEYKKYQTNKTTGNTDKRAFVETWQSFYRKKLKEVWKPAV

SEQ ID NO: 48637 - protein, 978 aa, synthetic construct
  REGION 1..978: note = engineered CasX variant
QEIKRINKIRRRLVKDSNTKKAGKTGPMKTLLVRVMTPDLRERLENLRKKPENIPQPISNTSRANLNKLLTDYTEMKKAILHVYWEEFQKDPVGLMSRVAQPASKKIDQNKLKPEMDEKGNLTTAGFACSQCGQPLFVYKLEQVSEKGKAYTNYFGRCNVAEHEKLILLAQLKPEKDSDEAVTYSLGKFGQRALDFYSIHVTKESTHPVKPLAQIAGNRYASSPVGKALRDACMGTIASFLSKYQDIIIEHQKVVKGNQKRLESLRELAGKENLEYPSVTLPPQPHTKEGVDAYNEVIARVRMWVNLNLWQKLKLSRDDAKPLLRLKGFPSFPLVERQANEVDWWDMVCNVKKLINEKKEDGKVFWQNLAGYKRQEALRPYLSSEEDRKKGKKFARYQLGDLLLHLEKKHGEDWGKVYDEAWERIDKKVEGLSKHIKLEEERRSEDAQSKAALTDWLRAKASFVIEGLKEADKDEFCRCELKLQKWYGDLRGKPFAIEAENSILDISGFSKQYNCAFIWQKDGVKKLNLYLIINYFKGGKLRFKKIKPEAFEANRFYTVINKKSGEIVPMEVNFNFDDPNLIILPLAFGKRQGREFIWNDLLSLETGSLKLANGRVIEKTLYNRRTRQDEPALFVALTFERREVLDSSNIKPMNLIGVDRGENIPAVIALTDPEGCPLSRFKDSLGNPTHILRIGESYKEKQRTIQAKKEVEQRRAGGYSRKYASKAKNLADDMVRNTARDLLYYAVTQDAMLIFENLSRGFGRQGKRTFMAERQYTRMEDWLTAKLAYNGLPSKTYLSKTLAQYTSKTCSNCGFTITSADYDRVLEKLKKTATGWMTTINGKELKVEGQITYYNRYKRQNVVKDLSVELDRLSEESVNNDISSWTKGRSGEALSLLKKRFSHRPVQEKFVCLNCGFETHADEQAALNIARSWLFLRSQEYKKYQTNKTTGNTDKRAFVETWQSFYRKKLKEVWKPAV

SEQ ID NO: 48638 - protein, 978 aa, synthetic construct
  REGION 1..978: note = engineered CasX variant
QEIKRINKIRRRLVKDSNTKKAGKTGPMKTLLVRVMTPDLRERLENLRKKPENIPQPISNTSRANLNKLLTDYTEMKKAILHVYWEEFQKDPVGLMSRVAQPASKKIDQNKLKPEMDEKGNLTTAGFACSQCGQPLFVYKLEQVSEKGKAYTNYFGRCNVAEHEKLIQLAQLKPEKDSDEAVTYSLGKFGQRALDFYSIHVTKESTHPVKPLAQIAGNRYASSPVGKALRDACMGTIASFLSKYQDIIIEHQKVVKGNQKRLESLRELAGKENLEYPSVTLPPQPHTKEGVDAYNEVIARVRMWVNLNLWQKLKLSRDDAKPLLRLKGFPSFPLVERQANEVDWWDMVCNVKKLINEKKEDGKVFWQNLAGYKRQEALRPYLSSEEDRKKGKKFARYQLGDLLLHLEKKHGEDWGKVYDEAWERIDKKVEGLSKHIKLEEERRSEDAQSKAALTDWLRAKASFVIEGLKEADKDEFCRCELKLQKWYGDLRGKPFAIEAENSILDISGFSKQYNCAFIWQKDGVKKLNLYLIINYFKGGKLRFKKIKPEAFEANRFYTVINKKSGEIVPMEVNFNFDDPNLIILPLAFGKRQGREFIWNDLLSLETGSLKLANGRVIEKTLYNRRTRQDEPALFVALTFERREVLDSSNIKPMNLIGVDRGENIPAVIALTDPEGCPLSRFKDSLGNPTHILRIGESYKEKQRTIQAKKEVEQRRAGGYSRKYASKAKNLADDMVRNTARDLLYYAVTQDAMLIFENLSRGFGRQGKRTFMAERQYTRMEDWLTAKLAYEGLPSKTYLSKTLAQYTSKTCSNCGFTITSADYDRVLEKLKKTATGWMTTINGKELKVEGQITYYNRYKRQNVVKDLSVELDRLSEESVNNDISSWTKGRSGEALSLLKKRFSHRPVQEKFVCLNCGFETHADEQAALNIARSWLFLRSQEYKKYQTNKTTGNTDKRAFVETWQSFYRKKLKEVWKPAV

SEQ ID NO: 48639 - protein, 978 aa, synthetic construct
  REGION 1..978: note = engineered CasX variant
QEIKRINKIRRRLVKDSNTKKAGKTGPMKTLLVRVMTPDLRERLENLRKKPENIPQPISNTSRANLNKLLTDYTEMKKAILHVYWEEFQKDPVGLMSRVAQPASKKIDQNKLKPEMDEKGNLTTAGFACSQCGQPLFVYKLEQVSEKGKAYTNYFGRCNVAEHEKLILLAQLKPEKDSDEAVTYSLGKFGQRALDFYSIHVTKESTHPVKPLAQIAGNRYASSPVGKALRDACMGTIASFLSKYQDIIIEHQKVVKGNQKRLESLRELAGKENLEYPSVTLPPQPHTKEGVDAYNEVIARVRMWVNLNLWQKLKLSRDDAKPLLRLKGFPSFPLVERQANEVDWWDMVCNVKKLINEKKEDGKVFWQNLAIYKRQEALRPYLSSEEDRKKGKKFARYQLGDLLLHLEKKHGEDWGKVYDEAWERIDKKVEGLSKHIKLEEERRSEDAQSKAALTDWLRAKASFVIEGLKEADKDEFCRCELKLQKWYGDLRGKPFAIEAENSILDISGFSKQYNCAFIWQKDGVKKLNLYLIINYFKGGKLRFKKIKPEAFEANRFYTVINKKSGEIVPMEVNFNFDDPNLIILPLAFGKRQGREFIWNDLLSLETGSLKLANGRVIEKTLYNRRTRQDEPALFVALTFERREVLDSSNIKPMNLIGVDRGENIPAVIALTDPEGCPLSRFKDSLGNPTHILRIGESYKEKQRTIQAKKEVEQRRAGGYSRKYASKAKNLADDMVRNTARDLLYYAVTQDAMLIFENLSRGFGRQGKRTFMAERQYTRMEDWLTAKLAYEGLPSKTYLSKTLAQYTSKTCSNCGFTITSADYDRVLEKLKKTATGWMTTINGKELKVEGQITYYNRYKRQNVVKDLSVELDRLSEESVNNDISSWTKGRSGEALSLLKKRFSHRPVQEKFVCLNCGFETHADEQAALNIARSWLFLRSQEYKKYQTNKTTGNTDKRAFVETWQSFYRKKLKEVWKPAV

SEQ ID NO: 48640 - protein, 978 aa, synthetic construct
  REGION 1..978: note = engineered CasX variant
QEIKRINKIRRRLVKDSNTKKAGKTGPMKTLLVRVMTPDLRERLENLRKKPENIPQPISNTSRANLNKLLTDYTEMKKAILHVYWEEFQKDPVGLMSRVAQPASKKIDQNKLKPEMDEKGNLTTAGFACSQCGQPLFVYKLEQVSEKGKAYTNYFGRCNVAEHEKLILLAQLKPEKDSDEAVTYSLGKFGQRALDFYSIHVTKESTHPVKPLAQIAGNRYASSPVGKALRDACMGTIASFLSKYQDIIIEHQKVVKGNQKRLESLRELAGKENLEYPSVTLPPQPHTKEGVDAYNEVIARVRMWVNLNLWQKLKLSRDDAKPLLRLKGFPSFPLVERQANEVDWWDMVCNVKKLINEKKEDGKVFWQNLAGYKRQEALRPYLSSEEDREKGKKFARYQLGDLLLHLEKKHGEDWGKVYDEAWERIDKKVEGLSKHIKLEEERRSEDAQSKAALTDWLRAKASFVIEGLKEADKDEFCRCELKLQKWYGDLRGKPFAIEAENSILDISGFSKQYNCAFIWQKDGVKKLNLYLIINYFKGGKLRFKKIKPEAFEANRFYTVINKKSGEIVPMEVNFNFDDPNLIILPLAFGKRQGREFIWNDLLSLETGSLKLANGRVIEKTLYNRRTRQDEPALFVALTFERREVLDSSNIKPMNLIGVDRGENIPAVIALTDPEGCPLSRFKDSLGNPTHILRIGESYKEKQRTIQAKKEVEQRRAGGYSRKYASKAKNLADDMVRNTARDLLYYAVTQDAMLIFENLSRGFGRQGKRTFMAERQYTRMEDWLTAKLAYEGLPSKTYLSKTLAQYTSKTCSNCGFTITSADYDRVLEKLKKTATGWMTTINGKELKVEGQITYYNRYKRQNVVKDLSVELDRLSEESVNNDISSWTKGRSGEALSLLKKRFSHRPVQEKFVCLNCGFETHADEQAALNIARSWLFLRSQEYKKYQTNKTTGNTDKRAFVETWQSFYRKKLKEVWKPAV

SEQ ID NO: 48641 - protein, 978 aa, synthetic construct
  REGION 1..978: note = engineered CasX variant
QEIKRINKIRRRLVKDSNTKKAGKTGPMKTLLVRVMTPDLRERLENLRKKPENIPQPISNTSRANLNKLLTDYTEMKKAILHVYWEEFQKDPVGLMSRVAQPASKKIDQNKLKPEMDEKGNLTTAGFACSQCGQPLFVYKLEQVSEKGKAYTNYFGRCNVAEHEKLILLAQLKPEKDSDEAVTYSLGKFGQRALDFYSIHVTKESTHPVKPLAQIAGNRYASSPVGKALRDACMGTIASFLSKYQDIIIEHQKVVKGNQKRLESLRELAGKENLEYPSVTLPPQPHTKEGVDAYNEVIARVRMWVNLNLWQKLKLSRDDAKPLLRLKGFPSFPLVERQANEVDWWDMVCNVKKLINEKKEDGKVFWQNLAGYKRQEALRPYLSSEEDRKKGKKFARYQLGDLLLHLEKKHGEDWGKVYDEAWERIDKKVEGLSKHIKLEEERRSEDAQSKAALTDWLRAKASFVIEGLKEADKDEFCRCELKLQKWYGDLRGKPFAIEAENSILDISGFSKQYNCAFIWQKDGVKKLNLYLIINYFKGGKLRFKKIKPEAFEANRFYTVINKKSGEIVIMEVNFNFDDPNLIILPLAFGKRQGREFIWNDLLSLETGSLKLANGRVIEKTLYNRRTRQDEPALFVALTFERREVLDSSNIKPMNLIGVDRGENIPAVIALTDPEGCPLSRFKDSLGNPTHILRIGESYKEKQRTIQAKKEVEQRRAGGYSRKYASKAKNLADDMVRNTARDLLYYAVTQDAMLIFENLSRGFGRQGKRTFMAERQYTRMEDWLTAKLAYEGLPSKTYLSKTLAQYTSKTCSNCGFTITSADYDRVLEKLKKTATGWMTTINGKELKVEGQITYYNRYKRQNVVKDLSVELDRLSEESVNNDISSWTKGRSGEALSLLKKRFSHRPVQEKFVCLNCGFETHADEQAALNIARSWLFLRSQEYKKYQTNKTTGNTDKRAFVETWQSFYRKKLKEVWKPAV

SEQ ID NO: 48642 - protein, 978 aa, synthetic construct
  REGION 1..978: note = engineered CasX variant
QEIKRINKIRRRLVKDSNTKKAGKTGPMKTLLVRVMTPDLRERLENLRKKPENIPQPISNTSRANLNKLLTDYTEMKKAILHVYWEEFQKDPVGLMSRVAQPASKKIDQNKLKPEMDEKGNLTTAGFACSQCGQPLFVYKLEQVSEKGKAYTNYFGRCNVAEHEKLILLDQLKPEKDSDEAVTYSLGKFGQRALDFYSIHVTKESTHPVKPLAQIAGNRYASGPVGKALRGACMGTIASFLSKYQDIIIEHQKVVKGNQKRLESLRELAGKENLEYPSVTLPPQPHTKEGVDAYNEVIARVRMWVNLNLWQKLKLSRDDAKPLLRLKGFPSFPLVERQANEVDWWDMVCNVKKLINEKKEDGKVFWQNLAGYKRQEALRPYLSSEEDRKKGKKFARYQLGDLLLHLEKKHGEDWGKVYDEAWERIDKKVEGLSKHIKLEEERRSEDAQSKAALTDWLRAKASFVIEGLKEADKDEFCRCELKLQKWYGDLRGKPFAIEAENSILDISGFSKQYNCAFIWQKDGVKKLNLYLIINYFKGGKLRFKKIKPEAFEANRFYTVINKKSGEIVPMEVNFNFDDPNLIILPLAFGKRQGREFIWNDLLSLETGSLKLANGRVIEKTLYNRRTRQDEPALFVALTFERREVLDSSNIKPMNLIGVDRGENIPAVIALTDPEGCPLSRFKDSLGNPTHILRIGESYKEKQRTIQAKKEVEQRRAGGYSRKYASKAKNLADDMVRNTARDLLYYAVTQDAMLIFENLSRGFGRQGKRTFMAERQYTRMEDWLTAKLAYEGLPSKTYLSKTLAQYTSKTCSNCGFTITSADYDRVLEKLKKTATGWMTTINGKELKVEGQITYYNRYKRQNVVKDLSVELDRLSEESVNNDISSWTKGRSGEALSLLKKRFSHRPVQEKFVCLNCGFETHADEQAALNIARSWLFLRSQEYKKYQTNKTTGNTDKRAFVETWQSFYRKKLKEVWKPAV

SEQ ID NO: 48643 - protein, 978 aa, synthetic construct
  REGION 1..978: note = engineered CasX variant
QEIKRINKIRRRLVKDSNTKKAGKTGPMKTLLVRVMTPDLRERLENLRKKPENIPQPISNTSRANLNKLLTDYTEMKKAILHVYWEEFQKDPVGLMSRVAQPASKKIDQNKLKPEMDEKGNLTTAGFACSQCGQPLFVYKLEQVSEKGKAYTNYFGRCNVAEHEKLILLDQLKPEKDSDEAVTYSLGKFGQRALDFYSIHVTKESTHPVKPLAQIAGNRYASGPVGKALRDACMGTIASFLSKYQDIIIEHQKVVKGNQKRLESLRELAGKENLEYPSVTLPPQPHTKEGVDAYNEVIARVRMWVNLNLWQKLKLSRDDAKPLLRLKNFPSFPLVERQANEVDWWDMVCNVKKLINEKKEDGKVFWQNLAGYKRQEALRPYLSSEEDRKKGKKFARYQLGDLLLHLEKKHGEDWGKVYDEAWERIDKKVEGLSKHIKLEEERRSEDAQSKAALTDWLRAKASFVIEGLKEADKDEFCRCELKLQKWYGDLRGKPFAIEAENSILDISGFSKQYNCAFIWQKDGVKKLNLYLIINYFKGGKLRFKKIKPEAFEANRFYTVINKKSGEIVPMEVNFNFDDPNLIILPLAFGKRQGREFIWNDLLSLETGSLKLANGRVIEKTLYNRRTRQDEPALFVALTFERREVLDSSNIKPMNLIGVDRGENIPAVIALTDPEGCPLSRFKDSLGNPTHILRIGESYKEKQRTIQAKKEVEQRRAGGYSRKYASKAKNLADDMVRNTARDLLYYAVTQDAMLIFENLSRGFGRQGKRTFMAERQYTRMEDWLTAKLAYEGLPSKTYLSKTLAQYTSKTCSNCGFTITSADYDRVLEKLKKTATGWMTTINGKELKVEGQITYYNRYKRQNVVKDLSVELDRLSEESVNNDISSWTKGRSGEALSLLKKRFSHRPVQEKFVCLNCGFETHADEQAALNIARSWLFLRSQEYKKYQTNKTTGNTDKRAFVETWQSFYRKKLKEVWKPAV

SEQ ID NO: 48644 - protein, 978 aa, synthetic construct
  REGION 1..978: note = engineered CasX variant
QEIKRINKIRRRLVKDSNTKKAGKTGPMKTLLVRVMTPDLRERLENLRKKPENIPQPISNTSRANLNKLLTDYTEMKKAILHVYWEEFQKDPVGLMSRVAQPASKKIDQNKLKPEMDEKGNLTTAGFACSQCGQPLFVYKLEQVSEKGKAYTNYFGRCNVAEHEKLILLDQLKPEKDSDEAVTYSLGKFGQRALDFYSIHVTKESTHPVKPLAQIAGNRYASGPVGKALRDACMGTIASFLSKYQDIIIEHQKVVKGNQKRLESLRELAGKENLEYPSVTLPPQPHTKEGVDAYNEVIARVRMWVNLNLWQKLKLSRDDAKPLLRLKGFPSFPLVERQANEVDWWDMVCNVKKLINEKKEDGKVFWQNLAGYKRQEALRPYLSSEEDRKKGKKFARYQLGDLLNHLEKKHGEDWGKVYDEAWERIDKKVEGLSKHIKLEEERRSEDAQSKAALTDWLRAKASFVIEGLKEADKDEFCRCELKLQKWYGDLRGKPFAIEAENSILDISGFSKQYNCAFIWQKDGVKKLNLYLIINYFKGGKLRFKKIKPEAFEANRFYTVINKKSGEIVPMEVNFNFDDPNLIILPLAFGKRQGREFIWNDLLSLETGSLKLANGRVIEKTLYNRRTRQDEPALFVALTFERREVLDSSNIKPMNLIGVDRGENIPAVIALTDPEGCPLSRFKDSLGNPTHILRIGESYKEKQRTIQAKKEVEQRRAGGYSRKYASKAKNLADDMVRNTARDLLYYAVTQDAMLIFENLSRGFGRQGKRTFMAERQYTRMEDWLTAKLAYEGLPSKTYLSKTLAQYTSKTCSNCGFTITSADYDRVLEKLKKTATGWMTTINGKELKVEGQITYYNRYKRQNVVKDLSVELDRLSEESVNNDISSWTKGRSGEALSLLKKRFSHRPVQEKFVCLNCGFETHADEQAALNIARSWLFLRSQEYKKYQTNKTTGNTDKRAFVETWQSFYRKKLKEVWKPAV

SEQ ID NO: 48645 - protein, 978 aa, synthetic construct
  REGION 1..978: note = engineered CasX variant
QEIKRINKIRRRLVKDSNTKKAGKTGPMKTLLVRVMTPDLRERLENLRKKPENIPQPISNTSRANLNKLLTDYTEMKKAILHVYWEEFQKDPVGLMSRVAQPASKKIDQNKLKPEMDEKGNLTTAGFACSQCGQPLFVYKLEQVSEKGKAYTNYFGRCNVAEHEKLILLDQLKPEKDSDEAVTYSLGKFGQRALDFYSIHVTKESTHPVKPLAQIAGNRYASGPVGKALRDACMGTIASFLSKYQDIIIEHQKVVKGNQKRLESLRELAGKENLEYPSVTLPPQPHTKEGVDAYNEVIARVRMWVNLNLWQKLKLSRDDAKPLLRLKGFPSFPLVERQANEVDWWDMVCNVKKLINEKKEDGKVFWQNLAGYKRQEALRPYLSSEEDRKKGKKFARYQLGDLLWHLEKKHGEDWGKVYDEAWERIDKKVEGLSKHIKLEEERRSEDAQSKAALTDWLRAKASFVIEGLKEADKDEFCRCELKLQKWYGDLRGKPFAIEAENSILDISGFSKQYNCAFIWQKDGVKKLNLYLIINYFKGGKLRFKKIKPEAFEANRFYTVINKKSGEIVPMEVNFNFDDPNLIILPLAFGKRQGREFIWNDLLSLETGSLKLANGRVIEKTLYNRRTRQDEPALFVALTFERREVLDSSNIKPMNLIGVDRGENIPAVIALTDPEGCPLSRFKDSLGNPTHILRIGESYKEKQRTIQAKKEVEQRRAGGYSRKYASKAKNLADDMVRNTARDLLYYAVTQDAMLIFENLSRGFGRQGKRTFMAERQYTRMEDWLTAKLAYEGLPSKTYLSKTLAQYTSKTCSNCGFTITSADYDRVLEKLKKTATGWMTTINGKELKVEGQITYYNRYKRQNVVKDLSVELDRLSEESVNNDISSWTKGRSGEALSLLKKRFSHRPVQEKFVCLNCGFETHADEQAALNIARSWLFLRSQEYKKYQTNKTTGNTDKRAFVETWQSFYRKKLKEVWKPAV

SEQ ID NO: 48646 - protein, 978 aa, synthetic construct
  REGION 1..978: note = engineered CasX variant
QEIKRINKIRRRLVKDSNTKKAGKTGPMKTLLVRVMTPDLRERLENLRKKPENIPQPISNTSRANLNKLLTDYTEMKKAILHVYWEEFQKDPVGLMSRVAQPASKKIDQNKLKPEMDEKGNLTTAGFACSQCGQPLFVYKLEQVSEKGKAYTNYFGRCNVAEHEKLILLDQLKPEKDSDEAVTYSLGKFGQRALDFYSIHVTKESTHPVKPLAQIAGNRYASGPVGKALRDACMGTIASFLSKYQDIIIEHQKVVKGNQKRLESLRELAGKENLEYPSVTLPPQPHTKEGVDAYNEVIARVRMWVNLNLWQKLKLSRDDAKPLLRLKGFPSFPLVERQANEVDWWDMVCNVKKLINEKKEDGKVFWQNLAGYKRQEALRPYLSSEEDRKKGKKFARYQLGDLLLHLYKKHGEDWGKVYDEAWERIDKKVEGLSKHIKLEEERRSEDAQSKAALTDWLRAKASFVIEGLKEADKDEFCRCELKLQKWYGDLRGKPFAIEAENSILDISGFSKQYNCAFIWQKDGVKKLNLYLIINYFKGGKLRFKKIKPEAFEANRFYTVINKKSGEIVPMEVNFNFDDPNLIILPLAFGKRQGREFIWNDLLSLETGSLKLANGRVIEKTLYNRRTRQDEPALFVALTFERREVLDSSNIKPMNLIGVDRGENIPAVIALTDPEGCPLSRFKDSLGNPTHILRIGESYKEKQRTIQAKKEVEQRRAGGYSRKYASKAKNLADDMVRNTARDLLYYAVTQDAMLIFENLSRGFGRQGKRTFMAERQYTRMEDWLTAKLAYEGLPSKTYLSKTLAQYTSKTCSNCGFTITSADYDRVLEKLKKTATGWMTTINGKELKVEGQITYYNRYKRQNVVKDLSVELDRLSEESVNNDISSWTKGRSGEALSLLKKRFSHRPVQEKFVCLNCGFETHADEQAALNIARSWLFLRSQEYKKYQTNKTTGNTDKRAFVETWQSFYRKKLKEVWKPAV

SEQ ID NO: 48647 - protein, 978 aa, synthetic construct
  REGION 1..978: note = engineered CasX variant
QEIKRINKIRRRLVKDSNTKKAGKTGPMKTLLVRVMTPDLRERLENLRKKPENIPQPISNTSRANLNKLLTDYTEMKKAILHVYWEEFQKDPVGLMSRVAQPASKKIDQNKLKPEMDEKGNLTTAGFACSQCGQPLFVYKLEQVSEKGKAYTNYFGRCNVAEHEKLILLDQLKPEKDSDEAVTYSLGKFGQRALDFYSIHVTKESTHPVKPLAQIAGNRYASGPVGKALRDACMGTIASFLSKYQDIIIEHQKVVKGNQKRLESLRELAGKENLEYPSVTLPPQPHTKEGVDAYNEVIARVRMWVNLNLWQKLKLSRDDAKPLLRLKGFPSFPLVERQANEVDWWDMVCNVKKLINEKKEDGKVFWQNLAGYKRQEALRPYLSSEEDRKKGKKFARYQLGDLLLHLEKKHPEDWGKVYDEAWERIDKKVEGLSKHIKLEEERRSEDAQSKAALTDWLRAKASFVIEGLKEADKDEFCRCELKLQKWYGDLRGKPFAIEAENSILDISGFSKQYNCAFIWQKDGVKKLNLYLIINYFKGGKLRFKKIKPEAFEANRFYTVINKKSGEIVPMEVNFNFDDPNLIILPLAFGKRQGREFIWNDLLSLETGSLKLANGRVIEKTLYNRRTRQDEPALFVALTFERREVLDSSNIKPMNLIGVDRGENIPAVIALTDPEGCPLSRFKDSLGNPTHILRIGESYKEKQRTIQAKKEVEQRRAGGYSRKYASKAKNLADDMVRNTARDLLYYAVTQDAMLIFENLSRGFGRQGKRTFMAERQYTRMEDWLTAKLAYEGLPSKTYLSKTLAQYTSKTCSNCGFTITSADYDRVLEKLKKTATGWMTTINGKELKVEGQITYYNRYKRQNVVKDLSVELDRLSEESVNNDISSWTKGRSGEALSLLKKRFSHRPVQEKFVCLNCGFETHADEQAALNIARSWLFLRSQEYKKYQTNKTTGNTDKRAFVETWQSFYRKKLKEVWKPAV

SEQ ID NO: 48648 - protein, 979 aa, synthetic construct
  REGION 1..979: note = engineered CasX variant
QEIKRINKIRRRLVKDSNTKKAGKTGPMKTLLVRVMTPDLRERLENLRKKPENIPQPISNTSRANLNKLLTDYTEMKKAILHVYWEEFQKDPVGLMSRVAQPASKKIDQNKLKPEMDEKGNLTTAGFACSQCGQPLFVYKLEQVSEKGKAYTNYFGRCNVAEHEKLILLDQLKPEKDSDEAVTYSLGKFGQRALDFYSIHVTKESTHPVKPLAQIAGNRYASGPVGKALRDACMGTIASFLSKYQDIIIEHQKVVKGNQKRLESLRELAGKENLEYPSVTLPPQPHTKEGVDAYNEVIARVRMWVNLNLWQKLKLSRDDAKPLLRLKGFPSFPLVERQANEVDWWDMVCNVKKLINEKKEDGKVFWQNLAGYKRQEALRPYLSSEEDRKKGKKFARYQLGDLLLHLEKKHGERDWGKVYDEAWERIDKKVEGLSKHIKLEEERRSEDAQSKAALTDWLRAKASFVIEGLKEADKDEFCRCELKLQKWYGDLRGKPFAIEAENSILDISGFSKQYNCAFIWQKDGVKKLNLYLIINYFKGGKLRFKKIKPEAFEANRFYTVINKKSGEIVPMEVNFNFDDPNLIILPLAFGKRQGREFIWNDLLSLETGSLKLANGRVIEKTLYNRRTRQDEPALFVALTFERREVLDSSNIKPMNLIGVDRGENIPAVIALTDPEGCPLSRFKDSLGNPTHILRIGESYKEKQRTIQAKKEVEQRRAGGYSRKYASKAKNLADDMVRNTARDLLYYAVTQDAMLIFENLSRGFGRQGKRTFMAERQYTRMEDWLTAKLAYEGLPSKTYLSKTLAQYTSKTCSNCGFTITSADYDRVLEKLKKTATGWMTTINGKELKVEGQITYYNRYKRQNVVKDLSVELDRLSEESVNNDISSWTKGRSGEALSLLKKRFSHRPVQEKFVCLNCGFETHADEQAALNIARSWLFLRSQEYKKYQTNKTTGNTDKRAFVETWQSFYRKKLKEVWKPAV

SEQ ID NO: 48649 - protein, 979 aa, synthetic construct
  REGION 1..979: note = engineered CasX variant
QEIKRINKIRRRLVKDSNTKKAGKTGPMKTLLVRVMTPDLRERLENLRKKPENIPQPISNTSRANLNKLLTDYTEMKKAILHVYWEEFQKDPVGLMSRVAQPASKKIDQNKLKPEMDEKGNLTTAGFACSQCGQPLFVYKLEQVSEKGKAYTNYFGRCNVAEHEKLILLDQLKPEKDSDEAVTYSLGKFGQRALDFYSIHVTKESTHPVKPLAQIAGNRYASGPVGKALRDACMGTIASFLSKYQDIIIEHQKVVKGNQKRLESLRELAGKENLEYPSVTLPPQPHTKEGVDAYNEVIARVRMWVNLNLWQKLKLSRDDAKPLLRLKGFPSFPLVERQANEVDWWDMVCNVKKLINEKKEDGKVFWQNLAGYKRQEALRPYLSSEEDRKKGKKFARYQLGDLLLHLEKKHGEYDWGKVYDEAWERIDKKVEGLSKHIKLEEERRSEDAQSKAALTDWLRAKASFVIEGLKEADKDEFCRCELKLQKWYGDLRGKPFAIEAENSILDISGFSKQYNCAFIWQKDGVKKLNLYLIINYFKGGKLRFKKIKPEAFEANRFYTVINKKSGEIVPMEVNFNFDDPNLIILPLAFGKRQGREFIWNDLLSLETGSLKLANGRVIEKTLYNRRTRQDEPALFVALTFERREVLDSSNIKPMNLIGVDRGENIPAVIALTDPEGCPLSRFKDSLGNPTHILRIGESYKEKQRTIQAKKEVEQRRAGGYSRKYASKAKNLADDMVRNTARDLLYYAVTQDAMLIFENLSRGFGRQGKRTFMAERQYTRMEDWLTAKLAYEGLPSKTYLSKTLAQYTSKTCSNCGFTITSADYDRVLEKLKKTATGWMTTINGKELKVEGQITYYNRYKRQNVVKDLSVELDRLSEESVNNDISSWTKGRSGEALSLLKKRFSHRPVQEKFVCLNCGFETHADEQAALNIARSWLFLRSQEYKKYQTNKTTGNTDKRAFVETWQSFYRKKLKEVWKPAV

SEQ ID NO: 48650 - protein, 978 aa, synthetic construct
  REGION 1..978: note = engineered CasX variant
QEIKRINKIRRRLVKDSNTKKAGKTGPMKTLLVRVMTPDLRERLENLRKKPENIPQPISNTSRANLNKLLTDYTEMKKAILHVYWEEFQKDPVGLMSRVAQPASKKIDQNKLKPEMDEKGNLTTAGFACSQCGQPLFVYKLEQVSEKGKAYTNYFGRCNVAEHEKLILLDQLKPEKDSDEAVTYSLGKFGQRALDFYSIHVTKESTHPVKPLAQIAGNRYASGPVGKALRDACMGTIASFLSKYQDIIIEHQKVVKGNQKRLESLRELAGKENLEYPSVTLPPQPHTKEGVDAYNEVIARVRMWVNLNLWQKLKLSRDDAKPLLRLKGFPSFPLVERQANEVDWWDMVCNVKKLINEKKEDGKVFWQNLAGYKRQEALRPYLSSEEDRKKGKKFARYQLGDLLLHLEKKHGEDWGDVYDEAWERIDKKVEGLSKHIKLEEERRSEDAQSKAALTDWLRAKASFVIEGLKEADKDEFCRCELKLQKWYGDLRGKPFAIEAENSILDISGFSKQYNCAFIWQKDGVKKLNLYLIINYFKGGKLRFKKIKPEAFEANRFYTVINKKSGEIVPMEVNFNFDDPNLIILPLAFGKRQGREFIWNDLLSLETGSLKLANGRVIEKTLYNRRTRQDEPALFVALTFERREVLDSSNIKPMNLIGVDRGENIPAVIALTDPEGCPLSRFKDSLGNPTHILRIGESYKEKQRTIQAKKEVEQRRAGGYSRKYASKAKNLADDMVRNTARDLLYYAVTQDAMLIFENLSRGFGRQGKRTFMAERQYTRMEDWLTAKLAYEGLPSKTYLSKTLAQYTSKTCSNCGFTITSADYDRVLEKLKKTATGWMTTINGKELKVEGQITYYNRYKRQNVVKDLSVELDRLSEESVNNDISSWTKGRSGEALSLLKKRFSHRPVQEKFVCLNCGFETHADEQAALNIARSWLFLRSQEYKKYQTNKTTGNTDKRAFVETWQSFYRKKLKEVWKPAV

SEQ ID NO: 48651 - protein, 978 aa, synthetic construct
  REGION 1..978: note = engineered CasX variant
QEIKRINKIRRRLVKDSNTKKAGKTGPMKTLLVRVMTPDLRERLENLRKKPENIPQPISNTSRANLNKLLTDYTEMKKAILHVYWEEFQKDPVGLMSRVAQPASKKIDQNKLKPEMDEKGNLTTAGFACSQCGQPLFVYKLEQVSEKGKAYTNYFGRCNVAEHEKLILLDQLKPEKDSDEAVTYSLGKFGQRALDFYSIHVTKESTHPVKPLAQIAGNRYASGPVGKALRDACMGTIASFLSKYQDIIIEHQKVVKGNQKRLESLRELAGKENLEYPSVTLPPQPHTKEGVDAYNEVIARVRMWVNLNLWQKLKLSRDDAKPLLRLKGFPSFPLVERQANEVDWWDMVCNVKKLINEKKEDGKVFWQNLAGYKRQEALRPYLSSEEDRKKGKKFARYQLGDLLLHLEKKHGEDWGKVYGEAWERIDKKVEGLSKHIKLEEERRSEDAQSKAALTDWLRAKASFVIEGLKEADKDEFCRCELKLQKWYGDLRGKPFAIEAENSILDISGFSKQYNCAFIWQKDGVKKLNLYLIINYFKGGKLRFKKIKPEAFEANRFYTVINKKSGEIVPMEVNFNFDDPNLIILPLAFGKRQGREFIWNDLLSLETGSLKLANGRVIEKTLYNRRTRQDEPALFVALTFERREVLDSSNIKPMNLIGVDRGENIPAVIALTDPEGCPLSRFKDSLGNPTHILRIGESYKEKQRTIQAKKEVEQRRAGGYSRKYASKAKNLADDMVRNTARDLLYYAVTQDAMLIFENLSRGFGRQGKRTFMAERQYTRMEDWLTAKLAYEGLPSKTYLSKTLAQYTSKTCSNCGFTITSADYDRVLEKLKKTATGWMTTINGKELKVEGQITYYNRYKRQNVVKDLSVELDRLSEESVNNDISSWTKGRSGEALSLLKKRFSHRPVQEKFVCLNCGFETHADEQAALNIARSWLFLRSQEYKKYQTNKTTGNTDKRAFVETWQSFYRKKLKEVWKPAV

SEQ ID NO: 48652 - protein, 978 aa, synthetic construct
  REGION 1..978: note = engineered CasX variant
QEIKRINKIRRRLVKDSNTKKAGKTGPMKTLLVRVMTPDLRERLENLRKKPENIPQPISNTSRANLNKLLTDYTEMKKAILHVYWEEFQKDPVGLMSRVAQPASKKIDQNKLKPEMDEKGNLTTAGFACSQCGQPLFVYKLEQVSEKGKAYTNYFGRCNVAEHEKLILLDQLKPEKDSDEAVTYSLGKFGQRALDFYSIHVTKESTHPVKPLAQIAGNRYASGPVGKALRDACMGTIASFLSKYQDIIIEHQKVVKGNQKRLESLRELAGKENLEYPSVTLPPQPHTKEGVDAYNEVIARVRMWVNLNLWQKLKLSRDDAKPLLRLKGFPSFPLVERQANEVDWWDMVCNVKKLINEKKEDGKVFWQNLAGYKRQEALRPYLSSEEDRKKGKKFARYQLGDLLLHLEKKHGEDWGKVYDEAWERIDKKVEGLSKHIKLEEERRSEDAQSKAALTDWLRAKASFVIEGKKEADKDEFCRCELKLQKWYGDLRGKPFAIEAENSILDISGFSKQYNCAFIWQKDGVKKLNLYLIINYFKGGKLRFKKIKPEAFEANRFYTVINKKSGEIVPMEVNFNFDDPNLIILPLAFGKRQGREFIWNDLLSLETGSLKLANGRVIEKTLYNRRTRQDEPALFVALTFERREVLDSSNIKPMNLIGVDRGENIPAVIALTDPEGCPLSRFKDSLGNPTHILRIGESYKEKQRTIQAKKEVEQRRAGGYSRKYASKAKNLADDMVRNTARDLLYYAVTQDAMLIFENLSRGFGRQGKRTFMAERQYTRMEDWLTAKLAYEGLPSKTYLSKTLAQYTSKTCSNCGFTITSADYDRVLEKLKKTATGWMTTINGKELKVEGQITYYNRYKRQNVVKDLSVELDRLSEESVNNDISSWTKGRSGEALSLLKKRFSHRPVQEKFVCLNCGFETHADEQAALNIARSWLFLRSQEYKKYQTNKTTGNTDKRAFVETWQSFYRKKLKEVWKPAV

SEQ ID NO: 48653 - protein, 978 aa, synthetic construct
  REGION 1..978: note = engineered CasX variant
QEIKRINKIRRRLVKDSNTKKAGKTGPMKTLLVRVMTPDLRERLENLRKKPENIPQPISNTSRANLNKLLTDYTEMKKAILHVYWEEFQKDPVGLMSRVAQPASKKIDQNKLKPEMDEKGNLTTAGFACSQCGQPLFVYKLEQVSEKGKAYTNYFGRCNVAEHEKLILLDQLKPEKDSDEAVTYSLGKFGQRALDFYSIHVTKESTHPVKPLAQIAGNRYASGPVGKALRDACMGTIASFLSKYQDIIIEHQKVVKGNQKRLESLRELAGKENLEYPSVTLPPQPHTKEGVDAYNEVIARVRMWVNLNLWQKLKLSRDDAKPLLRLKGFPSFPLVERQANEVDWWDMVCNVKKLINEKKEDGKVFWQNLAGYKRQEALRPYLSSEEDRKKGKKFARYQLGDLLLHLEKKHGEDWGKVYDEAWERIDKKVEGLSKHIKLEEERRSEDAQSKAALTDWLRAKASFVIEGSKEADKDEFCRCELKLQKWYGDLRGKPFAIEAENSILDISGFSKQYNCAFIWQKDGVKKLNLYLIINYFKGGKLRFKKIKPEAFEANRFYTVINKKSGEIVPMEVNFNFDDPNLIILPLAFGKRQGREFIWNDLLSLETGSLKLANGRVIEKTLYNRRTRQDEPALFVALTFERREVLDSSNIKPMNLIGVDRGENIPAVIALTDPEGCPLSRFKDSLGNPTHILRIGESYKEKQRTIQAKKEVEQRRAGGYSRKYASKAKNLADDMVRNTARDLLYYAVTQDAMLIFENLSRGFGRQGKRTFMAERQYTRMEDWLTAKLAYEGLPSKTYLSKTLAQYTSKTCSNCGFTITSADYDRVLEKLKKTATGWMTTINGKELKVEGQITYYNRYKRQNVVKDLSVELDRLSEESVNNDISSWTKGRSGEALSLLKKRFSHRPVQEKFVCLNCGFETHADEQAALNIARSWLFLRSQEYKKYQTNKTTGNTDKRAFVETWQSFYRKKLKEVWKPAV

SEQ ID NO: 48654 - protein, 979 aa, synthetic construct
  REGION 1..979: note = engineered CasX variant
QEIKRINKIRRRLVKDSNTKKAGKTGPMKTLLVRVMTPDLRERLENLRKKPENIPQPISNTSRANLNKLLTDYTEMKKAILHVYWEEFQKDPVGLMSRVAQPASKKIDQNKLKPEMDEKGNLTTAGFACSQCGQPLFVYKLEQVSEKGKAYTNYFGRCNVAEHEKLILLDQLKPEKDSDEAVTYSLGKFGQRALDFYSIHVTKESTHPVKPLAQIAGNRYASGPVGKALRDACMGTIASFLSKYQDIIIEHQKVVKGNQKRLESLRELAGKENLEYPSVTLPPQPHTKEGVDAYNEVIARVRMWVNLNLWQKLKLSRDDAKPLLRLKGFPSFPLVERQANEVDWWDMVCNVKKLINEKKEDGKVFWQNLAGYKRQEALRPYLSSEEDRKKGKKFARYQLGDLLLHLEKKHGEDWGKVYDEAWERIDKKVEGLSKHIKLEEERRSEDAQSKAALTDWLRAKASFVIEGLKEADDKDEFCRCELKLQKWYGDLRGKPFAIEAENSILDISGFSKQYNCAFIWQKDGVKKLNLYLIINYFKGGKLRFKKIKPEAFEANRFYTVINKKSGEIVPMEVNFNFDDPNLIILPLAFGKRQGREFIWNDLLSLETGSLKLANGRVIEKTLYNRRTRQDEPALFVALTFERREVLDSSNIKPMNLIGVDRGENIPAVIALTDPEGCPLSRFKDSLGNPTHILRIGESYKEKQRTIQAKKEVEQRRAGGYSRKYASKAKNLADDMVRNTARDLLYYAVTQDAMLIFENLSRGFGRQGKRTFMAERQYTRMEDWLTAKLAYEGLPSKTYLSKTLAQYTSKTCSNCGFTITSADYDRVLEKLKKTATGWMTTINGKELKVEGQITYYNRYKRQNVVKDLSVELDRLSEESVNNDISSWTKGRSGEALSLLKKRFSHRPVQEKFVCLNCGFETHADEQAALNIARSWLFLRSQEYKKYQTNKTTGNTDKRAFVETWQSFYRKKLKEVWKPAV

SEQ ID NO: 48655 - protein, 979 aa, synthetic construct
  REGION 1..979: note = engineered CasX variant
QEIKRINKIRRRLVKDSNTKKAGKTGPMKTLLVRVMTPDLRERLENLRKKPENIPQPISNTSRANLNKLLTDYTEMKKAILHVYWEEFQKDPVGLMSRVAQPASKKIDQNKLKPEMDEKGNLTTAGFACSQCGQPLFVYKLEQVSEKGKAYTNYFGRCNVAEHEKLILLDQLKPEKDSDEAVTYSLGKFGQRALDFYSIHVTKESTHPVKPLAQIAGNRYASGPVGKALRDACMGTIASFLSKYQDIIIEHQKVVKGNQKRLESLRELAGKENLEYPSVTLPPQPHTKEGVDAYNEVIARVRMWVNLNLWQKLKLSRDDAKPLLRLKGFPSFPLVERQANEVDWWDMVCNVKKLINEKKEDGKVFWQNLAGYKRQEALRPYLSSEEDRKKGKKFARYQLGDLLLHLEKKHGEDWGKVYDEAWERIDKKVEGLSKHIKLEEERRSEDAQSKAALTDWLRAKASFVIEGLKEADKDEFCRCELKLQKWYGDLRGKPFAIEAENSILDISGFSKQYNCAFIWQKDGVKKLNLYLIINYFKGGKLRFKKIKPEAFEANRFYTVINKKSGEIVPMEVNFNFDDPNLIILPLAFGKRQGREFIWNDLLSLETGSLKLANGRVIEKTLYNRRTRQDEPALFVALTFERREVLDSSNIKPMNLIGVDRGENIPAVIALTDPEGCPLSRFKDSLGNPTHILRIGESYKEKQRTIQAKKEVEQRRAGGYSRKYASKAKNLADDMVRNTARDLLYYAVTQDAMLIFENLSRGFGRQGKRTFMAERQYTRMEDWLTAKLAYEGLPSKTYLSKTLAQYTSKTCSNCGFTITSADYDRVLEKLKKTATGWMTTINGKELKVEGQITYYNRYKRQNVVKDLSVELDRLSEESVNNDISSWTKGRSGNEALSLLKKRFSHRPVQEKFVCLNCGFETHADEQAALNIARSWLFLRSQEYKKYQTNKTTGNTDKRAFVETWQSFYRKKLKEVWKPAV

SEQ ID NO: 48656 - protein, 978 aa, synthetic construct
  REGION 1..978: note = engineered CasX variant
QEIKRINKIRRRLVKDSNTKKAGKTGPMKTLLVRVMTPDLRERLENLRKKPENIPQPISNTSRANLNKLLTDYTEMKKAILHVYWEEFQKDPVGLMSRVAQPASKKIDQNKLKPEMDEKGNLTTAGFACSQCGQPLFVYKLEQVSEKGKAYTNYFGRCNVAEHEKLILLDQLKPEKDSDEAVTYSLGKFGQRALDFYSIHVTKESTHPVKPLAQIAGNRYASGPVGKALRDACMGTIASFLSKYQDIIIEHQKVVKGNQKRLESLRELAGKENLEYPSVTLPPQPHTKEGVDAYNEVIARVRMWVNLNLWQKLKLSRDDAKPLLRLKGFPSFPLVERQANEVDWWDMVCNVKKLINEKKEDGKVFWQNLAGYKRQEALRPYLSSEEDRQKGKKFARYQLGDLLLHLEKKHGEDWGKVYDEAWERIDKKVEGLSKHIKLEEERRSEDAQSKAALTDWLRAKASFVIEGLKEADKDEFCRCELKLQKWYGDLRGKPFAIEAENSILDISGFSKQYNCAFIWQKDGVKKLNLYLIINYFKGGKLRFKKIKPEAFEANRFYTVINKKSGEIVPMEVNFNFDDPNLIILPLAFGKRQGREFIWNDLLSLETGSLKLANGRVIEKTLYNRRTRQDEPALFVALTFERREVLDSSNIKPMNLIGVDRGENIPAVIALTDPEGCPLSRFKDSLGNPTHILRIGESYKEKQRTIQAKKEVEQRRAGGYSRKYASKAKNLADDMVRNTARDLLYYAVTQDAMLIFENLSRGFGRQGKRTFMAERQYTRMEDWLTAKLAYEGLPSKTYLSKTLAQYTSKTCSNCGFTITSADYDRVLEKLKKTATGWMTTINGKELKVEGQITYYNRYKRQNVVKDLSVELDRLSEESVNNDISSWTKGRSGEALSLLKKRFSHRPVQEKFVCLNCGFETHADEQAALNIARSWLFLRSQEYKKYQTNKTTGNTDKRAFVETWQSFYRKKLKEVWKPAV

SEQ ID NO: 48657 - protein, 978 aa, synthetic construct
  REGION 1..978: note = engineered CasX variant
QEIKRINKIRRRLVKDSNTKKAGKTGPMKTLLVRVMTPDLRERLENLRKKPENIPQPISNTSRANLNKLLTDYTEMKKAILHVYWEEFQKDPVGLMSRVAQPASKKIDQNKLKPEMDEKGNLTTAGFACSQCGQPLFVYKLEQVSEKGKAYTNYFGRCNVAEHEKLILLDQLKPEKDSDEAVTYSLGKFGQRALDFYSIHVTKESTHPVKPLAQIAGNRYASGPVGKALRDACMGTIASFLSKYQDIIIEHQKVVKGNQKRLESLRELAGKENLEYPSVTLPPQPHTKEGVDAYNEVIARVRMWVNLNLWQKLKLSRDDAKPLLRLKGFPSFPLVERQANEVDWWDMVCNVKKLINEKKEDGKVFWQNLAGYKRQEALRPYLSSEEDRKKGKKFARYQLGDLLLHLEKKHGEDWGKVYDEAWERIDKKVEGLSKHIKLEEERRSEDAQSKAALTDWLRAKASFVIEGLKEADKDEFCRCELKLQKWYGDLRGKPFAIEAENSILDISGFSKQYNCAFIWQKDGVKKLNLYLIINYFKGGKLRFKKIKPEAFEANRFYTVINKKSGEIVPMEVNFNFDDPNLIILPLAFGKRQGREFIWNDLLSLETGSLKLANGRVIEKTLYNRRTRQDEPALFVALTFERREVLDSSNIKPMNLIGVDRGENIPAVIALTDPEGCPLSRFKDSLGNPTHILRIGESYKEKQRTIQAKKEVEQRRAGGYSRKYASKAKNLADDMVRNTARDLLYYAVTQDAMLIFENLSRGFGRQGKRTFMAERQYTRMEDWLTAKLAYEGLPSQTYLSKTLAQYTSKTCSNCGFTITSADYDRVLEKLKKTATGWMTTINGKELKVEGQITYYNRYKRQNVVKDLSVELDRLSEESVNNDISSWTKGRSGEALSLLKKRFSHRPVQEKFVCLNCGFETHADEQAALNIARSWLFLRSQEYKKYQTNKTTGNTDKRAFVETWQSFYRKKLKEVWKPAV

SEQ ID NO: 48658 - protein, 978 aa, synthetic construct
  REGION 1..978: note = engineered CasX variant
QEIKRINKIRRRLVKDSNTKKAGKTGPMKTLLVRVMTPDLRERLENLRKKPENIPQPISNTSRANLNKLLTDYTEMKKAILHVYWEEFQKDPVGLMSRVAQPASKKIDQNKLKPEMDEKGNLTTAGFACSQCGQPLFVYKLEQVSEKGKAYTNYFGRCNVAEHEKLILLDQLKPEKDSDEAVTYSLGKFGQRALDFYSIHVTKESTHPVKPLAQIAGNRYASGPVGKALRDACMGTIASFLSKYQDIIIEHQKVVKGNQKRLESLRELAGKENLEYPSVTLPPQPHTKEGVDAYNEVIARVRMWVNLNLWQKLKLSRDDAKPLLRLKGFPSFPLVERQANEVDWWDMVCNVKKLINEKKEDGKVFWQNLAGYKRQEALRPYLSSEEDRKKGKKFARYQLGDLLLHLEKKHGEDWGKVYDEAWERIDKKVEGLSKHIKLEEERRSEDAQSKAALTDWLRAKASFVIEGLKEADKDEFCRCELKLQKWYGDLRGKPFAIEAENSILDISGFSKQYNCAFIWQKDGVKKLNLYLIINYFKGGKLRFKKIKPEAFEANRFYTVINKKSGEIVPMEVNFNFDDPNLIILPLAFGKRQGREFIWNDLLSLETGSLKLANGRVIEKTLYNRRTRQDEPALFVALTFERREVLDSSNIKPMNLIGVDRGENIPAVIALTDPEGCPLSRFKDSLGNPTHILRIGESYKEKQRTIQAKKEVEQRRAGGYSRKYASKAKNLADDMVRNTARDLLYYAVTQDAMLIFENLSRGFGRQGKRTFMAERQYTRMEDWLTAKLAYNGLPSKTYLSKTLAQYTSKTCSNCGFTITSADYDRVLEKLKKTATGWMTTINGKELKVEGQITYYNRYKRQNVVKDLSVELDRLSEESVNNDISSWTKGRSGEALSLLKKRFSHRPVQEKFVCLNCGFETHADEQAALNIARSWLFLRSQEYKKYQTNKTTGNTDKRAFVETWQSFYRKKLKEVWKPAV

SEQ ID NO: 48659 - protein, 978 aa, synthetic construct
  REGION 1..978: note = engineered CasX variant
QEIKRINKIRRRLVKDSNTKKAGKTGPMKTLLVRVMTPDLRERLENLRKKPENIPQPISNTSRANLNKLLTDYTEMKKAILHVYWEEFQKDPVGLMSRVAQPASKKIDQNKLKPEMDEKGNLTTAGFACSQCGQPLFVYKLEQVSEKGKAYTNYFGRCNVAEHEKLIQLDQLKPEKDSDEAVTYSLGKFGQRALDFYSIHVTKESTHPVKPLAQIAGNRYASGPVGKALRDACMGTIASFLSKYQDIIIEHQKVVKGNQKRLESLRELAGKENLEYPSVTLPPQPHTKEGVDAYNEVIARVRMWVNLNLWQKLKLSRDDAKPLLRLKGFPSFPLVERQANEVDWWDMVCNVKKLINEKKEDGKVFWQNLAGYKRQEALRPYLSSEEDRKKGKKFARYQLGDLLLHLEKKHGEDWGKVYDEAWERIDKKVEGLSKHIKLEEERRSEDAQSKAALTDWLRAKASFVIEGLKEADKDEFCRCELKLQKWYGDLRGKPFAIEAENSILDISGFSKQYNCAFIWQKDGVKKLNLYLIINYFKGGKLRFKKIKPEAFEANRFYTVINKKSGEIVPMEVNFNFDDPNLIILPLAFGKRQGREFIWNDLLSLETGSLKLANGRVIEKTLYNRRTRQDEPALFVALTFERREVLDSSNIKPMNLIGVDRGENIPAVIALTDPEGCPLSRFKDSLGNPTHILRIGESYKEKQRTIQAKKEVEQRRAGGYSRKYASKAKNLADDMVRNTARDLLYYAVTQDAMLIFENLSRGFGRQGKRTFMAERQYTRMEDWLTAKLAYEGLPSKTYLSKTLAQYTSKTCSNCGFTITSADYDRVLEKLKKTATGWMTTINGKELKVEGQITYYNRYKRQNVVKDLSVELDRLSEESVNNDISSWTKGRSGEALSLLKKRFSHRPVQEKFVCLNCGFETHADEQAALNIARSWLFLRSQEYKKYQTNKTTGNTDKRAFVETWQSFYRKKLKEVWKPAV

SEQ ID NO: 48660 - protein, 978 aa, synthetic construct
  REGION 1..978: note = engineered CasX variant
QEIKRINKIRRRLVKDSNTKKAGKTGPMKTLLVRVMTPDLRERLENLRKKPENIPQPISNTSRANLNKLLTDYTEMKKAILHVYWEEFQKDPVGLMSRVAQPASKKIDQNKLKPEMDEKGNLTTAGFACSQCGQPLFVYKLEQVSEKGKAYTNYFGRCNVAEHEKLILLDQLKPEKDSDEAVTYSLGKFGQRALDFYSIHVTKESTHPVKPLAQIAGNRYASGPVGKALRDACMGTIASFLSKYQDIIIEHQKVVKGNQKRLESLRELAGKENLEYPSVTLPPQPHTKEGVDAYNEVIARVRMWVNLNLWQKLKLSRDDAKPLLRLKGFPSFPLVERQANEVDWWDMVCNVKKLINEKKEDGKVFWQNLAIYKRQEALRPYLSSEEDRKKGKKFARYQLGDLLLHLEKKHGEDWGKVYDEAWERIDKKVEGLSKHIKLEEERRSEDAQSKAALTDWLRAKASFVIEGLKEADKDEFCRCELKLQKWYGDLRGKPFAIEAENSILDISGFSKQYNCAFIWQKDGVKKLNLYLIINYFKGGKLRFKKIKPEAFEANRFYTVINKKSGEIVPMEVNFNFDDPNLIILPLAFGKRQGREFIWNDLLSLETGSLKLANGRVIEKTLYNRRTRQDEPALFVALTFERREVLDSSNIKPMNLIGVDRGENIPAVIALTDPEGCPLSRFKDSLGNPTHILRIGESYKEKQRTIQAKKEVEQRRAGGYSRKYASKAKNLADDMVRNTARDLLYYAVTQDAMLIFENLSRGFGRQGKRTFMAERQYTRMEDWLTAKLAYEGLPSKTYLSKTLAQYTSKTCSNCGFTITSADYDRVLEKLKKTATGWMTTINGKELKVEGQITYYNRYKRQNVVKDLSVELDRLSEESVNNDISSWTKGRSGEALSLLKKRFSHRPVQEKFVCLNCGFETHADEQAALNIARSWLFLRSQEYKKYQTNKTTGNTDKRAFVETWQSFYRKKLKEVWKPAV

SEQ ID NO: 48661 - protein, 978 aa, synthetic construct
  REGION 1..978: note = engineered CasX variant
QEIKRINKIRRRLVKDSNTKKAGKTGPMKTLLVRVMTPDLRERLENLRKKPENIPQPISNTSRANLNKLLTDYTEMKKAILHVYWEEFQKDPVGLMSRVAQPASKKIDQNKLKPEMDEKGNLTTAGFACSQCGQPLFVYKLEQVSEKGKAYTNYFGRCNVAEHEKLILLDQLKPEKDSDEAVTYSLGKFGQRALDFYSIHVTKESTHPVKPLAQIAGNRYASGPVGKALRDACMGTIASFLSKYQDIIIEHQKVVKGNQKRLESLRELAGKENLEYPSVTLPPQPHTKEGVDAYNEVIARVRMWVNLNLWQKLKLSRDDAKPLLRLKGFPSFPLVERQANEVDWWDMVCNVKKLINEKKEDGKVFWQNLAGYKRQEALRPYLSSEEDREKGKKFARYQLGDLLLHLEKKHGEDWGKVYDEAWERIDKKVEGLSKHIKLEEERRSEDAQSKAALTDWLRAKASFVIEGLKEADKDEFCRCELKLQKWYGDLRGKPFAIEAENSILDISGFSKQYNCAFIWQKDGVKKLNLYLIINYFKGGKLRFKKIKPEAFEANRFYTVINKKSGEIVPMEVNFNFDDPNLIILPLAFGKRQGREFIWNDLLSLETGSLKLANGRVIEKTLYNRRTRQDEPALFVALTFERREVLDSSNIKPMNLIGVDRGENIPAVIALTDPEGCPLSRFKDSLGNPTHILRIGESYKEKQRTIQAKKEVEQRRAGGYSRKYASKAKNLADDMVRNTARDLLYYAVTQDAMLIFENLSRGFGRQGKRTFMAERQYTRMEDWLTAKLAYEGLPSKTYLSKTLAQYTSKTCSNCGFTITSADYDRVLEKLKKTATGWMTTINGKELKVEGQITYYNRYKRQNVVKDLSVELDRLSEESVNNDISSWTKGRSGEALSLLKKRFSHRPVQEKFVCLNCGFETHADEQAALNIARSWLFLRSQEYKKYQTNKTTGNTDKRAFVETWQSFYRKKLKEVWKPAV

SEQ ID NO: 48662 - protein, 978 aa, synthetic construct
  REGION 1..978: note = engineered CasX variant
QEIKRINKIRRRLVKDSNTKKAGKTGPMKTLLVRVMTPDLRERLENLRKKPENIPQPISNTSRANLNKLLTDYTEMKKAILHVYWEEFQKDPVGLMSRVAQPASKKIDQNKLKPEMDEKGNLTTAGFACSQCGQPLFVYKLEQVSEKGKAYTNYFGRCNVAEHEKLILLDQLKPEKDSDEAVTYSLGKFGQRALDFYSIHVTKESTHPVKPLAQIAGNRYASGPVGKALRDACMGTIASFLSKYQDIIIEHQKVVKGNQKRLESLRELAGKENLEYPSVTLPPQPHTKEGVDAYNEVIARVRMWVNLNLWQKLKLSRDDAKPLLRLKGFPSFPLVERQANEVDWWDMVCNVKKLINEKKEDGKVFWQNLAGYKRQEALRPYLSSEEDRKKGKKFARYQLGDLLLHLEKKHGEDWGKVYDEAWERIDKKVEGLSKHIKLEEERRSEDAQSKAALTDWLRAKASFVIEGLKEADKDEFCRCELKLQKWYGDLRGKPFAIEAENSILDISGFSKQYNCAFIWQKDGVKKLNLYLIINYFKGGKLRFKKIKPEAFEANRFYTVINKKSGEIVIMEVNFNFDDPNLIILPLAFGKRQGREFIWNDLLSLETGSLKLANGRVIEKTLYNRRTRQDEPALFVALTFERREVLDSSNIKPMNLIGVDRGENIPAVIALTDPEGCPLSRFKDSLGNPTHILRIGESYKEKQRTIQAKKEVEQRRAGGYSRKYASKAKNLADDMVRNTARDLLYYAVTQDAMLIFENLSRGFGRQGKRTFMAERQYTRMEDWLTAKLAYEGLPSKTYLSKTLAQYTSKTCSNCGFTITSADYDRVLEKLKKTATGWMTTINGKELKVEGQITYYNRYKRQNVVKDLSVELDRLSEESVNNDISSWTKGRSGEALSLLKKRFSHRPVQEKFVCLNCGFETHADEQAALNIARSWLFLRSQEYKKYQTNKTTGNTDKRAFVETWQSFYRKKLKEVWKPAV

SEQ ID NO: 48663 - protein, 978 aa, synthetic construct
  REGION 1..978: note = engineered CasX variant
QEGKRINKIRRRLVKDSNTKKAGKTGPMKTLLVRVMTPDLRERLENLRKKPENIPQPISNTSRANLNKLLTDYTEMKKAILHVYWEEFQKDPVGLMSRVAQPASKKIDQNKLKPEMDEKGNLTTAGFACSQCGQPLFVYKLEQVSEKGKAYTNYFGRCNVAEHEKLILLAQLKPEKDSDEAVTYSLGKFGQRALDFYSIHVTKESTHPVKPLAQIAGNRYASGPVGKALRGACMGTIASFLSKYQDIIIEHQKVVKGNQKRLESLRELAGKENLEYPSVTLPPQPHTKEGVDAYNEVIARVRMWVNLNLWQKLKLSRDDAKPLLRLKGFPSFPLVERQANEVDWWDMVCNVKKLINEKKEDGKVFWQNLAGYKRQEALRPYLSSEEDRKKGKKFARYQLGDLLLHLEKKHGEDWGKVYDEAWERIDKKVEGLSKHIKLEEERRSEDAQSKAALTDWLRAKASFVIEGLKEADKDEFCRCELKLQKWYGDLRGKPFAIEAENSILDISGFSKQYNCAFIWQKDGVKKLNLYLIINYFKGGKLRFKKIKPEAFEANRFYTVINKKSGEIVPMEVNFNFDDPNLIILPLAFGKRQGREFIWNDLLSLETGSLKLANGRVIEKTLYNRRTRQDEPALFVALTFERREVLDSSNIKPMNLIGVDRGENIPAVIALTDPEGCPLSRFKDSLGNPTHILRIGESYKEKQRTIQAKKEVEQRRAGGYSRKYASKAKNLADDMVRNTARDLLYYAVTQDAMLIFENLSRGFGRQGKRTFMAERQYTRMEDWLTAKLAYEGLPSKTYLSKTLAQYTSKTCSNCGFTITSADYDRVLEKLKKTATGWMTTINGKELKVEGQITYYNRYKRQNVVKDLSVELDRLSEESVNNDISSWTKGRSGEALSLLKKRFSHRPVQEKFVCLNCGFETHADEQAALNIARSWLFLRSQEYKKYQTNKTTGNTDKRAFVETWQSFYRKKLKEVWKPAV

SEQ ID NO: 48664 - protein, 978 aa, synthetic construct
  REGION 1..978: note = engineered CasX variant
QEGKRINKIRRRLVKDSNTKKAGKTGPMKTLLVRVMTPDLRERLENLRKKPENIPQPISNTSRANLNKLLTDYTEMKKAILHVYWEEFQKDPVGLMSRVAQPASKKIDQNKLKPEMDEKGNLTTAGFACSQCGQPLFVYKLEQVSEKGKAYTNYFGRCNVAEHEKLILLAQLKPEKDSDEAVTYSLGKFGQRALDFYSIHVTKESTHPVKPLAQIAGNRYASGPVGKALRDACMGTIASFLSKYQDIIIEHQKVVKGNQKRLESLRELAGKENLEYPSVTLPPQPHTKEGVDAYNEVIARVRMWVNLNLWQKLKLSRDDAKPLLRLKNFPSFPLVERQANEVDWWDMVCNVKKLINEKKEDGKVFWQNLAGYKRQEALRPYLSSEEDRKKGKKFARYQLGDLLLHLEKKHGEDWGKVYDEAWERIDKKVEGLSKHIKLEEERRSEDAQSKAALTDWLRAKASFVIEGLKEADKDEFCRCELKLQKWYGDLRGKPFAIEAENSILDISGFSKQYNCAFIWQKDGVKKLNLYLIINYFKGGKLRFKKIKPEAFEANRFYTVINKKSGEIVPMEVNFNFDDPNLIILPLAFGKRQGREFIWNDLLSLETGSLKLANGRVIEKTLYNRRTRQDEPALFVALTFERREVLDSSNIKPMNLIGVDRGENIPAVIALTDPEGCPLSRFKDSLGNPTHILRIGESYKEKQRTIQAKKEVEQRRAGGYSRKYASKAKNLADDMVRNTARDLLYYAVTQDAMLIFENLSRGFGRQGKRTFMAERQYTRMEDWLTAKLAYEGLPSKTYLSKTLAQYTSKTCSNCGFTITSADYDRVLEKLKKTATGWMTTINGKELKVEGQITYYNRYKRQNVVKDLSVELDRLSEESVNNDISSWTKGRSGEALSLLKKRFSHRPVQEKFVCLNCGFETHADEQAALNIARSWLFLRSQEYKKYQTNKTTGNTDKRAFVETWQSFYRKKLKEVWKPAV

SEQ ID NO: 48665 - protein, 978 aa, synthetic construct
  REGION 1..978: note = engineered CasX variant
QEGKRINKIRRRLVKDSNTKKAGKTGPMKTLLVRVMTPDLRERLENLRKKPENIPQPISNTSRANLNKLLTDYTEMKKAILHVYWEEFQKDPVGLMSRVAQPASKKIDQNKLKPEMDEKGNLTTAGFACSQCGQPLFVYKLEQVSEKGKAYTNYFGRCNVAEHEKLILLAQLKPEKDSDEAVTYSLGKFGQRALDFYSIHVTKESTHPVKPLAQIAGNRYASGPVGKALRDACMGTIASFLSKYQDIIIEHQKVVKGNQKRLESLRELAGKENLEYPSVTLPPQPHTKEGVDAYNEVIARVRMWVNLNLWQKLKLSRDDAKPLLRLKGFPSFPLVERQANEVDWWDMVCNVKKLINEKKEDGKVFWQNLAGYKRQEALRPYLSSEEDRKKGKKFARYQLGDLLNHLEKKHGEDWGKVYDEAWERIDKKVEGLSKHIKLEEERRSEDAQSKAALTDWLRAKASFVIEGLKEADKDEFCRCELKLQKWYGDLRGKPFAIEAENSILDISGFSKQYNCAFIWQKDGVKKLNLYLIINYFKGGKLRFKKIKPEAFEANRFYTVINKKSGEIVPMEVNFNFDDPNLIILPLAFGKRQGREFIWNDLLSLETGSLKLANGRVIEKTLYNRRTRQDEPALFVALTFERREVLDSSNIKPMNLIGVDRGENIPAVIALTDPEGCPLSRFKDSLGNPTHILRIGESYKEKQRTIQAKKEVEQRRAGGYSRKYASKAKNLADDMVRNTARDLLYYAVTQDAMLIFENLSRGFGRQGKRTFMAERQYTRMEDWLTAKLAYEGLPSKTYLSKTLAQYTSKTCSNCGFTITSADYDRVLEKLKKTATGWMTTINGKELKVEGQITYYNRYKRQNVVKDLSVELDRLSEESVNNDISSWTKGRSGEALSLLKKRFSHRPVQEKFVCLNCGFETHADEQAALNIARSWLFLRSQEYKKYQTNKTTGNTDKRAFVETWQSFYRKKLKEVWKPAV

SEQ ID NO: 48666 - protein, 978 aa, synthetic construct
  REGION 1..978: note = engineered CasX variant
QEGKRINKIRRRLVKDSNTKKAGKTGPMKTLLVRVMTPDLRERLENLRKKPENIPQPISNTSRANLNKLLTDYTEMKKAILHVYWEEFQKDPVGLMSRVAQPASKKIDQNKLKPEMDEKGNLTTAGFACSQCGQPLFVYKLEQVSEKGKAYTNYFGRCNVAEHEKLILLAQLKPEKDSDEAVTYSLGKFGQRALDFYSIHVTKESTHPVKPLAQIAGNRYASGPVGKALRDACMGTIASFLSKYQDIIIEHQKVVKGNQKRLESLRELAGKENLEYPSVTLPPQPHTKEGVDAYNEVIARVRMWVNLNLWQKLKLSRDDAKPLLRLKGFPSFPLVERQANEVDWWDMVCNVKKLINEKKEDGKVFWQNLAGYKRQEALRPYLSSEEDRKKGKKFARYQLGDLLWHLEKKHGEDWGKVYDEAWERIDKKVEGLSKHIKLEEERRSEDAQSKAALTDWLRAKASFVIEGLKEADKDEFCRCELKLQKWYGDLRGKPFAIEAENSILDISGFSKQYNCAFIWQKDGVKKLNLYLIINYFKGGKLRFKKIKPEAFEANRFYTVINKKSGEIVPMEVNFNFDDPNLIILPLAFGKRQGREFIWNDLLSLETGSLKLANGRVIEKTLYNRRTRQDEPALFVALTFERREVLDSSNIKPMNLIGVDRGENIPAVIALTDPEGCPLSRFKDSLGNPTHILRIGESYKEKQRTIQAKKEVEQRRAGGYSRKYASKAKNLADDMVRNTARDLLYYAVTQDAMLIFENLSRGFGRQGKRTFMAERQYTRMEDWLTAKLAYEGLPSKTYLSKTLAQYTSKTCSNCGFTITSADYDRVLEKLKKTATGWMTTINGKELKVEGQITYYNRYKRQNVVKDLSVELDRLSEESVNNDISSWTKGRSGEALSLLKKRFSHRPVQEKFVCLNCGFETHADEQAALNIARSWLFLRSQEYKKYQTNKTTGNTDKRAFVETWQSFYRKKLKEVWKPAV

SEQ ID NO: 48667 - protein, 978 aa, synthetic construct
  REGION 1..978: note = engineered CasX variant
QEGKRINKIRRRLVKDSNTKKAGKTGPMKTLLVRVMTPDLRERLENLRKKPENIPQPISNTSRANLNKLLTDYTEMKKAILHVYWEEFQKDPVGLMSRVAQPASKKIDQNKLKPEMDEKGNLTTAGFACSQCGQPLFVYKLEQVSEKGKAYTNYFGRCNVAEHEKLILLAQLKPEKDSDEAVTYSLGKFGQRALDFYSIHVTKESTHPVKPLAQIAGNRYASGPVGKALRDACMGTIASFLSKYQDIIIEHQKVVKGNQKRLESLRELAGKENLEYPSVTLPPQPHTKEGVDAYNEVIARVRMWVNLNLWQKLKLSRDDAKPLLRLKGFPSFPLVERQANEVDWWDMVCNVKKLINEKKEDGKVFWQNLAGYKRQEALRPYLSSEEDRKKGKKFARYQLGDLLLHLYKKHGEDWGKVYDEAWERIDKKVEGLSKHIKLEEERRSEDAQSKAALTDWLRAKASFVIEGLKEADKDEFCRCELKLQKWYGDLRGKPFAIEAENSILDISGFSKQYNCAFIWQKDGVKKLNLYLIINYFKGGKLRFKKIKPEAFEANRFYTVINKKSGEIVPMEVNFNFDDPNLIILPLAFGKRQGREFIWNDLLSLETGSLKLANGRVIEKTLYNRRTRQDEPALFVALTFERREVLDSSNIKPMNLIGVDRGENIPAVIALTDPEGCPLSRFKDSLGNPTHILRIGESYKEKQRTIQAKKEVEQRRAGGYSRKYASKAKNLADDMVRNTARDLLYYAVTQDAMLIFENLSRGFGRQGKRTFMAERQYTRMEDWLTAKLAYEGLPSKTYLSKTLAQYTSKTCSNCGFTITSADYDRVLEKLKKTATGWMTTINGKELKVEGQITYYNRYKRQNVVKDLSVELDRLSEESVNNDISSWTKGRSGEALSLLKKRFSHRPVQEKFVCLNCGFETHADEQAALNIARSWLFLRSQEYKKYQTNKTTGNTDKRAFVETWQSFYRKKLKEVWKPAV

SEQ ID NO: 48668 - protein, 978 aa, synthetic construct
  REGION 1..978: note = engineered CasX variant
QEGKRINKIRRRLVKDSNTKKAGKTGPMKTLLVRVMTPDLRERLENLRKKPENIPQPISNTSRANLNKLLTDYTEMKKAILHVYWEEFQKDPVGLMSRVAQPASKKIDQNKLKPEMDEKGNLTTAGFACSQCGQPLFVYKLEQVSEKGKAYTNYFGRCNVAEHEKLILLAQLKPEKDSDEAVTYSLGKFGQRALDFYSIHVTKESTHPVKPLAQIAGNRYASGPVGKALRDACMGTIASFLSKYQDIIIEHQKVVKGNQKRLESLRELAGKENLEYPSVTLPPQPHTKEGVDAYNEVIARVRMWVNLNLWQKLKLSRDDAKPLLRLKGFPSFPLVERQANEVDWWDMVCNVKKLINEKKEDGKVFWQNLAGYKRQEALRPYLSSEEDRKKGKKFARYQLGDLLLHLEKKHPEDWGKVYDEAWERIDKKVEGLSKHIKLEEERRSEDAQSKAALTDWLRAKASFVIEGLKEADKDEFCRCELKLQKWYGDLRGKPFAIEAENSILDISGFSKQYNCAFIWQKDGVKKLNLYLIINYFKGGKLRFKKIKPEAFEANRFYTVINKKSGEIVPMEVNFNFDDPNLIILPLAFGKRQGREFIWNDLLSLETGSLKLANGRVIEKTLYNRRTRQDEPALFVALTFERREVLDSSNIKPMNLIGVDRGENIPAVIALTDPEGCPLSRFKDSLGNPTHILRIGESYKEKQRTIQAKKEVEQRRAGGYSRKYASKAKNLADDMVRNTARDLLYYAVTQDAMLIFENLSRGFGRQGKRTFMAERQYTRMEDWLTAKLAYEGLPSKTYLSKTLAQYTSKTCSNCGFTITSADYDRVLEKLKKTATGWMTTINGKELKVEGQITYYNRYKRQNVVKDLSVELDRLSEESVNNDISSWTKGRSGEALSLLKKRFSHRPVQEKFVCLNCGFETHADEQAALNIARSWLFLRSQEYKKYQTNKTTGNTDKRAFVETWQSFYRKKLKEVWKPAV

SEQ ID NO: 48669 - protein, 979 aa, synthetic construct
  REGION 1..979: note = engineered CasX variant
QEGKRINKIRRRLVKDSNTKKAGKTGPMKTLLVRVMTPDLRERLENLRKKPENIPQPISNTSRANLNKLLTDYTEMKKAILHVYWEEFQKDPVGLMSRVAQPASKKIDQNKLKPEMDEKGNLTTAGFACSQCGQPLFVYKLEQVSEKGKAYTNYFGRCNVAEHEKLILLAQLKPEKDSDEAVTYSLGKFGQRALDFYSIHVTKESTHPVKPLAQIAGNRYASGPVGKALRDACMGTIASFLSKYQDIIIEHQKVVKGNQKRLESLRELAGKENLEYPSVTLPPQPHTKEGVDAYNEVIARVRMWVNLNLWQKLKLSRDDAKPLLRLKGFPSFPLVERQANEVDWWDMVCNVKKLINEKKEDGKVFWQNLAGYKRQEALRPYLSSEEDRKKGKKFARYQLGDLLLHLEKKHGERDWGKVYDEAWERIDKKVEGLSKHIKLEEERRSEDAQSKAALTDWLRAKASFVIEGLKEADKDEFCRCELKLQKWYGDLRGKPFAIEAENSILDISGFSKQYNCAFIWQKDGVKKLNLYLIINYFKGGKLRFKKIKPEAFEANRFYTVINKKSGEIVPMEVNFNFDDPNLIILPLAFGKRQGREFIWNDLLSLETGSLKLANGRVIEKTLYNRRTRQDEPALFVALTFERREVLDSSNIKPMNLIGVDRGENIPAVIALTDPEGCPLSRFKDSLGNPTHILRIGESYKEKQRTIQAKKEVEQRRAGGYSRKYASKAKNLADDMVRNTARDLLYYAVTQDAMLIFENLSRGFGRQGKRTFMAERQYTRMEDWLTAKLAYEGLPSKTYLSKTLAQYTSKTCSNCGFTITSADYDRVLEKLKKTATGWMTTINGKELKVEGQITYYNRYKRQNVVKDLSVELDRLSEESVNNDISSWTKGRSGEALSLLKKRFSHRPVQEKFVCLNCGFETHADEQAALNIARSWLFLRSQEYKKYQTNKTTGNTDKRAFVETWQSFYRKKLKEVWKPAV

SEQ ID NO: 48670 - protein, 979 aa, synthetic construct
  REGION 1..979: note = engineered CasX variant
QEGKRINKIRRRLVKDSNTKKAGKTGPMKTLLVRVMTPDLRERLENLRKKPENIPQPISNTSRANLNKLLTDYTEMKKAILHVYWEEFQKDPVGLMSRVAQPASKKIDQNKLKPEMDEKGNLTTAGFACSQCGQPLFVYKLEQVSEKGKAYTNYFGRCNVAEHEKLILLAQLKPEKDSDEAVTYSLGKFGQRALDFYSIHVTKESTHPVKPLAQIAGNRYASGPVGKALRDACMGTIASFLSKYQDIIIEHQKVVKGNQKRLESLRELAGKENLEYPSVTLPPQPHTKEGVDAYNEVIARVRMWVNLNLWQKLKLSRDDAKPLLRLKGFPSFPLVERQANEVDWWDMVCNVKKLINEKKEDGKVFWQNLAGYKRQEALRPYLSSEEDRKKGKKFARYQLGDLLLHLEKKHGEYDWGKVYDEAWERIDKKVEGLSKHIKLEEERRSEDAQSKAALTDWLRAKASFVIEGLKEADKDEFCRCELKLQKWYGDLRGKPFAIEAENSILDISGFSKQYNCAFIWQKDGVKKLNLYLIINYFKGGKLRFKKIKPEAFEANRFYTVINKKSGEIVPMEVNFNFDDPNLIILPLAFGKRQGREFIWNDLLSLETGSLKLANGRVIEKTLYNRRTRQDEPALFVALTFERREVLDSSNIKPMNLIGVDRGENIPAVIALTDPEGCPLSRFKDSLGNPTHILRIGESYKEKQRTIQAKKEVEQRRAGGYSRKYASKAKNLADDMVRNTARDLLYYAVTQDAMLIFENLSRGFGRQGKRTFMAERQYTRMEDWLTAKLAYEGLPSKTYLSKTLAQYTSKTCSNCGFTITSADYDRVLEKLKKTATGWMTTINGKELKVEGQITYYNRYKRQNVVKDLSVELDRLSEESVNNDISSWTKGRSGEALSLLKKRFSHRPVQEKFVCLNCGFETHADEQAALNIARSWLFLRSQEYKKYQTNKTTGNTDKRAFVETWQSFYRKKLKEVWKPAV

SEQ ID NO: 48671 - protein, 978 aa, synthetic construct
  REGION 1..978: note = engineered CasX variant
QEGKRINKIRRRLVKDSNTKKAGKTGPMKTLLVRVMTPDLRERLENLRKKPENIPQPISNTSRANLNKLLTDYTEMKKAILHVYWEEFQKDPVGLMSRVAQPASKKIDQNKLKPEMDEKGNLTTAGFACSQCGQPLFVYKLEQVSEKGKAYTNYFGRCNVAEHEKLILLAQLKPEKDSDEAVTYSLGKFGQRALDFYSIHVTKESTHPVKPLAQIAGNRYASGPVGKALRDACMGTIASFLSKYQDIIIEHQKVVKGNQKRLESLRELAGKENLEYPSVTLPPQPHTKEGVDAYNEVIARVRMWVNLNLWQKLKLSRDDAKPLLRLKGFPSFPLVERQANEVDWWDMVCNVKKLINEKKEDGKVFWQNLAGYKRQEALRPYLSSEEDRKKGKKFARYQLGDLLLHLEKKHGEDWGDVYDEAWERIDKKVEGLSKHIKLEEERRSEDAQSKAALTDWLRAKASFVIEGLKEADKDEFCRCELKLQKWYGDLRGKPFAIEAENSILDISGFSKQYNCAFIWQKDGVKKLNLYLIINYFKGGKLRFKKIKPEAFEANRFYTVINKKSGEIVPMEVNFNFDDPNLIILPLAFGKRQGREFIWNDLLSLETGSLKLANGRVIEKTLYNRRTRQDEPALFVALTFERREVLDSSNIKPMNLIGVDRGENIPAVIALTDPEGCPLSRFKDSLGNPTHILRIGESYKEKQRTIQAKKEVEQRRAGGYSRKYASKAKNLADDMVRNTARDLLYYAVTQDAMLIFENLSRGFGRQGKRTFMAERQYTRMEDWLTAKLAYEGLPSKTYLSKTLAQYTSKTCSNCGFTITSADYDRVLEKLKKTATGWMTTINGKELKVEGQITYYNRYKRQNVVKDLSVELDRLSEESVNNDISSWTKGRSGEALSLLKKRFSHRPVQEKFVCLNCGFETHADEQAALNIARSWLFLRSQEYKKYQTNKTTGNTDKRAFVETWQSFYRKKLKEVWKPAV

SEQ ID NO: 48672 - protein, 978 aa, synthetic construct
  REGION 1..978: note = engineered CasX variant
QEGKRINKIRRRLVKDSNTKKAGKTGPMKTLLVRVMTPDLRERLENLRKKPENIPQPISNTSRANLNKLLTDYTEMKKAILHVYWEEFQKDPVGLMSRVAQPASKKIDQNKLKPEMDEKGNLTTAGFACSQCGQPLFVYKLEQVSEKGKAYTNYFGRCNVAEHEKLILLAQLKPEKDSDEAVTYSLGKFGQRALDFYSIHVTKESTHPVKPLAQIAGNRYASGPVGKALRDACMGTIASFLSKYQDIIIEHQKVVKGNQKRLESLRELAGKENLEYPSVTLPPQPHTKEGVDAYNEVIARVRMWVNLNLWQKLKLSRDDAKPLLRLKGFPSFPLVERQANEVDWWDMVCNVKKLINEKKEDGKVFWQNLAGYKRQEALRPYLSSEEDRKKGKKFARYQLGDLLLHLEKKHGEDWGKVYGEAWERIDKKVEGLSKHIKLEEERRSEDAQSKAALTDWLRAKASFVIEGLKEADKDEFCRCELKLQKWYGDLRGKPFAIEAENSILDISGFSKQYNCAFIWQKDGVKKLNLYLIINYFKGGKLRFKKIKPEAFEANRFYTVINKKSGEIVPMEVNFNFDDPNLIILPLAFGKRQGREFIWNDLLSLETGSLKLANGRVIEKTLYNRRTRQDEPALFVALTFERREVLDSSNIKPMNLIGVDRGENIPAVIALTDPEGCPLSRFKDSLGNPTHILRIGESYKEKQRTIQAKKEVEQRRAGGYSRKYASKAKNLADDMVRNTARDLLYYAVTQDAMLIFENLSRGFGRQGKRTFMAERQYTRMEDWLTAKLAYEGLPSKTYLSKTLAQYTSKTCSNCGFTITSADYDRVLEKLKKTATGWMTTINGKELKVEGQITYYNRYKRQNVVKDLSVELDRLSEESVNNDISSWTKGRSGEALSLLKKRFSHRPVQEKFVCLNCGFETHADEQAALNIARSWLFLRSQEYKKYQTNKTTGNTDKRAFVETWQSFYRKKLKEVWKPAV

SEQ ID NO: 48673 - protein, 978 aa, synthetic construct
  REGION 1..978: note = engineered CasX variant
QEGKRINKIRRRLVKDSNTKKAGKTGPMKTLLVRVMTPDLRERLENLRKKPENIPQPISNTSRANLNKLLTDYTEMKKAILHVYWEEFQKDPVGLMSRVAQPASKKIDQNKLKPEMDEKGNLTTAGFACSQCGQPLFVYKLEQVSEKGKAYTNYFGRCNVAEHEKLILLAQLKPEKDSDEAVTYSLGKFGQRALDFYSIHVTKESTHPVKPLAQIAGNRYASGPVGKALRDACMGTIASFLSKYQDIIIEHQKVVKGNQKRLESLRELAGKENLEYPSVTLPPQPHTKEGVDAYNEVIARVRMWVNLNLWQKLKLSRDDAKPLLRLKGFPSFPLVERQANEVDWWDMVCNVKKLINEKKEDGKVFWQNLAGYKRQEALRPYLSSEEDRKKGKKFARYQLGDLLLHLEKKHGEDWGKVYDEAWERIDKKVEGLSKHIKLEEERRSEDAQSKAALTDWLRAKASFVIEGKKEADKDEFCRCELKLQKWYGDLRGKPFAIEAENSILDISGFSKQYNCAFIWQKDGVKKLNLYLIINYFKGGKLRFKKIKPEAFEANRFYTVINKKSGEIVPMEVNFNFDDPNLIILPLAFGKRQGREFIWNDLLSLETGSLKLANGRVIEKTLYNRRTRQDEPALFVALTFERREVLDSSNIKPMNLIGVDRGENIPAVIALTDPEGCPLSRFKDSLGNPTHILRIGESYKEKQRTIQAKKEVEQRRAGGYSRKYASKAKNLADDMVRNTARDLLYYAVTQDAMLIFENLSRGFGRQGKRTFMAERQYTRMEDWLTAKLAYEGLPSKTYLSKTLAQYTSKTCSNCGFTITSADYDRVLEKLKKTATGWMTTINGKELKVEGQITYYNRYKRQNVVKDLSVELDRLSEESVNNDISSWTKGRSGEALSLLKKRFSHRPVQEKFVCLNCGFETHADEQAALNIARSWLFLRSQEYKKYQTNKTTGNTDKRAFVETWQSFYRKKLKEVWKPAV

SEQ ID NO: 48674 - protein, 978 aa, synthetic construct
  REGION 1..978: note = engineered CasX variant
QEGKRINKIRRRLVKDSNTKKAGKTGPMKTLLVRVMTPDLRERLENLRKKPENIPQPISNTSRANLNKLLTDYTEMKKAILHVYWEEFQKDPVGLMSRVAQPASKKIDQNKLKPEMDEKGNLTTAGFACSQCGQPLFVYKLEQVSEKGKAYTNYFGRCNVAEHEKLILLAQLKPEKDSDEAVTYSLGKFGQRALDFYSIHVTKESTHPVKPLAQIAGNRYASGPVGKALRDACMGTIASFLSKYQDIIIEHQKVVKGNQKRLESLRELAGKENLEYPSVTLPPQPHTKEGVDAYNEVIARVRMWVNLNLWQKLKLSRDDAKPLLRLKGFPSFPLVERQANEVDWWDMVCNVKKLINEKKEDGKVFWQNLAGYKRQEALRPYLSSEEDRKKGKKFARYQLGDLLLHLEKKHGEDWGKVYDEAWERIDKKVEGLSKHIKLEEERRSEDAQSKAALTDWLRAKASFVIEGSKEADKDEFCRCELKLQKWYGDLRGKPFAIEAENSILDISGFSKQYNCAFIWQKDGVKKLNLYLIINYFKGGKLRFKKIKPEAFEANRFYTVINKKSGEIVPMEVNFNFDDPNLIILPLAFGKRQGREFIWNDLLSLETGSLKLANGRVIEKTLYNRRTRQDEPALFVALTFERREVLDSSNIKPMNLIGVDRGENIPAVIALTDPEGCPLSRFKDSLGNPTHILRIGESYKEKQRTIQAKKEVEQRRAGGYSRKYASKAKNLADDMVRNTARDLLYYAVTQDAMLIFENLSRGFGRQGKRTFMAERQYTRMEDWLTAKLAYEGLPSKTYLSKTLAQYTSKTCSNCGFTITSADYDRVLEKLKKTATGWMTTINGKELKVEGQITYYNRYKRQNVVKDLSVELDRLSEESVNNDISSWTKGRSGEALSLLKKRFSHRPVQEKFVCLNCGFETHADEQAALNIARSWLFLRSQEYKKYQTNKTTGNTDKRAFVETWQSFYRKKLKEVWKPAV

SEQ ID NO: 48675 - protein, 979 aa, synthetic construct
  REGION 1..979: note = engineered CasX variant
QEGKRINKIRRRLVKDSNTKKAGKTGPMKTLLVRVMTPDLRERLENLRKKPENIPQPISNTSRANLNKLLTDYTEMKKAILHVYWEEFQKDPVGLMSRVAQPASKKIDQNKLKPEMDEKGNLTTAGFACSQCGQPLFVYKLEQVSEKGKAYTNYFGRCNVAEHEKLILLAQLKPEKDSDEAVTYSLGKFGQRALDFYSIHVTKESTHPVKPLAQIAGNRYASGPVGKALRDACMGTIASFLSKYQDIIIEHQKVVKGNQKRLESLRELAGKENLEYPSVTLPPQPHTKEGVDAYNEVIARVRMWVNLNLWQKLKLSRDDAKPLLRLKGFPSFPLVERQANEVDWWDMVCNVKKLINEKKEDGKVFWQNLAGYKRQEALRPYLSSEEDRKKGKKFARYQLGDLLLHLEKKHGEDWGKVYDEAWERIDKKVEGLSKHIKLEEERRSEDAQSKAALTDWLRAKASFVIEGLKEADDKDEFCRCELKLQKWYGDLRGKPFAIEAENSILDISGFSKQYNCAFIWQKDGVKKLNLYLIINYFKGGKLRFKKIKPEAFEANRFYTVINKKSGEIVPMEVNFNFDDPNLIILPLAFGKRQGREFIWNDLLSLETGSLKLANGRVIEKTLYNRRTRQDEPALFVALTFERREVLDSSNIKPMNLIGVDRGENIPAVIALTDPEGCPLSRFKDSLGNPTHILRIGESYKEKQRTIQAKKEVEQRRAGGYSRKYASKAKNLADDMVRNTARDLLYYAVTQDAMLIFENLSRGFGRQGKRTFMAERQYTRMEDWLTAKLAYEGLPSKTYLSKTLAQYTSKTCSNCGFTITSADYDRVLEKLKKTATGWMTTINGKELKVEGQITYYNRYKRQNVVKDLSVELDRLSEESVNNDISSWTKGRSGEALSLLKKRFSHRPVQEKFVCLNCGFETHADEQAALNIARSWLFLRSQEYKKYQTNKTTGNTDKRAFVETWQSFYRKKLKEVWKPAV

SEQ ID NO: 48676 - protein, 979 aa, synthetic construct
  REGION 1..979: note = engineered CasX variant
QEGKRINKIRRRLVKDSNTKKAGKTGPMKTLLVRVMTPDLRERLENLRKKPENIPQPISNTSRANLNKLLTDYTEMKKAILHVYWEEFQKDPVGLMSRVAQPASKKIDQNKLKPEMDEKGNLTTAGFACSQCGQPLFVYKLEQVSEKGKAYTNYFGRCNVAEHEKLILLAQLKPEKDSDEAVTYSLGKFGQRALDFYSIHVTKESTHPVKPLAQIAGNRYASGPVGKALRDACMGTIASFLSKYQDIIIEHQKVVKGNQKRLESLRELAGKENLEYPSVTLPPQPHTKEGVDAYNEVIARVRMWVNLNLWQKLKLSRDDAKPLLRLKGFPSFPLVERQANEVDWWDMVCNVKKLINEKKEDGKVFWQNLAGYKRQEALRPYLSSEEDRKKGKKFARYQLGDLLLHLEKKHGEDWGKVYDEAWERIDKKVEGLSKHIKLEEERRSEDAQSKAALTDWLRAKASFVIEGLKEADKDEFCRCELKLQKWYGDLRGKPFAIEAENSILDISGFSKQYNCAFIWQKDGVKKLNLYLIINYFKGGKLRFKKIKPEAFEANRFYTVINKKSGEIVPMEVNFNFDDPNLIILPLAFGKRQGREFIWNDLLSLETGSLKLANGRVIEKTLYNRRTRQDEPALFVALTFERREVLDSSNIKPMNLIGVDRGENIPAVIALTDPEGCPLSRFKDSLGNPTHILRIGESYKEKQRTIQAKKEVEQRRAGGYSRKYASKAKNLADDMVRNTARDLLYYAVTQDAMLIFENLSRGFGRQGKRTFMAERQYTRMEDWLTAKLAYEGLPSKTYLSKTLAQYTSKTCSNCGFTITSADYDRVLEKLKKTATGWMTTINGKELKVEGQITYYNRYKRQNVVKDLSVELDRLSEESVNNDISSWTKGRSGNEALSLLKKRFSHRPVQEKFVCLNCGFETHADEQAALNIARSWLFLRSQEYKKYQTNKTTGNTDKRAFVETWQSFYRKKLKEVWKPAV

SEQ ID NO: 48677 - protein, 978 aa, synthetic construct
  REGION 1..978: note = engineered CasX variant
QEGKRINKIRRRLVKDSNTKKAGKTGPMKTLLVRVMTPDLRERLENLRKKPENIPQPISNTSRANLNKLLTDYTEMKKAILHVYWEEFQKDPVGLMSRVAQPASKKIDQNKLKPEMDEKGNLTTAGFACSQCGQPLFVYKLEQVSEKGKAYTNYFGRCNVAEHEKLILLAQLKPEKDSDEAVTYSLGKFGQRALDFYSIHVTKESTHPVKPLAQIAGNRYASGPVGKALRDACMGTIASFLSKYQDIIIEHQKVVKGNQKRLESLRELAGKENLEYPSVTLPPQPHTKEGVDAYNEVIARVRMWVNLNLWQKLKLSRDDAKPLLRLKGFPSFPLVERQANEVDWWDMVCNVKKLINEKKEDGKVFWQNLAGYKRQEALRPYLSSEEDRQKGKKFARYQLGDLLLHLEKKHGEDWGKVYDEAWERIDKKVEGLSKHIKLEEERRSEDAQSKAALTDWLRAKASFVIEGLKEADKDEFCRCELKLQKWYGDLRGKPFAIEAENSILDISGFSKQYNCAFIWQKDGVKKLNLYLIINYFKGGKLRFKKIKPEAFEANRFYTVINKKSGEIVPMEVNFNFDDPNLIILPLAFGKRQGREFIWNDLLSLETGSLKLANGRVIEKTLYNRRTRQDEPALFVALTFERREVLDSSNIKPMNLIGVDRGENIPAVIALTDPEGCPLSRFKDSLGNPTHILRIGESYKEKQRTIQAKKEVEQRRAGGYSRKYASKAKNLADDMVRNTARDLLYYAVTQDAMLIFENLSRGFGRQGKRTFMAERQYTRMEDWLTAKLAYEGLPSKTYLSKTLAQYTSKTCSNCGFTITSADYDRVLEKLKKTATGWMTTINGKELKVEGQITYYNRYKRQNVVKDLSVELDRLSEESVNNDISSWTKGRSGEALSLLKKRFSHRPVQEKFVCLNCGFETHADEQAALNIARSWLFLRSQEYKKYQTNKTTGNTDKRAFVETWQSFYRKKLKEVWKPAV

SEQ ID NO: 48678 - protein, 978 aa, synthetic construct
  REGION 1..978: note = engineered CasX variant
QEGKRINKIRRRLVKDSNTKKAGKTGPMKTLLVRVMTPDLRERLENLRKKPENIPQPISNTSRANLNKLLTDYTEMKKAILHVYWEEFQKDPVGLMSRVAQPASKKIDQNKLKPEMDEKGNLTTAGFACSQCGQPLFVYKLEQVSEKGKAYTNYFGRCNVAEHEKLILLAQLKPEKDSDEAVTYSLGKFGQRALDFYSIHVTKESTHPVKPLAQIAGNRYASGPVGKALRDACMGTIASFLSKYQDIIIEHQKVVKGNQKRLESLRELAGKENLEYPSVTLPPQPHTKEGVDAYNEVIARVRMWVNLNLWQKLKLSRDDAKPLLRLKGFPSFPLVERQANEVDWWDMVCNVKKLINEKKEDGKVFWQNLAGYKRQEALRPYLSSEEDRKKGKKFARYQLGDLLLHLEKKHGEDWGKVYDEAWERIDKKVEGLSKHIKLEEERRSEDAQSKAALTDWLRAKASFVIEGLKEADKDEFCRCELKLQKWYGDLRGKPFAIEAENSILDISGFSKQYNCAFIWQKDGVKKLNLYLIINYFKGGKLRFKKIKPEAFEANRFYTVINKKSGEIVPMEVNFNFDDPNLIILPLAFGKRQGREFIWNDLLSLETGSLKLANGRVIEKTLYNRRTRQDEPALFVALTFERREVLDSSNIKPMNLIGVDRGENIPAVIALTDPEGCPLSRFKDSLGNPTHILRIGESYKEKQRTIQAKKEVEQRRAGGYSRKYASKAKNLADDMVRNTARDLLYYAVTQDAMLIFENLSRGFGRQGKRTFMAERQYTRMEDWLTAKLAYEGLPSQTYLSKTLAQYTSKTCSNCGFTITSADYDRVLEKLKKTATGWMTTINGKELKVEGQITYYNRYKRQNVVKDLSVELDRLSEESVNNDISSWTKGRSGEALSLLKKRFSHRPVQEKFVCLNCGFETHADEQAALNIARSWLFLRSQEYKKYQTNKTTGNTDKRAFVETWQSFYRKKLKEVWKPAV

SEQ ID NO: 48679 - protein, 978 aa, synthetic construct
  REGION 1..978: note = engineered CasX variant
QEGKRINKIRRRLVKDSNTKKAGKTGPMKTLLVRVMTPDLRERLENLRKKPENIPQPISNTSRANLNKLLTDYTEMKKAILHVYWEEFQKDPVGLMSRVAQPASKKIDQNKLKPEMDEKGNLTTAGFACSQCGQPLFVYKLEQVSEKGKAYTNYFGRCNVAEHEKLILLAQLKPEKDSDEAVTYSLGKFGQRALDFYSIHVTKESTHPVKPLAQIAGNRYASGPVGKALRDACMGTIASFLSKYQDIIIEHQKVVKGNQKRLESLRELAGKENLEYPSVTLPPQPHTKEGVDAYNEVIARVRMWVNLNLWQKLKLSRDDAKPLLRLKGFPSFPLVERQANEVDWWDMVCNVKKLINEKKEDGKVFWQNLAGYKRQEALRPYLSSEEDRKKGKKFARYQLGDLLLHLEKKHGEDWGKVYDEAWERIDKKVEGLSKHIKLEEERRSEDAQSKAALTDWLRAKASFVIEGLKEADKDEFCRCELKLQKWYGDLRGKPFAIEAENSILDISGFSKQYNCAFIWQKDGVKKLNLYLIINYFKGGKLRFKKIKPEAFEANRFYTVINKKSGEIVPMEVNFNFDDPNLIILPLAFGKRQGREFIWNDLLSLETGSLKLANGRVIEKTLYNRRTRQDEPALFVALTFERREVLDSSNIKPMNLIGVDRGENIPAVIALTDPEGCPLSRFKDSLGNPTHILRIGESYKEKQRTIQAKKEVEQRRAGGYSRKYASKAKNLADDMVRNTARDLLYYAVTQDAMLIFENLSRGFGRQGKRTFMAERQYTRMEDWLTAKLAYNGLPSKTYLSKTLAQYTSKTCSNCGFTITSADYDRVLEKLKKTATGWMTTINGKELKVEGQITYYNRYKRQNVVKDLSVELDRLSEESVNNDISSWTKGRSGEALSLLKKRFSHRPVQEKFVCLNCGFETHADEQAALNIARSWLFLRSQEYKKYQTNKTTGNTDKRAFVETWQSFYRKKLKEVWKPAV

SEQ ID NO: 48680 - protein, 978 aa, synthetic construct
  REGION 1..978: note = engineered CasX variant
QEGKRINKIRRRLVKDSNTKKAGKTGPMKTLLVRVMTPDLRERLENLRKKPENIPQPISNTSRANLNKLLTDYTEMKKAILHVYWEEFQKDPVGLMSRVAQPASKKIDQNKLKPEMDEKGNLTTAGFACSQCGQPLFVYKLEQVSEKGKAYTNYFGRCNVAEHEKLIQLAQLKPEKDSDEAVTYSLGKFGQRALDFYSIHVTKESTHPVKPLAQIAGNRYASGPVGKALRDACMGTIASFLSKYQDIIIEHQKVVKGNQKRLESLRELAGKENLEYPSVTLPPQPHTKEGVDAYNEVIARVRMWVNLNLWQKLKLSRDDAKPLLRLKGFPSFPLVERQANEVDWWDMVCNVKKLINEKKEDGKVFWQNLAGYKRQEALRPYLSSEEDRKKGKKFARYQLGDLLLHLEKKHGEDWGKVYDEAWERIDKKVEGLSKHIKLEEERRSEDAQSKAALTDWLRAKASFVIEGLKEADKDEFCRCELKLQKWYGDLRGKPFAIEAENSILDISGFSKQYNCAFIWQKDGVKKLNLYLIINYFKGGKLRFKKIKPEAFEANRFYTVINKKSGEIVPMEVNFNFDDPNLIILPLAFGKRQGREFIWNDLLSLETGSLKLANGRVIEKTLYNRRTRQDEPALFVALTFERREVLDSSNIKPMNLIGVDRGENIPAVIALTDPEGCPLSRFKDSLGNPTHILRIGESYKEKQRTIQAKKEVEQRRAGGYSRKYASKAKNLADDMVRNTARDLLYYAVTQDAMLIFENLSRGFGRQGKRTFMAERQYTRMEDWLTAKLAYEGLPSKTYLSKTLAQYTSKTCSNCGFTITSADYDRVLEKLKKTATGWMTTINGKELKVEGQITYYNRYKRQNVVKDLSVELDRLSEESVNNDISSWTKGRSGEALSLLKKRFSHRPVQEKFVCLNCGFETHADEQAALNIARSWLFLRSQEYKKYQTNKTTGNTDKRAFVETWQSFYRKKLKEVWKPAV

SEQ ID NO: 48681 - protein, 978 aa, synthetic construct
  REGION 1..978: note = engineered CasX variant
QEGKRINKIRRRLVKDSNTKKAGKTGPMKTLLVRVMTPDLRERLENLRKKPENIPQPISNTSRANLNKLLTDYTEMKKAILHVYWEEFQKDPVGLMSRVAQPASKKIDQNKLKPEMDEKGNLTTAGFACSQCGQPLFVYKLEQVSEKGKAYTNYFGRCNVAEHEKLILLAQLKPEKDSDEAVTYSLGKFGQRALDFYSIHVTKESTHPVKPLAQIAGNRYASGPVGKALRDACMGTIASFLSKYQDIIIEHQKVVKGNQKRLESLRELAGKENLEYPSVTLPPQPHTKEGVDAYNEVIARVRMWVNLNLWQKLKLSRDDAKPLLRLKGFPSFPLVERQANEVDWWDMVCNVKKLINEKKEDGKVFWQNLAIYKRQEALRPYLSSEEDRKKGKKFARYQLGDLLLHLEKKHGEDWGKVYDEAWERIDKKVEGLSKHIKLEEERRSEDAQSKAALTDWLRAKASFVIEGLKEADKDEFCRCELKLQKWYGDLRGKPFAIEAENSILDISGFSKQYNCAFIWQKDGVKKLNLYLIINYFKGGKLRFKKIKPEAFEANRFYTVINKKSGEIVPMEVNFNFDDPNLIILPLAFGKRQGREFIWNDLLSLETGSLKLANGRVIEKTLYNRRTRQDEPALFVALTFERREVLDSSNIKPMNLIGVDRGENIPAVIALTDPEGCPLSRFKDSLGNPTHILRIGESYKEKQRTIQAKKEVEQRRAGGYSRKYASKAKNLADDMVRNTARDLLYYAVTQDAMLIFENLSRGFGRQGKRTFMAERQYTRMEDWLTAKLAYEGLPSKTYLSKTLAQYTSKTCSNCGFTITSADYDRVLEKLKKTATGWMTTINGKELKVEGQITYYNRYKRQNVVKDLSVELDRLSEESVNNDISSWTKGRSGEALSLLKKRFSHRPVQEKFVCLNCGFETHADEQAALNIARSWLFLRSQEYKKYQTNKTTGNTDKRAFVETWQSFYRKKLKEVWKPAV

SEQ ID NO: 48682 - protein, 978 aa, synthetic construct
  REGION 1..978: note = engineered CasX variant
QEGKRINKIRRRLVKDSNTKKAGKTGPMKTLLVRVMTPDLRERLENLRKKPENIPQPISNTSRANLNKLLTDYTEMKKAILHVYWEEFQKDPVGLMSRVAQPASKKIDQNKLKPEMDEKGNLTTAGFACSQCGQPLFVYKLEQVSEKGKAYTNYFGRCNVAEHEKLILLAQLKPEKDSDEAVTYSLGKFGQRALDFYSIHVTKESTHPVKPLAQIAGNRYASGPVGKALRDACMGTIASFLSKYQDIIIEHQKVVKGNQKRLESLRELAGKENLEYPSVTLPPQPHTKEGVDAYNEVIARVRMWVNLNLWQKLKLSRDDAKPLLRLKGFPSFPLVERQANEVDWWDMVCNVKKLINEKKEDGKVFWQNLAGYKRQEALRPYLSSEEDREKGKKFARYQLGDLLLHLEKKHGEDWGKVYDEAWERIDKKVEGLSKHIKLEEERRSEDAQSKAALTDWLRAKASFVIEGLKEADKDEFCRCELKLQKWYGDLRGKPFAIEAENSILDISGFSKQYNCAFIWQKDGVKKLNLYLIINYFKGGKLRFKKIKPEAFEANRFYTVINKKSGEIVPMEVNFNFDDPNLIILPLAFGKRQGREFIWNDLLSLETGSLKLANGRVIEKTLYNRRTRQDEPALFVALTFERREVLDSSNIKPMNLIGVDRGENIPAVIALTDPEGCPLSRFKDSLGNPTHILRIGESYKEKQRTIQAKKEVEQRRAGGYSRKYASKAKNLADDMVRNTARDLLYYAVTQDAMLIFENLSRGFGRQGKRTFMAERQYTRMEDWLTAKLAYEGLPSKTYLSKTLAQYTSKTCSNCGFTITSADYDRVLEKLKKTATGWMTTINGKELKVEGQITYYNRYKRQNVVKDLSVELDRLSEESVNNDISSWTKGRSGEALSLLKKRFSHRPVQEKFVCLNCGFETHADEQAALNIARSWLFLRSQEYKKYQTNKTTGNTDKRAFVETWQSFYRKKLKEVWKPAV

SEQ ID NO: 48683 - protein, 978 aa, synthetic construct
  REGION 1..978: note = engineered CasX variant
QEGKRINKIRRRLVKDSNTKKAGKTGPMKTLLVRVMTPDLRERLENLRKKPENIPQPISNTSRANLNKLLTDYTEMKKAILHVYWEEFQKDPVGLMSRVAQPASKKIDQNKLKPEMDEKGNLTTAGFACSQCGQPLFVYKLEQVSEKGKAYTNYFGRCNVAEHEKLILLAQLKPEKDSDEAVTYSLGKFGQRALDFYSIHVTKESTHPVKPLAQIAGNRYASGPVGKALRDACMGTIASFLSKYQDIIIEHQKVVKGNQKRLESLRELAGKENLEYPSVTLPPQPHTKEGVDAYNEVIARVRMWVNLNLWQKLKLSRDDAKPLLRLKGFPSFPLVERQANEVDWWDMVCNVKKLINEKKEDGKVFWQNLAGYKRQEALRPYLSSEEDRKKGKKFARYQLGDLLLHLEKKHGEDWGKVYDEAWERIDKKVEGLSKHIKLEEERRSEDAQSKAALTDWLRAKASFVIEGLKEADKDEFCRCELKLQKWYGDLRGKPFAIEAENSILDISGFSKQYNCAFIWQKDGVKKLNLYLIINYFKGGKLRFKKIKPEAFEANRFYTVINKKSGEIVIMEVNFNFDDPNLIILPLAFGKRQGREFIWNDLLSLETGSLKLANGRVIEKTLYNRRTRQDEPALFVALTFERREVLDSSNIKPMNLIGVDRGENIPAVIALTDPEGCPLSRFKDSLGNPTHILRIGESYKEKQRTIQAKKEVEQRRAGGYSRKYASKAKNLADDMVRNTARDLLYYAVTQDAMLIFENLSRGFGRQGKRTFMAERQYTRMEDWLTAKLAYEGLPSKTYLSKTLAQYTSKTCSNCGFTITSADYDRVLEKLKKTATGWMTTINGKELKVEGQITYYNRYKRQNVVKDLSVELDRLSEESVNNDISSWTKGRSGEALSLLKKRFSHRPVQEKFVCLNCGFETHADEQAALNIARSWLFLRSQEYKKYQTNKTTGNTDKRAFVETWQSFYRKKLKEVWKPAV

SEQ ID NO: 48684 - protein, 979 aa, synthetic construct
  REGION 1..979: note = engineered CasX variant
QEIGKRINKIRRRLVKDSNTKKAGKTGPMKTLLVRVMTPDLRERLENLRKKPENIPQPISNTSRANLNKLLTDYTEMKKAILHVYWEEFQKDPVGLMSRVAQPASKKIDQNKLKPEMDEKGNLTTAGFACSQCGQPLFVYKLEQVSEKGKAYTNYFGRCNVAEHEKLILLAQLKPEKDSDEAVTYSLGKFGQRALDFYSIHVTKESTHPVKPLAQIAGNRYASGPVGKALRGACMGTIASFLSKYQDIIIEHQKVVKGNQKRLESLRELAGKENLEYPSVTLPPQPHTKEGVDAYNEVIARVRMWVNLNLWQKLKLSRDDAKPLLRLKGFPSFPLVERQANEVDWWDMVCNVKKLINEKKEDGKVFWQNLAGYKRQEALRPYLSSEEDRKKGKKFARYQLGDLLLHLEKKHGEDWGKVYDEAWERIDKKVEGLSKHIKLEEERRSEDAQSKAALTDWLRAKASFVIEGLKEADKDEFCRCELKLQKWYGDLRGKPFAIEAENSILDISGFSKQYNCAFIWQKDGVKKLNLYLIINYFKGGKLRFKKIKPEAFEANRFYTVINKKSGEIVPMEVNFNFDDPNLIILPLAFGKRQGREFIWNDLLSLETGSLKLANGRVIEKTLYNRRTRQDEPALFVALTFERREVLDSSNIKPMNLIGVDRGENIPAVIALTDPEGCPLSRFKDSLGNPTHILRIGESYKEKQRTIQAKKEVEQRRAGGYSRKYASKAKNLADDMVRNTARDLLYYAVTQDAMLIFENLSRGFGRQGKRTFMAERQYTRMEDWLTAKLAYEGLPSKTYLSKTLAQYTSKTCSNCGFTITSADYDRVLEKLKKTATGWMTTINGKELKVEGQITYYNRYKRQNVVKDLSVELDRLSEESVNNDISSWTKGRSGEALSLLKKRFSHRPVQEKFVCLNCGFETHADEQAALNIARSWLFLRSQEYKKYQTNKTTGNTDKRAFVETWQSFYRKKLKEVWKPAV

SEQ ID NO: 48685 - protein, 979 aa, synthetic construct
  REGION 1..979: note = engineered CasX variant
QEIGKRINKIRRRLVKDSNTKKAGKTGPMKTLLVRVMTPDLRERLENLRKKPENIPQPISNTSRANLNKLLTDYTEMKKAILHVYWEEFQKDPVGLMSRVAQPASKKIDQNKLKPEMDEKGNLTTAGFACSQCGQPLFVYKLEQVSEKGKAYTNYFGRCNVAEHEKLILLAQLKPEKDSDEAVTYSLGKFGQRALDFYSIHVTKESTHPVKPLAQIAGNRYASGPVGKALRDACMGTIASFLSKYQDIIIEHQKVVKGNQKRLESLRELAGKENLEYPSVTLPPQPHTKEGVDAYNEVIARVRMWVNLNLWQKLKLSRDDAKPLLRLKNFPSFPLVERQANEVDWWDMVCNVKKLINEKKEDGKVFWQNLAGYKRQEALRPYLSSEEDRKKGKKFARYQLGDLLLHLEKKHGEDWGKVYDEAWERIDKKVEGLSKHIKLEEERRSEDAQSKAALTDWLRAKASFVIEGLKEADKDEFCRCELKLQKWYGDLRGKPFAIEAENSILDISGFSKQYNCAFIWQKDGVKKLNLYLIINYFKGGKLRFKKIKPEAFEANRFYTVINKKSGEIVPMEVNFNFDDPNLIILPLAFGKRQGREFIWNDLLSLETGSLKLANGRVIEKTLYNRRTRQDEPALFVALTFERREVLDSSNIKPMNLIGVDRGENIPAVIALTDPEGCPLSRFKDSLGNPTHILRIGESYKEKQRTIQAKKEVEQRRAGGYSRKYASKAKNLADDMVRNTARDLLYYAVTQDAMLIFENLSRGFGRQGKRTFMAERQYTRMEDWLTAKLAYEGLPSKTYLSKTLAQYTSKTCSNCGFTITSADYDRVLEKLKKTATGWMTTINGKELKVEGQITYYNRYKRQNVVKDLSVELDRLSEESVNNDISSWTKGRSGEALSLLKKRFSHRPVQEKFVCLNCGFETHADEQAALNIARSWLFLRSQEYKKYQTNKTTGNTDKRAFVETWQSFYRKKLKEVWKPAV

SEQ ID NO: 48686 - protein, 979 aa, synthetic construct
  REGION 1..979: note = engineered CasX variant
QEIGKRINKIRRRLVKDSNTKKAGKTGPMKTLLVRVMTPDLRERLENLRKKPENIPQPISNTSRANLNKLLTDYTEMKKAILHVYWEEFQKDPVGLMSRVAQPASKKIDQNKLKPEMDEKGNLTTAGFACSQCGQPLFVYKLEQVSEKGKAYTNYFGRCNVAEHEKLILLAQLKPEKDSDEAVTYSLGKFGQRALDFYSIHVTKESTHPVKPLAQIAGNRYASGPVGKALRDACMGTIASFLSKYQDIIIEHQKVVKGNQKRLESLRELAGKENLEYPSVTLPPQPHTKEGVDAYNEVIARVRMWVNLNLWQKLKLSRDDAKPLLRLKGFPSFPLVERQANEVDWWDMVCNVKKLINEKKEDGKVFWQNLAGYKRQEALRPYLSSEEDRKKGKKFARYQLGDLLNHLEKKHGEDWGKVYDEAWERIDKKVEGLSKHIKLEEERRSEDAQSKAALTDWLRAKASFVIEGLKEADKDEFCRCELKLQKWYGDLRGKPFAIEAENSILDISGFSKQYNCAFIWQKDGVKKLNLYLIINYFKGGKLRFKKIKPEAFEANRFYTVINKKSGEIVPMEVNFNFDDPNLIILPLAFGKRQGREFIWNDLLSLETGSLKLANGRVIEKTLYNRRTRQDEPALFVALTFERREVLDSSNIKPMNLIGVDRGENIPAVIALTDPEGCPLSRFKDSLGNPTHILRIGESYKEKQRTIQAKKEVEQRRAGGYSRKYASKAKNLADDMVRNTARDLLYYAVTQDAMLIFENLSRGFGRQGKRTFMAERQYTRMEDWLTAKLAYEGLPSKTYLSKTLAQYTSKTCSNCGFTITSADYDRVLEKLKKTATGWMTTINGKELKVEGQITYYNRYKRQNVVKDLSVELDRLSEESVNNDISSWTKGRSGEALSLLKKRFSHRPVQEKFVCLNCGFETHADEQAALNIARSWLFLRSQEYKKYQTNKTTGNTDKRAFVETWQSFYRKKLKEVWKPAV

SEQ ID NO: 48687 - protein, 979 aa, synthetic construct
  REGION 1..979: note = engineered CasX variant
QEIGKRINKIRRRLVKDSNTKKAGKTGPMKTLLVRVMTPDLRERLENLRKKPENIPQPISNTSRANLNKLLTDYTEMKKAILHVYWEEFQKDPVGLMSRVAQPASKKIDQNKLKPEMDEKGNLTTAGFACSQCGQPLFVYKLEQVSEKGKAYTNYFGRCNVAEHEKLILLAQLKPEKDSDEAVTYSLGKFGQRALDFYSIHVTKESTHPVKPLAQIAGNRYASGPVGKALRDACMGTIASFLSKYQDIIIEHQKVVKGNQKRLESLRELAGKENLEYPSVTLPPQPHTKEGVDAYNEVIARVRMWVNLNLWQKLKLSRDDAKPLLRLKGFPSFPLVERQANEVDWWDMVCNVKKLINEKKEDGKVFWQNLAGYKRQEALRPYLSSEEDRKKGKKFARYQLGDLLWHLEKKHGEDWGKVYDEAWERIDKKVEGLSKHIKLEEERRSEDAQSKAALTDWLRAKASFVIEGLKEADKDEFCRCELKLQKWYGDLRGKPFAIEAENSILDISGFSKQYNCAFIWQKDGVKKLNLYLIINYFKGGKLRFKKIKPEAFEANRFYTVINKKSGEIVPMEVNFNFDDPNLIILPLAFGKRQGREFIWNDLLSLETGSLKLANGRVIEKTLYNRRTRQDEPALFVALTFERREVLDSSNIKPMNLIGVDRGENIPAVIALTDPEGCPLSRFKDSLGNPTHILRIGESYKEKQRTIQAKKEVEQRRAGGYSRKYASKAKNLADDMVRNTARDLLYYAVTQDAMLIFENLSRGFGRQGKRTFMAERQYTRMEDWLTAKLAYEGLPSKTYLSKTLAQYTSKTCSNCGFTITSADYDRVLEKLKKTATGWMTTINGKELKVEGQITYYNRYKRQNVVKDLSVELDRLSEESVNNDISSWTKGRSGEALSLLKKRFSHRPVQEKFVCLNCGFETHADEQAALNIARSWLFLRSQEYKKYQTNKTTGNTDKRAFVETWQSFYRKKLKEVWKPAV

SEQ ID NO: 48688 - protein, 979 aa, synthetic construct
  REGION 1..979: note = engineered CasX variant
QEIGKRINKIRRRLVKDSNTKKAGKTGPMKTLLVRVMTPDLRERLENLRKKPENIPQPISNTSRANLNKLLTDYTEMKKAILHVYWEEFQKDPVGLMSRVAQPASKKIDQNKLKPEMDEKGNLTTAGFACSQCGQPLFVYKLEQVSEKGKAYTNYFGRCNVAEHEKLILLAQLKPEKDSDEAVTYSLGKFGQRALDFYSIHVTKESTHPVKPLAQIAGNRYASGPVGKALRDACMGTIASFLSKYQDIIIEHQKVVKGNQKRLESLRELAGKENLEYPSVTLPPQPHTKEGVDAYNEVIARVRMWVNLNLWQKLKLSRDDAKPLLRLKGFPSFPLVERQANEVDWWDMVCNVKKLINEKKEDGKVFWQNLAGYKRQEALRPYLSSEEDRKKGKKFARYQLGDLLLHLYKKHGEDWGKVYDEAWERIDKKVEGLSKHIKLEEERRSEDAQSKAALTDWLRAKASFVIEGLKEADKDEFCRCELKLQKWYGDLRGKPFAIEAENSILDISGFSKQYNCAFIWQKDGVKKLNLYLIINYFKGGKLRFKKIKPEAFEANRFYTVINKKSGEIVPMEVNFNFDDPNLIILPLAFGKRQGREFIWNDLLSLETGSLKLANGRVIEKTLYNRRTRQDEPALFVALTFERREVLDSSNIKPMNLIGVDRGENIPAVIALTDPEGCPLSRFKDSLGNPTHILRIGESYKEKQRTIQAKKEVEQRRAGGYSRKYASKAKNLADDMVRNTARDLLYYAVTQDAMLIFENLSRGFGRQGKRTFMAERQYTRMEDWLTAKLAYEGLPSKTYLSKTLAQYTSKTCSNCGFTITSADYDRVLEKLKKTATGWMTTINGKELKVEGQITYYNRYKRQNVVKDLSVELDRLSEESVNNDISSWTKGRSGEALSLLKKRFSHRPVQEKFVCLNCGFETHADEQAALNIARSWLFLRSQEYKKYQTNKTTGNTDKRAFVETWQSFYRKKLKEVWKPAV

SEQ ID NO: 48689 - protein, 979 aa, synthetic construct
  REGION 1..979: note = engineered CasX variant
QEIGKRINKIRRRLVKDSNTKKAGKTGPMKTLLVRVMTPDLRERLENLRKKPENIPQPISNTSRANLNKLLTDYTEMKKAILHVYWEEFQKDPVGLMSRVAQPASKKIDQNKLKPEMDEKGNLTTAGFACSQCGQPLFVYKLEQVSEKGKAYTNYFGRCNVAEHEKLILLAQLKPEKDSDEAVTYSLGKFGQRALDFYSIHVTKESTHPVKPLAQIAGNRYASGPVGKALRDACMGTIASFLSKYQDIIIEHQKVVKGNQKRLESLRELAGKENLEYPSVTLPPQPHTKEGVDAYNEVIARVRMWVNLNLWQKLKLSRDDAKPLLRLKGFPSFPLVERQANEVDWWDMVCNVKKLINEKKEDGKVFWQNLAGYKRQEALRPYLSSEEDRKKGKKFARYQLGDLLLHLEKKHPEDWGKVYDEAWERIDKKVEGLSKHIKLEEERRSEDAQSKAALTDWLRAKASFVIEGLKEADKDEFCRCELKLQKWYGDLRGKPFAIEAENSILDISGFSKQYNCAFIWQKDGVKKLNLYLIINYFKGGKLRFKKIKPEAFEANRFYTVINKKSGEIVPMEVNFNFDDPNLIILPLAFGKRQGREFIWNDLLSLETGSLKLANGRVIEKTLYNRRTRQDEPALFVALTFERREVLDSSNIKPMNLIGVDRGENIPAVIALTDPEGCPLSRFKDSLGNPTHILRIGESYKEKQRTIQAKKEVEQRRAGGYSRKYASKAKNLADDMVRNTARDLLYYAVTQDAMLIFENLSRGFGRQGKRTFMAERQYTRMEDWLTAKLAYEGLPSKTYLSKTLAQYTSKTCSNCGFTITSADYDRVLEKLKKTATGWMTTINGKELKVEGQITYYNRYKRQNVVKDLSVELDRLSEESVNNDISSWTKGRSGEALSLLKKRFSHRPVQEKFVCLNCGFETHADEQAALNIARSWLFLRSQEYKKYQTNKTTGNTDKRAFVETWQSFYRKKLKEVWKPAV

SEQ ID NO: 48690 - protein, 980 aa, synthetic construct
  REGION 1..980: note = engineered CasX variant
QEIGKRINKIRRRLVKDSNTKKAGKTGPMKTLLVRVMTPDLRERLENLRKKPENIPQPISNTSRANLNKLLTDYTEMKKAILHVYWEEFQKDPVGLMSRVAQPASKKIDQNKLKPEMDEKGNLTTAGFACSQCGQPLFVYKLEQVSEKGKAYTNYFGRCNVAEHEKLILLAQLKPEKDSDEAVTYSLGKFGQRALDFYSIHVTKESTHPVKPLAQIAGNRYASGPVGKALRDACMGTIASFLSKYQDIIIEHQKVVKGNQKRLESLRELAGKENLEYPSVTLPPQPHTKEGVDAYNEVIARVRMWVNLNLWQKLKLSRDDAKPLLRLKGFPSFPLVERQANEVDWWDMVCNVKKLINEKKEDGKVFWQNLAGYKRQEALRPYLSSEEDRKKGKKFARYQLGDLLLHLEKKHGERDWGKVYDEAWERIDKKVEGLSKHIKLEEERRSEDAQSKAALTDWLRAKASFVIEGLKEADKDEFCRCELKLQKWYGDLRGKPFAIEAENSILDISGFSKQYNCAFIWQKDGVKKLNLYLIINYFKGGKLRFKKIKPEAFEANRFYTVINKKSGEIVPMEVNFNFDDPNLIILPLAFGKRQGREFIWNDLLSLETGSLKLANGRVIEKTLYNRRTRQDEPALFVALTFERREVLDSSNIKPMNLIGVDRGENIPAVIALTDPEGCPLSRFKDSLGNPTHILRIGESYKEKQRTIQAKKEVEQRRAGGYSRKYASKAKNLADDMVRNTARDLLYYAVTQDAMLIFENLSRGFGRQGKRTFMAERQYTRMEDWLTAKLAYEGLPSKTYLSKTLAQYTSKTCSNCGFTITSADYDRVLEKLKKTATGWMTTINGKELKVEGQITYYNRYKRQNVVKDLSVELDRLSEESVNNDISSWTKGRSGEALSLLKKRFSHRPVQEKFVCLNCGFETHADEQAALNIARSWLFLRSQEYKKYQTNKTTGNTDKRAFVETWQSFYRKKLKEVWKPAV

SEQ ID NO: 48691 - protein, 980 aa, synthetic construct
  REGION 1..980: note = engineered CasX variant
QEIGKRINKIRRRLVKDSNTKKAGKTGPMKTLLVRVMTPDLRERLENLRKKPENIPQPISNTSRANLNKLLTDYTEMKKAILHVYWEEFQKDPVGLMSRVAQPASKKIDQNKLKPEMDEKGNLTTAGFACSQCGQPLFVYKLEQVSEKGKAYTNYFGRCNVAEHEKLILLAQLKPEKDSDEAVTYSLGKFGQRALDFYSIHVTKESTHPVKPLAQIAGNRYASGPVGKALRDACMGTIASFLSKYQDIIIEHQKVVKGNQKRLESLRELAGKENLEYPSVTLPPQPHTKEGVDAYNEVIARVRMWVNLNLWQKLKLSRDDAKPLLRLKGFPSFPLVERQANEVDWWDMVCNVKKLINEKKEDGKVFWQNLAGYKRQEALRPYLSSEEDRKKGKKFARYQLGDLLLHLEKKHGEYDWGKVYDEAWERIDKKVEGLSKHIKLEEERRSEDAQSKAALTDWLRAKASFVIEGLKEADKDEFCRCELKLQKWYGDLRGKPFAIEAENSILDISGFSKQYNCAFIWQKDGVKKLNLYLIINYFKGGKLRFKKIKPEAFEANRFYTVINKKSGEIVPMEVNFNFDDPNLIILPLAFGKRQGREFIWNDLLSLETGSLKLANGRVIEKTLYNRRTRQDEPALFVALTFERREVLDSSNIKPMNLIGVDRGENIPAVIALTDPEGCPLSRFKDSLGNPTHILRIGESYKEKQRTIQAKKEVEQRRAGGYSRKYASKAKNLADDMVRNTARDLLYYAVTQDAMLIFENLSRGFGRQGKRTFMAERQYTRMEDWLTAKLAYEGLPSKTYLSKTLAQYTSKTCSNCGFTITSADYDRVLEKLKKTATGWMTTINGKELKVEGQITYYNRYKRQNVVKDLSVELDRLSEESVNNDISSWTKGRSGEALSLLKKRFSHRPVQEKFVCLNCGFETHADEQAALNIARSWLFLRSQEYKKYQTNKTTGNTDKRAFVETWQSFYRKKLKEVWKPAV

SEQ ID NO: 48692 - protein, 979 aa, synthetic construct
  REGION 1..979: note = engineered CasX variant
QEIGKRINKIRRRLVKDSNTKKAGKTGPMKTLLVRVMTPDLRERLENLRKKPENIPQPISNTSRANLNKLLTDYTEMKKAILHVYWEEFQKDPVGLMSRVAQPASKKIDQNKLKPEMDEKGNLTTAGFACSQCGQPLFVYKLEQVSEKGKAYTNYFGRCNVAEHEKLILLAQLKPEKDSDEAVTYSLGKFGQRALDFYSIHVTKESTHPVKPLAQIAGNRYASGPVGKALRDACMGTIASFLSKYQDIIIEHQKVVKGNQKRLESLRELAGKENLEYPSVTLPPQPHTKEGVDAYNEVIARVRMWVNLNLWQKLKLSRDDAKPLLRLKGFPSFPLVERQANEVDWWDMVCNVKKLINEKKEDGKVFWQNLAGYKRQEALRPYLSSEEDRKKGKKFARYQLGDLLLHLEKKHGEDWGDVYDEAWERIDKKVEGLSKHIKLEEERRSEDAQSKAALTDWLRAKASFVIEGLKEADKDEFCRCELKLQKWYGDLRGKPFAIEAENSILDISGFSKQYNCAFIWQKDGVKKLNLYLIINYFKGGKLRFKKIKPEAFEANRFYTVINKKSGEIVPMEVNFNFDDPNLIILPLAFGKRQGREFIWNDLLSLETGSLKLANGRVIEKTLYNRRTRQDEPALFVALTFERREVLDSSNIKPMNLIGVDRGENIPAVIALTDPEGCPLSRFKDSLGNPTHILRIGESYKEKQRTIQAKKEVEQRRAGGYSRKYASKAKNLADDMVRNTARDLLYYAVTQDAMLIFENLSRGFGRQGKRTFMAERQYTRMEDWLTAKLAYEGLPSKTYLSKTLAQYTSKTCSNCGFTITSADYDRVLEKLKKTATGWMTTINGKELKVEGQITYYNRYKRQNVVKDLSVELDRLSEESVNNDISSWTKGRSGEALSLLKKRFSHRPVQEKFVCLNCGFETHADEQAALNIARSWLFLRSQEYKKYQTNKTTGNTDKRAFVETWQSFYRKKLKEVWKPAV

SEQ ID NO: 48693 - protein, 979 aa, synthetic construct
  REGION 1..979: note = engineered CasX variant
QEIGKRINKIRRRLVKDSNTKKAGKTGPMKTLLVRVMTPDLRERLENLRKKPENIPQPISNTSRANLNKLLTDYTEMKKAILHVYWEEFQKDPVGLMSRVAQPASKKIDQNKLKPEMDEKGNLTTAGFACSQCGQPLFVYKLEQVSEKGKAYTNYFGRCNVAEHEKLILLAQLKPEKDSDEAVTYSLGKFGQRALDFYSIHVTKESTHPVKPLAQIAGNRYASGPVGKALRDACMGTIASFLSKYQDIIIEHQKVVKGNQKRLESLRELAGKENLEYPSVTLPPQPHTKEGVDAYNEVIARVRMWVNLNLWQKLKLSRDDAKPLLRLKGFPSFPLVERQANEVDWWDMVCNVKKLINEKKEDGKVFWQNLAGYKRQEALRPYLSSEEDRKKGKKFARYQLGDLLLHLEKKHGEDWGKVYGEAWERIDKKVEGLSKHIKLEEERRSEDAQSKAALTDWLRAKASFVIEGLKEADKDEFCRCELKLQKWYGDLRGKPFAIEAENSILDISGFSKQYNCAFIWQKDGVKKLNLYLIINYFKGGKLRFKKIKPEAFEANRFYTVINKKSGEIVPMEVNFNFDDPNLIILPLAFGKRQGREFIWNDLLSLETGSLKLANGRVIEKTLYNRRTRQDEPALFVALTFERREVLDSSNIKPMNLIGVDRGENIPAVIALTDPEGCPLSRFKDSLGNPTHILRIGESYKEKQRTIQAKKEVEQRRAGGYSRKYASKAKNLADDMVRNTARDLLYYAVTQDAMLIFENLSRGFGRQGKRTFMAERQYTRMEDWLTAKLAYEGLPSKTYLSKTLAQYTSKTCSNCGFTITSADYDRVLEKLKKTATGWMTTINGKELKVEGQITYYNRYKRQNVVKDLSVELDRLSEESVNNDISSWTKGRSGEALSLLKKRFSHRPVQEKFVCLNCGFETHADEQAALNIARSWLFLRSQEYKKYQTNKTTGNTDKRAFVETWQSFYRKKLKEVWKPAV

SEQ ID NO: 48694 - protein, 979 aa, synthetic construct
  REGION 1..979: note = engineered CasX variant
QEIGKRINKIRRRLVKDSNTKKAGKTGPMKTLLVRVMTPDLRERLENLRKKPENIPQPISNTSRANLNKLLTDYTEMKKAILHVYWEEFQKDPVGLMSRVAQPASKKIDQNKLKPEMDEKGNLTTAGFACSQCGQPLFVYKLEQVSEKGKAYTNYFGRCNVAEHEKLILLAQLKPEKDSDEAVTYSLGKFGQRALDFYSIHVTKESTHPVKPLAQIAGNRYASGPVGKALRDACMGTIASFLSKYQDIIIEHQKVVKGNQKRLESLRELAGKENLEYPSVTLPPQPHTKEGVDAYNEVIARVRMWVNLNLWQKLKLSRDDAKPLLRLKGFPSFPLVERQANEVDWWDMVCNVKKLINEKKEDGKVFWQNLAGYKRQEALRPYLSSEEDRKKGKKFARYQLGDLLLHLEKKHGEDWGKVYDEAWERIDKKVEGLSKHIKLEEERRSEDAQSKAALTDWLRAKASFVIEGKKEADKDEFCRCELKLQKWYGDLRGKPFAIEAENSILDISGFSKQYNCAFIWQKDGVKKLNLYLIINYFKGGKLRFKKIKPEAFEANRFYTVINKKSGEIVPMEVNFNFDDPNLIILPLAFGKRQGREFIWNDLLSLETGSLKLANGRVIEKTLYNRRTRQDEPALFVALTFERREVLDSSNIKPMNLIGVDRGENIPAVIALTDPEGCPLSRFKDSLGNPTHILRIGESYKEKQRTIQAKKEVEQRRAGGYSRKYASKAKNLADDMVRNTARDLLYYAVTQDAMLIFENLSRGFGRQGKRTFMAERQYTRMEDWLTAKLAYEGLPSKTYLSKTLAQYTSKTCSNCGFTITSADYDRVLEKLKKTATGWMTTINGKELKVEGQITYYNRYKRQNVVKDLSVELDRLSEESVNNDISSWTKGRSGEALSLLKKRFSHRPVQEKFVCLNCGFETHADEQAALNIARSWLFLRSQEYKKYQTNKTTGNTDKRAFVETWQSFYRKKLKEVWKPAV

SEQ ID NO: 48695 - protein, 979 aa, synthetic construct
  REGION 1..979: note = engineered CasX variant
QEIGKRINKIRRRLVKDSNTKKAGKTGPMKTLLVRVMTPDLRERLENLRKKPENIPQPISNTSRANLNKLLTDYTEMKKAILHVYWEEFQKDPVGLMSRVAQPASKKIDQNKLKPEMDEKGNLTTAGFACSQCGQPLFVYKLEQVSEKGKAYTNYFGRCNVAEHEKLILLAQLKPEKDSDEAVTYSLGKFGQRALDFYSIHVTKESTHPVKPLAQIAGNRYASGPVGKALRDACMGTIASFLSKYQDIIIEHQKVVKGNQKRLESLRELAGKENLEYPSVTLPPQPHTKEGVDAYNEVIARVRMWVNLNLWQKLKLSRDDAKPLLRLKGFPSFPLVERQANEVDWWDMVCNVKKLINEKKEDGKVFWQNLAGYKRQEALRPYLSSEEDRKKGKKFARYQLGDLLLHLEKKHGEDWGKVYDEAWERIDKKVEGLSKHIKLEEERRSEDAQSKAALTDWLRAKASFVIEGSKEADKDEFCRCELKLQKWYGDLRGKPFAIEAENSILDISGFSKQYNCAFIWQKDGVKKLNLYLIINYFKGGKLRFKKIKPEAFEANRFYTVINKKSGEIVPMEVNFNFDDPNLIILPLAFGKRQGREFIWNDLLSLETGSLKLANGRVIEKTLYNRRTRQDEPALFVALTFERREVLDSSNIKPMNLIGVDRGENIPAVIALTDPEGCPLSRFKDSLGNPTHILRIGESYKEKQRTIQAKKEVEQRRAGGYSRKYASKAKNLADDMVRNTARDLLYYAVTQDAMLIFENLSRGFGRQGKRTFMAERQYTRMEDWLTAKLAYEGLPSKTYLSKTLAQYTSKTCSNCGFTITSADYDRVLEKLKKTATGWMTTINGKELKVEGQITYYNRYKRQNVVKDLSVELDRLSEESVNNDISSWTKGRSGEALSLLKKRFSHRPVQEKFVCLNCGFETHADEQAALNIARSWLFLRSQEYKKYQTNKTTGNTDKRAFVETWQSFYRKKLKEVWKPAV

SEQ ID NO: 48696 - protein, 980 aa, synthetic construct
  REGION 1..980: note = engineered CasX variant
QEIGKRINKIRRRLVKDSNTKKAGKTGPMKTLLVRVMTPDLRERLENLRKKPENIPQPISNTSRANLNKLLTDYTEMKKAILHVYWEEFQKDPVGLMSRVAQPASKKIDQNKLKPEMDEKGNLTTAGFACSQCGQPLFVYKLEQVSEKGKAYTNYFGRCNVAEHEKLILLAQLKPEKDSDEAVTYSLGKFGQRALDFYSIHVTKESTHPVKPLAQIAGNRYASGPVGKALRDACMGTIASFLSKYQDIIIEHQKVVKGNQKRLESLRELAGKENLEYPSVTLPPQPHTKEGVDAYNEVIARVRMWVNLNLWQKLKLSRDDAKPLLRLKGFPSFPLVERQANEVDWWDMVCNVKKLINEKKEDGKVFWQNLAGYKRQEALRPYLSSEEDRKKGKKFARYQLGDLLLHLEKKHGEDWGKVYDEAWERIDKKVEGLSKHIKLEEERRSEDAQSKAALTDWLRAKASFVIEGLKEADDKDEFCRCELKLQKWYGDLRGKPFAIEAENSILDISGFSKQYNCAFIWQKDGVKKLNLYLIINYFKGGKLRFKKIKPEAFEANRFYTVINKKSGEIVPMEVNFNFDDPNLIILPLAFGKRQGREFIWNDLLSLETGSLKLANGRVIEKTLYNRRTRQDEPALFVALTFERREVLDSSNIKPMNLIGVDRGENIPAVIALTDPEGCPLSRFKDSLGNPTHILRIGESYKEKQRTIQAKKEVEQRRAGGYSRKYASKAKNLADDMVRNTARDLLYYAVTQDAMLIFENLSRGFGRQGKRTFMAERQYTRMEDWLTAKLAYEGLPSKTYLSKTLAQYTSKTCSNCGFTITSADYDRVLEKLKKTATGWMTTINGKELKVEGQITYYNRYKRQNVVKDLSVELDRLSEESVNNDISSWTKGRSGEALSLLKKRFSHRPVQEKFVCLNCGFETHADEQAALNIARSWLFLRSQEYKKYQTNKTTGNTDKRAFVETWQSFYRKKLKEVWKPAV

SEQ ID NO: 48697 - protein, 980 aa, synthetic construct
  REGION 1..980: note = engineered CasX variant
QEIGKRINKIRRRLVKDSNTKKAGKTGPMKTLLVRVMTPDLRERLENLRKKPENIPQPISNTSRANLNKLLTDYTEMKKAILHVYWEEFQKDPVGLMSRVAQPASKKIDQNKLKPEMDEKGNLTTAGFACSQCGQPLFVYKLEQVSEKGKAYTNYFGRCNVAEHEKLILLAQLKPEKDSDEAVTYSLGKFGQRALDFYSIHVTKESTHPVKPLAQIAGNRYASGPVGKALRDACMGTIASFLSKYQDIIIEHQKVVKGNQKRLESLRELAGKENLEYPSVTLPPQPHTKEGVDAYNEVIARVRMWVNLNLWQKLKLSRDDAKPLLRLKGFPSFPLVERQANEVDWWDMVCNVKKLINEKKEDGKVFWQNLAGYKRQEALRPYLSSEEDRKKGKKFARYQLGDLLLHLEKKHGEDWGKVYDEAWERIDKKVEGLSKHIKLEEERRSEDAQSKAALTDWLRAKASFVIEGLKEADKDEFCRCELKLQKWYGDLRGKPFAIEAENSILDISGFSKQYNCAFIWQKDGVKKLNLYLIINYFKGGKLRFKKIKPEAFEANRFYTVINKKSGEIVPMEVNFNFDDPNLIILPLAFGKRQGREFIWNDLLSLETGSLKLANGRVIEKTLYNRRTRQDEPALFVALTFERREVLDSSNIKPMNLIGVDRGENIPAVIALTDPEGCPLSRFKDSLGNPTHILRIGESYKEKQRTIQAKKEVEQRRAGGYSRKYASKAKNLADDMVRNTARDLLYYAVTQDAMLIFENLSRGFGRQGKRTFMAERQYTRMEDWLTAKLAYEGLPSKTYLSKTLAQYTSKTCSNCGFTITSADYDRVLEKLKKTATGWMTTINGKELKVEGQITYYNRYKRQNVVKDLSVELDRLSEESVNNDISSWTKGRSGNEALSLLKKRFSHRPVQEKFVCLNCGFETHADEQAALNIARSWLFLRSQEYKKYQTNKTTGNTDKRAFVETWQSFYRKKLKEVWKPAV

SEQ ID NO: 48698 - protein, 979 aa, synthetic construct
  REGION 1..979: note = engineered CasX variant
QEIGKRINKIRRRLVKDSNTKKAGKTGPMKTLLVRVMTPDLRERLENLRKKPENIPQPISNTSRANLNKLLTDYTEMKKAILHVYWEEFQKDPVGLMSRVAQPASKKIDQNKLKPEMDEKGNLTTAGFACSQCGQPLFVYKLEQVSEKGKAYTNYFGRCNVAEHEKLILLAQLKPEKDSDEAVTYSLGKFGQRALDFYSIHVTKESTHPVKPLAQIAGNRYASGPVGKALRDACMGTIASFLSKYQDIIIEHQKVVKGNQKRLESLRELAGKENLEYPSVTLPPQPHTKEGVDAYNEVIARVRMWVNLNLWQKLKLSRDDAKPLLRLKGFPSFPLVERQANEVDWWDMVCNVKKLINEKKEDGKVFWQNLAGYKRQEALRPYLSSEEDRQKGKKFARYQLGDLLLHLEKKHGEDWGKVYDEAWERIDKKVEGLSKHIKLEEERRSEDAQSKAALTDWLRAKASFVIEGLKEADKDEFCRCELKLQKWYGDLRGKPFAIEAENSILDISGFSKQYNCAFIWQKDGVKKLNLYLIINYFKGGKLRFKKIKPEAFEANRFYTVINKKSGEIVPMEVNFNFDDPNLIILPLAFGKRQGREFIWNDLLSLETGSLKLANGRVIEKTLYNRRTRQDEPALFVALTFERREVLDSSNIKPMNLIGVDRGENIPAVIALTDPEGCPLSRFKDSLGNPTHILRIGESYKEKQRTIQAKKEVEQRRAGGYSRKYASKAKNLADDMVRNTARDLLYYAVTQDAMLIFENLSRGFGRQGKRTFMAERQYTRMEDWLTAKLAYEGLPSKTYLSKTLAQYTSKTCSNCGFTITSADYDRVLEKLKKTATGWMTTINGKELKVEGQITYYNRYKRQNVVKDLSVELDRLSEESVNNDISSWTKGRSGEALSLLKKRFSHRPVQEKFVCLNCGFETHADEQAALNIARSWLFLRSQEYKKYQTNKTTGNTDKRAFVETWQSFYRKKLKEVWKPAV

SEQ ID NO: 48699 - protein, 979 aa, synthetic construct
  REGION 1..979: note = engineered CasX variant
QEIGKRINKIRRRLVKDSNTKKAGKTGPMKTLLVRVMTPDLRERLENLRKKPENIPQPISNTSRANLNKLLTDYTEMKKAILHVYWEEFQKDPVGLMSRVAQPASKKIDQNKLKPEMDEKGNLTTAGFACSQCGQPLFVYKLEQVSEKGKAYTNYFGRCNVAEHEKLILLAQLKPEKDSDEAVTYSLGKFGQRALDFYSIHVTKESTHPVKPLAQIAGNRYASGPVGKALRDACMGTIASFLSKYQDIIIEHQKVVKGNQKRLESLRELAGKENLEYPSVTLPPQPHTKEGVDAYNEVIARVRMWVNLNLWQKLKLSRDDAKPLLRLKGFPSFPLVERQANEVDWWDMVCNVKKLINEKKEDGKVFWQNLAGYKRQEALRPYLSSEEDRKKGKKFARYQLGDLLLHLEKKHGEDWGKVYDEAWERIDKKVEGLSKHIKLEEERRSEDAQSKAALTDWLRAKASFVIEGLKEADKDEFCRCELKLQKWYGDLRGKPFAIEAENSILDISGFSKQYNCAFIWQKDGVKKLNLYLIINYFKGGKLRFKKIKPEAFEANRFYTVINKKSGEIVPMEVNFNFDDPNLIILPLAFGKRQGREFIWNDLLSLETGSLKLANGRVIEKTLYNRRTRQDEPALFVALTFERREVLDSSNIKPMNLIGVDRGENIPAVIALTDPEGCPLSRFKDSLGNPTHILRIGESYKEKQRTIQAKKEVEQRRAGGYSRKYASKAKNLADDMVRNTARDLLYYAVTQDAMLIFENLSRGFGRQGKRTFMAERQYTRMEDWLTAKLAYEGLPSQTYLSKTLAQYTSKTCSNCGFTITSADYDRVLEKLKKTATGWMTTINGKELKVEGQITYYNRYKRQNVVKDLSVELDRLSEESVNNDISSWTKGRSGEALSLLKKRFSHRPVQEKFVCLNCGFETHADEQAALNIARSWLFLRSQEYKKYQTNKTTGNTDKRAFVETWQSFYRKKLKEVWKPAV

SEQ ID NO: 48700 - protein, 979 aa, synthetic construct
  REGION 1..979: note = engineered CasX variant
QEIGKRINKIRRRLVKDSNTKKAGKTGPMKTLLVRVMTPDLRERLENLRKKPENIPQPISNTSRANLNKLLTDYTEMKKAILHVYWEEFQKDPVGLMSRVAQPASKKIDQNKLKPEMDEKGNLTTAGFACSQCGQPLFVYKLEQVSEKGKAYTNYFGRCNVAEHEKLILLAQLKPEKDSDEAVTYSLGKFGQRALDFYSIHVTKESTHPVKPLAQIAGNRYASGPVGKALRDACMGTIASFLSKYQDIIIEHQKVVKGNQKRLESLRELAGKENLEYPSVTLPPQPHTKEGVDAYNEVIARVRMWVNLNLWQKLKLSRDDAKPLLRLKGFPSFPLVERQANEVDWWDMVCNVKKLINEKKEDGKVFWQNLAGYKRQEALRPYLSSEEDRKKGKKFARYQLGDLLLHLEKKHGEDWGKVYDEAWERIDKKVEGLSKHIKLEEERRSEDAQSKAALTDWLRAKASFVIEGLKEADKDEFCRCELKLQKWYGDLRGKPFAIEAENSILDISGFSKQYNCAFIWQKDGVKKLNLYLIINYFKGGKLRFKKIKPEAFEANRFYTVINKKSGEIVPMEVNFNFDDPNLIILPLAFGKRQGREFIWNDLLSLETGSLKLANGRVIEKTLYNRRTRQDEPALFVALTFERREVLDSSNIKPMNLIGVDRGENIPAVIALTDPEGCPLSRFKDSLGNPTHILRIGESYKEKQRTIQAKKEVEQRRAGGYSRKYASKAKNLADDMVRNTARDLLYYAVTQDAMLIFENLSRGFGRQGKRTFMAERQYTRMEDWLTAKLAYNGLPSKTYLSKTLAQYTSKTCSNCGFTITSADYDRVLEKLKKTATGWMTTINGKELKVEGQITYYNRYKRQNVVKDLSVELDRLSEESVNNDISSWTKGRSGEALSLLKKRFSHRPVQEKFVCLNCGFETHADEQAALNIARSWLFLRSQEYKKYQTNKTTGNTDKRAFVETWQSFYRKKLKEVWKPAV

SEQ ID NO: 48701 - protein, 979 aa, synthetic construct
  REGION 1..979: note = engineered CasX variant
QEIGKRINKIRRRLVKDSNTKKAGKTGPMKTLLVRVMTPDLRERLENLRKKPENIPQPISNTSRANLNKLLTDYTEMKKAILHVYWEEFQKDPVGLMSRVAQPASKKIDQNKLKPEMDEKGNLTTAGFACSQCGQPLFVYKLEQVSEKGKAYTNYFGRCNVAEHEKLIQLAQLKPEKDSDEAVTYSLGKFGQRALDFYSIHVTKESTHPVKPLAQIAGNRYASGPVGKALRDACMGTIASFLSKYQDIIIEHQKVVKGNQKRLESLRELAGKENLEYPSVTLPPQPHTKEGVDAYNEVIARVRMWVNLNLWQKLKLSRDDAKPLLRLKGFPSFPLVERQANEVDWWDMVCNVKKLINEKKEDGKVFWQNLAGYKRQEALRPYLSSEEDRKKGKKFARYQLGDLLLHLEKKHGEDWGKVYDEAWERIDKKVEGLSKHIKLEEERRSEDAQSKAALTDWLRAKASFVIEGLKEADKDEFCRCELKLQKWYGDLRGKPFAIEAENSILDISGFSKQYNCAFIWQKDGVKKLNLYLIINYFKGGKLRFKKIKPEAFEANRFYTVINKKSGEIVPMEVNFNFDDPNLIILPLAFGKRQGREFIWNDLLSLETGSLKLANGRVIEKTLYNRRTRQDEPALFVALTFERREVLDSSNIKPMNLIGVDRGENIPAVIALTDPEGCPLSRFKDSLGNPTHILRIGESYKEKQRTIQAKKEVEQRRAGGYSRKYASKAKNLADDMVRNTARDLLYYAVTQDAMLIFENLSRGFGRQGKRTFMAERQYTRMEDWLTAKLAYEGLPSKTYLSKTLAQYTSKTCSNCGFTITSADYDRVLEKLKKTATGWMTTINGKELKVEGQITYYNRYKRQNVVKDLSVELDRLSEESVNNDISSWTKGRSGEALSLLKKRFSHRPVQEKFVCLNCGFETHADEQAALNIARSWLFLRSQEYKKYQTNKTTGNTDKRAFVETWQSFYRKKLKEVWKPAV

SEQ ID NO: 48702 - protein, 979 aa, synthetic construct
  REGION 1..979: note = engineered CasX variant
QEIGKRINKIRRRLVKDSNTKKAGKTGPMKTLLVRVMTPDLRERLENLRKKPENIPQPISNTSRANLNKLLTDYTEMKKAILHVYWEEFQKDPVGLMSRVAQPASKKIDQNKLKPEMDEKGNLTTAGFACSQCGQPLFVYKLEQVSEKGKAYTNYFGRCNVAEHEKLILLAQLKPEKDSDEAVTYSLGKFGQRALDFYSIHVTKESTHPVKPLAQIAGNRYASGPVGKALRDACMGTIASFLSKYQDIIIEHQKVVKGNQKRLESLRELAGKENLEYPSVTLPPQPHTKEGVDAYNEVIARVRMWVNLNLWQKLKLSRDDAKPLLRLKGFPSFPLVERQANEVDWWDMVCNVKKLINEKKEDGKVFWQNLAIYKRQEALRPYLSSEEDRKKGKKFARYQLGDLLLHLEKKHGEDWGKVYDEAWERIDKKVEGLSKHIKLEEERRSEDAQSKAALTDWLRAKASFVIEGLKEADKDEFCRCELKLQKWYGDLRGKPFAIEAENSILDISGFSKQYNCAFIWQKDGVKKLNLYLIINYFKGGKLRFKKIKPEAFEANRFYTVINKKSGEIVPMEVNFNFDDPNLIILPLAFGKRQGREFIWNDLLSLETGSLKLANGRVIEKTLYNRRTRQDEPALFVALTFERREVLDSSNIKPMNLIGVDRGENIPAVIALTDPEGCPLSRFKDSLGNPTHILRIGESYKEKQRTIQAKKEVEQRRAGGYSRKYASKAKNLADDMVRNTARDLLYYAVTQDAMLIFENLSRGFGRQGKRTFMAERQYTRMEDWLTAKLAYEGLPSKTYLSKTLAQYTSKTCSNCGFTITSADYDRVLEKLKKTATGWMTTINGKELKVEGQITYYNRYKRQNVVKDLSVELDRLSEESVNNDISSWTKGRSGEALSLLKKRFSHRPVQEKFVCLNCGFETHADEQAALNIARSWLFLRSQEYKKYQTNKTTGNTDKRAFVETWQSFYRKKLKEVWKPAV

SEQ ID NO: 48703 - protein, 979 aa, synthetic construct
  REGION 1..979: note = engineered CasX variant
QEIGKRINKIRRRLVKDSNTKKAGKTGPMKTLLVRVMTPDLRERLENLRKKPENIPQPISNTSRANLNKLLTDYTEMKKAILHVYWEEFQKDPVGLMSRVAQPASKKIDQNKLKPEMDEKGNLTTAGFACSQCGQPLFVYKLEQVSEKGKAYTNYFGRCNVAEHEKLILLAQLKPEKDSDEAVTYSLGKFGQRALDFYSIHVTKESTHPVKPLAQIAGNRYASGPVGKALRDACMGTIASFLSKYQDIIIEHQKVVKGNQKRLESLRELAGKENLEYPSVTLPPQPHTKEGVDAYNEVIARVRMWVNLNLWQKLKLSRDDAKPLLRLKGFPSFPLVERQANEVDWWDMVCNVKKLINEKKEDGKVFWQNLAGYKRQEALRPYLSSEEDREKGKKFARYQLGDLLLHLEKKHGEDWGKVYDEAWERIDKKVEGLSKHIKLEEERRSEDAQSKAALTDWLRAKASFVIEGLKEADKDEFCRCELKLQKWYGDLRGKPFAIEAENSILDISGFSKQYNCAFIWQKDGVKKLNLYLIINYFKGGKLRFKKIKPEAFEANRFYTVINKKSGEIVPMEVNFNFDDPNLIILPLAFGKRQGREFIWNDLLSLETGSLKLANGRVIEKTLYNRRTRQDEPALFVALTFERREVLDSSNIKPMNLIGVDRGENIPAVIALTDPEGCPLSRFKDSLGNPTHILRIGESYKEKQRTIQAKKEVEQRRAGGYSRKYASKAKNLADDMVRNTARDLLYYAVTQDAMLIFENLSRGFGRQGKRTFMAERQYTRMEDWLTAKLAYEGLPSKTYLSKTLAQYTSKTCSNCGFTITSADYDRVLEKLKKTATGWMTTINGKELKVEGQITYYNRYKRQNVVKDLSVELDRLSEESVNNDISSWTKGRSGEALSLLKKRFSHRPVQEKFVCLNCGFETHADEQAALNIARSWLFLRSQEYKKYQTNKTTGNTDKRAFVETWQSFYRKKLKEVWKPAV

SEQ ID NO: 48704 - protein, 979 aa, synthetic construct
  REGION 1..979: note = engineered CasX variant
QEIGKRINKIRRRLVKDSNTKKAGKTGPMKTLLVRVMTPDLRERLENLRKKPENIPQPISNTSRANLNKLLTDYTEMKKAILHVYWEEFQKDPVGLMSRVAQPASKKIDQNKLKPEMDEKGNLTTAGFACSQCGQPLFVYKLEQVSEKGKAYTNYFGRCNVAEHEKLILLAQLKPEKDSDEAVTYSLGKFGQRALDFYSIHVTKESTHPVKPLAQIAGNRYASGPVGKALRDACMGTIASFLSKYQDIIIEHQKVVKGNQKRLESLRELAGKENLEYPSVTLPPQPHTKEGVDAYNEVIARVRMWVNLNLWQKLKLSRDDAKPLLRLKGFPSFPLVERQANEVDWWDMVCNVKKLINEKKEDGKVFWQNLAGYKRQEALRPYLSSEEDRKKGKKFARYQLGDLLLHLEKKHGEDWGKVYDEAWERIDKKVEGLSKHIKLEEERRSEDAQSKAALTDWLRAKASFVIEGLKEADKDEFCRCELKLQKWYGDLRGKPFAIEAENSILDISGFSKQYNCAFIWQKDGVKKLNLYLIINYFKGGKLRFKKIKPEAFEANRFYTVINKKSGEIVIMEVNFNFDDPNLIILPLAFGKRQGREFIWNDLLSLETGSLKLANGRVIEKTLYNRRTRQDEPALFVALTFERREVLDSSNIKPMNLIGVDRGENIPAVIALTDPEGCPLSRFKDSLGNPTHILRIGESYKEKQRTIQAKKEVEQRRAGGYSRKYASKAKNLADDMVRNTARDLLYYAVTQDAMLIFENLSRGFGRQGKRTFMAERQYTRMEDWLTAKLAYEGLPSKTYLSKTLAQYTSKTCSNCGFTITSADYDRVLEKLKKTATGWMTTINGKELKVEGQITYYNRYKRQNVVKDLSVELDRLSEESVNNDISSWTKGRSGEALSLLKKRFSHRPVQEKFVCLNCGFETHADEQAALNIARSWLFLRSQEYKKYQTNKTTGNTDKRAFVETWQSFYRKKLKEVWKPAV

SEQ ID NO: 48705 - protein, 978 aa, synthetic construct
  REGION 1..978: note = engineered CasX variant
QEIGRINKIRRRLVKDSNTKKAGKTGPMKTLLVRVMTPDLRERLENLRKKPENIPQPISNTSRANLNKLLTDYTEMKKAILHVYWEEFQKDPVGLMSRVAQPASKKIDQNKLKPEMDEKGNLTTAGFACSQCGQPLFVYKLEQVSEKGKAYTNYFGRCNVAEHEKLILLAQLKPEKDSDEAVTYSLGKFGQRALDFYSIHVTKESTHPVKPLAQIAGNRYASGPVGKALRGACMGTIASFLSKYQDIIIEHQKVVKGNQKRLESLRELAGKENLEYPSVTLPPQPHTKEGVDAYNEVIARVRMWVNLNLWQKLKLSRDDAKPLLRLKGFPSFPLVERQANEVDWWDMVCNVKKLINEKKEDGKVFWQNLAGYKRQEALRPYLSSEEDRKKGKKFARYQLGDLLLHLEKKHGEDWGKVYDEAWERIDKKVEGLSKHIKLEEERRSEDAQSKAALTDWLRAKASFVIEGLKEADKDEFCRCELKLQKWYGDLRGKPFAIEAENSILDISGFSKQYNCAFIWQKDGVKKLNLYLIINYFKGGKLRFKKIKPEAFEANRFYTVINKKSGEIVPMEVNFNFDDPNLIILPLAFGKRQGREFIWNDLLSLETGSLKLANGRVIEKTLYNRRTRQDEPALFVALTFERREVLDSSNIKPMNLIGVDRGENIPAVIALTDPEGCPLSRFKDSLGNPTHILRIGESYKEKQRTIQAKKEVEQRRAGGYSRKYASKAKNLADDMVRNTARDLLYYAVTQDAMLIFENLSRGFGRQGKRTFMAERQYTRMEDWLTAKLAYEGLPSKTYLSKTLAQYTSKTCSNCGFTITSADYDRVLEKLKKTATGWMTTINGKELKVEGQITYYNRYKRQNVVKDLSVELDRLSEESVNNDISSWTKGRSGEALSLLKKRFSHRPVQEKFVCLNCGFETHADEQAALNIARSWLFLRSQEYKKYQTNKTTGNTDKRAFVETWQSFYRKKLKEVWKPAV

SEQ ID NO: 48706 - protein, 978 aa, synthetic construct
  REGION 1..978: note = engineered CasX variant
QEIGRINKIRRRLVKDSNTKKAGKTGPMKTLLVRVMTPDLRERLENLRKKPENIPQPISNTSRANLNKLLTDYTEMKKAILHVYWEEFQKDPVGLMSRVAQPASKKIDQNKLKPEMDEKGNLTTAGFACSQCGQPLFVYKLEQVSEKGKAYTNYFGRCNVAEHEKLILLAQLKPEKDSDEAVTYSLGKFGQRALDFYSIHVTKESTHPVKPLAQIAGNRYASGPVGKALRDACMGTIASFLSKYQDIIIEHQKVVKGNQKRLESLRELAGKENLEYPSVTLPPQPHTKEGVDAYNEVIARVRMWVNLNLWQKLKLSRDDAKPLLRLKNFPSFPLVERQANEVDWWDMVCNVKKLINEKKEDGKVFWQNLAGYKRQEALRPYLSSEEDRKKGKKFARYQLGDLLLHLEKKHGEDWGKVYDEAWERIDKKVEGLSKHIKLEEERRSEDAQSKAALTDWLRAKASFVIEGLKEADKDEFCRCELKLQKWYGDLRGKPFAIEAENSILDISGFSKQYNCAFIWQKDGVKKLNLYLIINYFKGGKLRFKKIKPEAFEANRFYTVINKKSGEIVPMEVNFNFDDPNLIILPLAFGKRQGREFIWNDLLSLETGSLKLANGRVIEKTLYNRRTRQDEPALFVALTFERREVLDSSNIKPMNLIGVDRGENIPAVIALTDPEGCPLSRFKDSLGNPTHILRIGESYKEKQRTIQAKKEVEQRRAGGYSRKYASKAKNLADDMVRNTARDLLYYAVTQDAMLIFENLSRGFGRQGKRTFMAERQYTRMEDWLTAKLAYEGLPSKTYLSKTLAQYTSKTCSNCGFTITSADYDRVLEKLKKTATGWMTTINGKELKVEGQITYYNRYKRQNVVKDLSVELDRLSEESVNNDISSWTKGRSGEALSLLKKRFSHRPVQEKFVCLNCGFETHADEQAALNIARSWLFLRSQEYKKYQTNKTTGNTDKRAFVETWQSFYRKKLKEVWKPAV

SEQ ID NO: 48707 - protein, 978 aa, synthetic construct
  REGION 1..978: note = engineered CasX variant
QEIGRINKIRRRLVKDSNTKKAGKTGPMKTLLVRVMTPDLRERLENLRKKPENIPQPISNTSRANLNKLLTDYTEMKKAILHVYWEEFQKDPVGLMSRVAQPASKKIDQNKLKPEMDEKGNLTTAGFACSQCGQPLFVYKLEQVSEKGKAYTNYFGRCNVAEHEKLILLAQLKPEKDSDEAVTYSLGKFGQRALDFYSIHVTKESTHPVKPLAQIAGNRYASGPVGKALRDACMGTIASFLSKYQDIIIEHQKVVKGNQKRLESLRELAGKENLEYPSVTLPPQPHTKEGVDAYNEVIARVRMWVNLNLWQKLKLSRDDAKPLLRLKGFPSFPLVERQANEVDWWDMVCNVKKLINEKKEDGKVFWQNLAGYKRQEALRPYLSSEEDRKKGKKFARYQLGDLLNHLEKKHGEDWGKVYDEAWERIDKKVEGLSKHIKLEEERRSEDAQSKAALTDWLRAKASFVIEGLKEADKDEFCRCELKLQKWYGDLRGKPFAIEAENSILDISGFSKQYNCAFIWQKDGVKKLNLYLIINYFKGGKLRFKKIKPEAFEANRFYTVINKKSGEIVPMEVNFNFDDPNLIILPLAFGKRQGREFIWNDLLSLETGSLKLANGRVIEKTLYNRRTRQDEPALFVALTFERREVLDSSNIKPMNLIGVDRGENIPAVIALTDPEGCPLSRFKDSLGNPTHILRIGESYKEKQRTIQAKKEVEQRRAGGYSRKYASKAKNLADDMVRNTARDLLYYAVTQDAMLIFENLSRGFGRQGKRTFMAERQYTRMEDWLTAKLAYEGLPSKTYLSKTLAQYTSKTCSNCGFTITSADYDRVLEKLKKTATGWMTTINGKELKVEGQITYYNRYKRQNVVKDLSVELDRLSEESVNNDISSWTKGRSGEALSLLKKRFSHRPVQEKFVCLNCGFETHADEQAALNIARSWLFLRSQEYKKYQTNKTTGNTDKRAFVETWQSFYRKKLKEVWKPAV

SEQ ID NO: 48708 - protein, 978 aa, synthetic construct
  REGION 1..978: note = engineered CasX variant
QEIGRINKIRRRLVKDSNTKKAGKTGPMKTLLVRVMTPDLRERLENLRKKPENIPQPISNTSRANLNKLLTDYTEMKKAILHVYWEEFQKDPVGLMSRVAQPASKKIDQNKLKPEMDEKGNLTTAGFACSQCGQPLFVYKLEQVSEKGKAYTNYFGRCNVAEHEKLILLAQLKPEKDSDEAVTYSLGKFGQRALDFYSIHVTKESTHPVKPLAQIAGNRYASGPVGKALRDACMGTIASFLSKYQDIIIEHQKVVKGNQKRLESLRELAGKENLEYPSVTLPPQPHTKEGVDAYNEVIARVRMWVNLNLWQKLKLSRDDAKPLLRLKGFPSFPLVERQANEVDWWDMVCNVKKLINEKKEDGKVFWQNLAGYKRQEALRPYLSSEEDRKKGKKFARYQLGDLLWHLEKKHGEDWGKVYDEAWERIDKKVEGLSKHIKLEEERRSEDAQSKAALTDWLRAKASFVIEGLKEADKDEFCRCELKLQKWYGDLRGKPFAIEAENSILDISGFSKQYNCAFIWQKDGVKKLNLYLIINYFKGGKLRFKKIKPEAFEANRFYTVINKKSGEIVPMEVNFNFDDPNLIILPLAFGKRQGREFIWNDLLSLETGSLKLANGRVIEKTLYNRRTRQDEPALFVALTFERREVLDSSNIKPMNLIGVDRGENIPAVIALTDPEGCPLSRFKDSLGNPTHILRIGESYKEKQRTIQAKKEVEQRRAGGYSRKYASKAKNLADDMVRNTARDLLYYAVTQDAMLIFENLSRGFGRQGKRTFMAERQYTRMEDWLTAKLAYEGLPSKTYLSKTLAQYTSKTCSNCGFTITSADYDRVLEKLKKTATGWMTTINGKELKVEGQITYYNRYKRQNVVKDLSVELDRLSEESVNNDISSWTKGRSGEALSLLKKRFSHRPVQEKFVCLNCGFETHADEQAALNIARSWLFLRSQEYKKYQTNKTTGNTDKRAFVETWQSFYRKKLKEVWKPAV

SEQ ID NO: 48709 - protein, 978 aa, synthetic construct
  REGION 1..978: note = engineered CasX variant
QEIGRINKIRRRLVKDSNTKKAGKTGPMKTLLVRVMTPDLRERLENLRKKPENIPQPISNTSRANLNKLLTDYTEMKKAILHVYWEEFQKDPVGLMSRVAQPASKKIDQNKLKPEMDEKGNLTTAGFACSQCGQPLFVYKLEQVSEKGKAYTNYFGRCNVAEHEKLILLAQLKPEKDSDEAVTYSLGKFGQRALDFYSIHVTKESTHPVKPLAQIAGNRYASGPVGKALRDACMGTIASFLSKYQDIIIEHQKVVKGNQKRLESLRELAGKENLEYPSVTLPPQPHTKEGVDAYNEVIARVRMWVNLNLWQKLKLSRDDAKPLLRLKGFPSFPLVERQANEVDWWDMVCNVKKLINEKKEDGKVFWQNLAGYKRQEALRPYLSSEEDRKKGKKFARYQLGDLLLHLYKKHGEDWGKVYDEAWERIDKKVEGLSKHIKLEEERRSEDAQSKAALTDWLRAKASFVIEGLKEADKDEFCRCELKLQKWYGDLRGKPFAIEAENSILDISGFSKQYNCAFIWQKDGVKKLNLYLIINYFKGGKLRFKKIKPEAFEANRFYTVINKKSGEIVPMEVNFNFDDPNLIILPLAFGKRQGREFIWNDLLSLETGSLKLANGRVIEKTLYNRRTRQDEPALFVALTFERREVLDSSNIKPMNLIGVDRGENIPAVIALTDPEGCPLSRFKDSLGNPTHILRIGESYKEKQRTIQAKKEVEQRRAGGYSRKYASKAKNLADDMVRNTARDLLYYAVTQDAMLIFENLSRGFGRQGKRTFMAERQYTRMEDWLTAKLAYEGLPSKTYLSKTLAQYTSKTCSNCGFTITSADYDRVLEKLKKTATGWMTTINGKELKVEGQITYYNRYKRQNVVKDLSVELDRLSEESVNNDISSWTKGRSGEALSLLKKRFSHRPVQEKFVCLNCGFETHADEQAALNIARSWLFLRSQEYKKYQTNKTTGNTDKRAFVETWQSFYRKKLKEVWKPAV

SEQ ID NO: 48710 - protein, 978 aa, synthetic construct
  REGION 1..978: note = engineered CasX variant
QEIGRINKIRRRLVKDSNTKKAGKTGPMKTLLVRVMTPDLRERLENLRKKPENIPQPISNTSRANLNKLLTDYTEMKKAILHVYWEEFQKDPVGLMSRVAQPASKKIDQNKLKPEMDEKGNLTTAGFACSQCGQPLFVYKLEQVSEKGKAYTNYFGRCNVAEHEKLILLAQLKPEKDSDEAVTYSLGKFGQRALDFYSIHVTKESTHPVKPLAQIAGNRYASGPVGKALRDACMGTIASFLSKYQDIIIEHQKVVKGNQKRLESLRELAGKENLEYPSVTLPPQPHTKEGVDAYNEVIARVRMWVNLNLWQKLKLSRDDAKPLLRLKGFPSFPLVERQANEVDWWDMVCNVKKLINEKKEDGKVFWQNLAGYKRQEALRPYLSSEEDRKKGKKFARYQLGDLLLHLEKKHPEDWGKVYDEAWERIDKKVEGLSKHIKLEEERRSEDAQSKAALTDWLRAKASFVIEGLKEADKDEFCRCELKLQKWYGDLRGKPFAIEAENSILDISGFSKQYNCAFIWQKDGVKKLNLYLIINYFKGGKLRFKKIKPEAFEANRFYTVINKKSGEIVPMEVNFNFDDPNLIILPLAFGKRQGREFIWNDLLSLETGSLKLANGRVIEKTLYNRRTRQDEPALFVALTFERREVLDSSNIKPMNLIGVDRGENIPAVIALTDPEGCPLSRFKDSLGNPTHILRIGESYKEKQRTIQAKKEVEQRRAGGYSRKYASKAKNLADDMVRNTARDLLYYAVTQDAMLIFENLSRGFGRQGKRTFMAERQYTRMEDWLTAKLAYEGLPSKTYLSKTLAQYTSKTCSNCGFTITSADYDRVLEKLKKTATGWMTTINGKELKVEGQITYYNRYKRQNVVKDLSVELDRLSEESVNNDISSWTKGRSGEALSLLKKRFSHRPVQEKFVCLNCGFETHADEQAALNIARSWLFLRSQEYKKYQTNKTTGNTDKRAFVETWQSFYRKKLKEVWKPAV

SEQ ID NO: 48711 - protein, 979 aa, synthetic construct
  REGION 1..979: note = engineered CasX variant
QEIGRINKIRRRLVKDSNTKKAGKTGPMKTLLVRVMTPDLRERLENLRKKPENIPQPISNTSRANLNKLLTDYTEMKKAILHVYWEEFQKDPVGLMSRVAQPASKKIDQNKLKPEMDEKGNLTTAGFACSQCGQPLFVYKLEQVSEKGKAYTNYFGRCNVAEHEKLILLAQLKPEKDSDEAVTYSLGKFGQRALDFYSIHVTKESTHPVKPLAQIAGNRYASGPVGKALRDACMGTIASFLSKYQDIIIEHQKVVKGNQKRLESLRELAGKENLEYPSVTLPPQPHTKEGVDAYNEVIARVRMWVNLNLWQKLKLSRDDAKPLLRLKGFPSFPLVERQANEVDWWDMVCNVKKLINEKKEDGKVFWQNLAGYKRQEALRPYLSSEEDRKKGKKFARYQLGDLLLHLEKKHGERDWGKVYDEAWERIDKKVEGLSKHIKLEEERRSEDAQSKAALTDWLRAKASFVIEGLKEADKDEFCRCELKLQKWYGDLRGKPFAIEAENSILDISGFSKQYNCAFIWQKDGVKKLNLYLIINYFKGGKLRFKKIKPEAFEANRFYTVINKKSGEIVPMEVNFNFDDPNLIILPLAFGKRQGREFIWNDLLSLETGSLKLANGRVIEKTLYNRRTRQDEPALFVALTFERREVLDSSNIKPMNLIGVDRGENIPAVIALTDPEGCPLSRFKDSLGNPTHILRIGESYKEKQRTIQAKKEVEQRRAGGYSRKYASKAKNLADDMVRNTARDLLYYAVTQDAMLIFENLSRGFGRQGKRTFMAERQYTRMEDWLTAKLAYEGLPSKTYLSKTLAQYTSKTCSNCGFTITSADYDRVLEKLKKTATGWMTTINGKELKVEGQITYYNRYKRQNVVKDLSVELDRLSEESVNNDISSWTKGRSGEALSLLKKRFSHRPVQEKFVCLNCGFETHADEQAALNIARSWLFLRSQEYKKYQTNKTTGNTDKRAFVETWQSFYRKKLKEVWKPAV

SEQ ID NO: 48712 - protein, 979 aa, synthetic construct
  REGION 1..979: note = engineered CasX variant
QEIGRINKIRRRLVKDSNTKKAGKTGPMKTLLVRVMTPDLRERLENLRKKPENIPQPISNTSRANLNKLLTDYTEMKKAILHVYWEEFQKDPVGLMSRVAQPASKKIDQNKLKPEMDEKGNLTTAGFACSQCGQPLFVYKLEQVSEKGKAYTNYFGRCNVAEHEKLILLAQLKPEKDSDEAVTYSLGKFGQRALDFYSIHVTKESTHPVKPLAQIAGNRYASGPVGKALRDACMGTIASFLSKYQDIIIEHQKVVKGNQKRLESLRELAGKENLEYPSVTLPPQPHTKEGVDAYNEVIARVRMWVNLNLWQKLKLSRDDAKPLLRLKGFPSFPLVERQANEVDWWDMVCNVKKLINEKKEDGKVFWQNLAGYKRQEALRPYLSSEEDRKKGKKFARYQLGDLLLHLEKKHGEYDWGKVYDEAWERIDKKVEGLSKHIKLEEERRSEDAQSKAALTDWLRAKASFVIEGLKEADKDEFCRCELKLQKWYGDLRGKPFAIEAENSILDISGFSKQYNCAFIWQKDGVKKLNLYLIINYFKGGKLRFKKIKPEAFEANRFYTVINKKSGEIVPMEVNFNFDDPNLIILPLAFGKRQGREFIWNDLLSLETGSLKLANGRVIEKTLYNRRTRQDEPALFVALTFERREVLDSSNIKPMNLIGVDRGENIPAVIALTDPEGCPLSRFKDSLGNPTHILRIGESYKEKQRTIQAKKEVEQRRAGGYSRKYASKAKNLADDMVRNTARDLLYYAVTQDAMLIFENLSRGFGRQGKRTFMAERQYTRMEDWLTAKLAYEGLPSKTYLSKTLAQYTSKTCSNCGFTITSADYDRVLEKLKKTATGWMTTINGKELKVEGQITYYNRYKRQNVVKDLSVELDRLSEESVNNDISSWTKGRSGEALSLLKKRFSHRPVQEKFVCLNCGFETHADEQAALNIARSWLFLRSQEYKKYQTNKTTGNTDKRAFVETWQSFYRKKLKEVWKPAV

SEQ ID NO: 48713 - protein, 978 aa, synthetic construct
  REGION 1..978: note = engineered CasX variant
QEIGRINKIRRRLVKDSNTKKAGKTGPMKTLLVRVMTPDLRERLENLRKKPENIPQPISNTSRANLNKLLTDYTEMKKAILHVYWEEFQKDPVGLMSRVAQPASKKIDQNKLKPEMDEKGNLTTAGFACSQCGQPLFVYKLEQVSEKGKAYTNYFGRCNVAEHEKLILLAQLKPEKDSDEAVTYSLGKFGQRALDFYSIHVTKESTHPVKPLAQIAGNRYASGPVGKALRDACMGTIASFLSKYQDIIIEHQKVVKGNQKRLESLRELAGKENLEYPSVTLPPQPHTKEGVDAYNEVIARVRMWVNLNLWQKLKLSRDDAKPLLRLKGFPSFPLVERQANEVDWWDMVCNVKKLINEKKEDGKVFWQNLAGYKRQEALRPYLSSEEDRKKGKKFARYQLGDLLLHLEKKHGEDWGDVYDEAWERIDKKVEGLSKHIKLEEERRSEDAQSKAALTDWLRAKASFVIEGLKEADKDEFCRCELKLQKWYGDLRGKPFAIEAENSILDISGFSKQYNCAFIWQKDGVKKLNLYLIINYFKGGKLRFKKIKPEAFEANRFYTVINKKSGEIVPMEVNFNFDDPNLIILPLAFGKRQGREFIWNDLLSLETGSLKLANGRVIEKTLYNRRTRQDEPALFVALTFERREVLDSSNIKPMNLIGVDRGENIPAVIALTDPEGCPLSRFKDSLGNPTHILRIGESYKEKQRTIQAKKEVEQRRAGGYSRKYASKAKNLADDMVRNTARDLLYYAVTQDAMLIFENLSRGFGRQGKRTFMAERQYTRMEDWLTAKLAYEGLPSKTYLSKTLAQYTSKTCSNCGFTITSADYDRVLEKLKKTATGWMTTINGKELKVEGQITYYNRYKRQNVVKDLSVELDRLSEESVNNDISSWTKGRSGEALSLLKKRFSHRPVQEKFVCLNCGFETHADEQAALNIARSWLFLRSQEYKKYQTNKTTGNTDKRAFVETWQSFYRKKLKEVWKPAV

SEQ ID NO: 48714 - protein, 978 aa, synthetic construct
  REGION 1..978: note = engineered CasX variant
QEIGRINKIRRRLVKDSNTKKAGKTGPMKTLLVRVMTPDLRERLENLRKKPENIPQPISNTSRANLNKLLTDYTEMKKAILHVYWEEFQKDPVGLMSRVAQPASKKIDQNKLKPEMDEKGNLTTAGFACSQCGQPLFVYKLEQVSEKGKAYTNYFGRCNVAEHEKLILLAQLKPEKDSDEAVTYSLGKFGQRALDFYSIHVTKESTHPVKPLAQIAGNRYASGPVGKALRDACMGTIASFLSKYQDIIIEHQKVVKGNQKRLESLRELAGKENLEYPSVTLPPQPHTKEGVDAYNEVIARVRMWVNLNLWQKLKLSRDDAKPLLRLKGFPSFPLVERQANEVDWWDMVCNVKKLINEKKEDGKVFWQNLAGYKRQEALRPYLSSEEDRKKGKKFARYQLGDLLLHLEKKHGEDWGKVYGEAWERIDKKVEGLSKHIKLEEERRSEDAQSKAALTDWLRAKASFVIEGLKEADKDEFCRCELKLQKWYGDLRGKPFAIEAENSILDISGFSKQYNCAFIWQKDGVKKLNLYLIINYFKGGKLRFKKIKPEAFEANRFYTVINKKSGEIVPMEVNFNFDDPNLIILPLAFGKRQGREFIWNDLLSLETGSLKLANGRVIEKTLYNRRTRQDEPALFVALTFERREVLDSSNIKPMNLIGVDRGENIPAVIALTDPEGCPLSRFKDSLGNPTHILRIGESYKEKQRTIQAKKEVEQRRAGGYSRKYASKAKNLADDMVRNTARDLLYYAVTQDAMLIFENLSRGFGRQGKRTFMAERQYTRMEDWLTAKLAYEGLPSKTYLSKTLAQYTSKTCSNCGFTITSADYDRVLEKLKKTATGWMTTINGKELKVEGQITYYNRYKRQNVVKDLSVELDRLSEESVNNDISSWTKGRSGEALSLLKKRFSHRPVQEKFVCLNCGFETHADEQAALNIARSWLFLRSQEYKKYQTNKTTGNTDKRAFVETWQSFYRKKLKEVWKPAV

SEQ ID NO: 48715 - protein, 978 aa, synthetic construct
  REGION 1..978: note = engineered CasX variant
QEIGRINKIRRRLVKDSNTKKAGKTGPMKTLLVRVMTPDLRERLENLRKKPENIPQPISNTSRANLNKLLTDYTEMKKAILHVYWEEFQKDPVGLMSRVAQPASKKIDQNKLKPEMDEKGNLTTAGFACSQCGQPLFVYKLEQVSEKGKAYTNYFGRCNVAEHEKLILLAQLKPEKDSDEAVTYSLGKFGQRALDFYSIHVTKESTHPVKPLAQIAGNRYASGPVGKALRDACMGTIASFLSKYQDIIIEHQKVVKGNQKRLESLRELAGKENLEYPSVTLPPQPHTKEGVDAYNEVIARVRMWVNLNLWQKLKLSRDDAKPLLRLKGFPSFPLVERQANEVDWWDMVCNVKKLINEKKEDGKVFWQNLAGYKRQEALRPYLSSEEDRKKGKKFARYQLGDLLLHLEKKHGEDWGKVYDEAWERIDKKVEGLSKHIKLEEERRSEDAQSKAALTDWLRAKASFVIEGKKEADKDEFCRCELKLQKWYGDLRGKPFAIEAENSILDISGFSKQYNCAFIWQKDGVKKLNLYLIINYFKGGKLRFKKIKPEAFEANRFYTVINKKSGEIVPMEVNFNFDDPNLIILPLAFGKRQGREFIWNDLLSLETGSLKLANGRVIEKTLYNRRTRQDEPALFVALTFERREVLDSSNIKPMNLIGVDRGENIPAVIALTDPEGCPLSRFKDSLGNPTHILRIGESYKEKQRTIQAKKEVEQRRAGGYSRKYASKAKNLADDMVRNTARDLLYYAVTQDAMLIFENLSRGFGRQGKRTFMAERQYTRMEDWLTAKLAYEGLPSKTYLSKTLAQYTSKTCSNCGFTITSADYDRVLEKLKKTATGWMTTINGKELKVEGQITYYNRYKRQNVVKDLSVELDRLSEESVNNDISSWTKGRSGEALSLLKKRFSHRPVQEKFVCLNCGFETHADEQAALNIARSWLFLRSQEYKKYQTNKTTGNTDKRAFVETWQSFYRKKLKEVWKPAV

SEQ ID NO: 48716 - protein, 978 aa, synthetic construct
  REGION 1..978: note = engineered CasX variant
QEIGRINKIRRRLVKDSNTKKAGKTGPMKTLLVRVMTPDLRERLENLRKKPENIPQPISNTSRANLNKLLTDYTEMKKAILHVYWEEFQKDPVGLMSRVAQPASKKIDQNKLKPEMDEKGNLTTAGFACSQCGQPLFVYKLEQVSEKGKAYTNYFGRCNVAEHEKLILLAQLKPEKDSDEAVTYSLGKFGQRALDFYSIHVTKESTHPVKPLAQIAGNRYASGPVGKALRDACMGTIASFLSKYQDIIIEHQKVVKGNQKRLESLRELAGKENLEYPSVTLPPQPHTKEGVDAYNEVIARVRMWVNLNLWQKLKLSRDDAKPLLRLKGFPSFPLVERQANEVDWWDMVCNVKKLINEKKEDGKVFWQNLAGYKRQEALRPYLSSEEDRKKGKKFARYQLGDLLLHLEKKHGEDWGKVYDEAWERIDKKVEGLSKHIKLEEERRSEDAQSKAALTDWLRAKASFVIEGSKEADKDEFCRCELKLQKWYGDLRGKPFAIEAENSILDISGFSKQYNCAFIWQKDGVKKLNLYLIINYFKGGKLRFKKIKPEAFEANRFYTVINKKSGEIVPMEVNFNFDDPNLIILPLAFGKRQGREFIWNDLLSLETGSLKLANGRVIEKTLYNRRTRQDEPALFVALTFERREVLDSSNIKPMNLIGVDRGENIPAVIALTDPEGCPLSRFKDSLGNPTHILRIGESYKEKQRTIQAKKEVEQRRAGGYSRKYASKAKNLADDMVRNTARDLLYYAVTQDAMLIFENLSRGFGRQGKRTFMAERQYTRMEDWLTAKLAYEGLPSKTYLSKTLAQYTSKTCSNCGFTITSADYDRVLEKLKKTATGWMTTINGKELKVEGQITYYNRYKRQNVVKDLSVELDRLSEESVNNDISSWTKGRSGEALSLLKKRFSHRPVQEKFVCLNCGFETHADEQAALNIARSWLFLRSQEYKKYQTNKTTGNTDKRAFVETWQSFYRKKLKEVWKPAV

SEQ ID NO: 48717 - protein, 979 aa, synthetic construct
  REGION 1..979: note = engineered CasX variant
QEIGRINKIRRRLVKDSNTKKAGKTGPMKTLLVRVMTPDLRERLENLRKKPENIPQPISNTSRANLNKLLTDYTEMKKAILHVYWEEFQKDPVGLMSRVAQPASKKIDQNKLKPEMDEKGNLTTAGFACSQCGQPLFVYKLEQVSEKGKAYTNYFGRCNVAEHEKLILLAQLKPEKDSDEAVTYSLGKFGQRALDFYSIHVTKESTHPVKPLAQIAGNRYASGPVGKALRDACMGTIASFLSKYQDIIIEHQKVVKGNQKRLESLRELAGKENLEYPSVTLPPQPHTKEGVDAYNEVIARVRMWVNLNLWQKLKLSRDDAKPLLRLKGFPSFPLVERQANEVDWWDMVCNVKKLINEKKEDGKVFWQNLAGYKRQEALRPYLSSEEDRKKGKKFARYQLGDLLLHLEKKHGEDWGKVYDEAWERIDKKVEGLSKHIKLEEERRSEDAQSKAALTDWLRAKASFVIEGLKEADDKDEFCRCELKLQKWYGDLRGKPFAIEAENSILDISGFSKQYNCAFIWQKDGVKKLNLYLIINYFKGGKLRFKKIKPEAFEANRFYTVINKKSGEIVPMEVNFNFDDPNLIILPLAFGKRQGREFIWNDLLSLETGSLKLANGRVIEKTLYNRRTRQDEPALFVALTFERREVLDSSNIKPMNLIGVDRGENIPAVIALTDPEGCPLSRFKDSLGNPTHILRIGESYKEKQRTIQAKKEVEQRRAGGYSRKYASKAKNLADDMVRNTARDLLYYAVTQDAMLIFENLSRGFGRQGKRTFMAERQYTRMEDWLTAKLAYEGLPSKTYLSKTLAQYTSKTCSNCGFTITSADYDRVLEKLKKTATGWMTTINGKELKVEGQITYYNRYKRQNVVKDLSVELDRLSEESVNNDISSWTKGRSGEALSLLKKRFSHRPVQEKFVCLNCGFETHADEQAALNIARSWLFLRSQEYKKYQTNKTTGNTDKRAFVETWQSFYRKKLKEVWKPAV

SEQ ID NO: 48718 - protein, 979 aa, synthetic construct
  REGION 1..979: note = engineered CasX variant
QEIGRINKIRRRLVKDSNTKKAGKTGPMKTLLVRVMTPDLRERLENLRKKPENIPQPISNTSRANLNKLLTDYTEMKKAILHVYWEEFQKDPVGLMSRVAQPASKKIDQNKLKPEMDEKGNLTTAGFACSQCGQPLFVYKLEQVSEKGKAYTNYFGRCNVAEHEKLILLAQLKPEKDSDEAVTYSLGKFGQRALDFYSIHVTKESTHPVKPLAQIAGNRYASGPVGKALRDACMGTIASFLSKYQDIIIEHQKVVKGNQKRLESLRELAGKENLEYPSVTLPPQPHTKEGVDAYNEVIARVRMWVNLNLWQKLKLSRDDAKPLLRLKGFPSFPLVERQANEVDWWDMVCNVKKLINEKKEDGKVFWQNLAGYKRQEALRPYLSSEEDRKKGKKFARYQLGDLLLHLEKKHGEDWGKVYDEAWERIDKKVEGLSKHIKLEEERRSEDAQSKAALTDWLRAKASFVIEGLKEADKDEFCRCELKLQKWYGDLRGKPFAIEAENSILDISGFSKQYNCAFIWQKDGVKKLNLYLIINYFKGGKLRFKKIKPEAFEANRFYTVINKKSGEIVPMEVNFNFDDPNLIILPLAFGKRQGREFIWNDLLSLETGSLKLANGRVIEKTLYNRRTRQDEPALFVALTFERREVLDSSNIKPMNLIGVDRGENIPAVIALTDPEGCPLSRFKDSLGNPTHILRIGESYKEKQRTIQAKKEVEQRRAGGYSRKYASKAKNLADDMVRNTARDLLYYAVTQDAMLIFENLSRGFGRQGKRTFMAERQYTRMEDWLTAKLAYEGLPSKTYLSKTLAQYTSKTCSNCGFTITSADYDRVLEKLKKTATGWMTTINGKELKVEGQITYYNRYKRQNVVKDLSVELDRLSEESVNNDISSWTKGRSGNEALSLLKKRFSHRPVQEKFVCLNCGFETHADEQAALNIARSWLFLRSQEYKKYQTNKTTGNTDKRAFVETWQSFYRKKLKEVWKPAV

SEQ ID NO: 48719 - protein, 978 aa, synthetic construct
  REGION 1..978: note = engineered CasX variant
QEIGRINKIRRRLVKDSNTKKAGKTGPMKTLLVRVMTPDLRERLENLRKKPENIPQPISNTSRANLNKLLTDYTEMKKAILHVYWEEFQKDPVGLMSRVAQPASKKIDQNKLKPEMDEKGNLTTAGFACSQCGQPLFVYKLEQVSEKGKAYTNYFGRCNVAEHEKLILLAQLKPEKDSDEAVTYSLGKFGQRALDFYSIHVTKESTHPVKPLAQIAGNRYASGPVGKALRDACMGTIASFLSKYQDIIIEHQKVVKGNQKRLESLRELAGKENLEYPSVTLPPQPHTKEGVDAYNEVIARVRMWVNLNLWQKLKLSRDDAKPLLRLKGFPSFPLVERQANEVDWWDMVCNVKKLINEKKEDGKVFWQNLAGYKRQEALRPYLSSEEDRQKGKKFARYQLGDLLLHLEKKHGEDWGKVYDEAWERIDKKVEGLSKHIKLEEERRSEDAQSKAALTDWLRAKASFVIEGLKEADKDEFCRCELKLQKWYGDLRGKPFAIEAENSILDISGFSKQYNCAFIWQKDGVKKLNLYLIINYFKGGKLRFKKIKPEAFEANRFYTVINKKSGEIVPMEVNFNFDDPNLIILPLAFGKRQGREFIWNDLLSLETGSLKLANGRVIEKTLYNRRTRQDEPALFVALTFERREVLDSSNIKPMNLIGVDRGENIPAVIALTDPEGCPLSRFKDSLGNPTHILRIGESYKEKQRTIQAKKEVEQRRAGGYSRKYASKAKNLADDMVRNTARDLLYYAVTQDAMLIFENLSRGFGRQGKRTFMAERQYTRMEDWLTAKLAYEGLPSKTYLSKTLAQYTSKTCSNCGFTITSADYDRVLEKLKKTATGWMTTINGKELKVEGQITYYNRYKRQNVVKDLSVELDRLSEESVNNDISSWTKGRSGEALSLLKKRFSHRPVQEKFVCLNCGFETHADEQAALNIARSWLFLRSQEYKKYQTNKTTGNTDKRAFVETWQSFYRKKLKEVWKPAV

SEQ ID NO: 48720 - protein, 978 aa, synthetic construct
  REGION 1..978: note = engineered CasX variant
QEIGRINKIRRRLVKDSNTKKAGKTGPMKTLLVRVMTPDLRERLENLRKKPENIPQPISNTSRANLNKLLTDYTEMKKAILHVYWEEFQKDPVGLMSRVAQPASKKIDQNKLKPEMDEKGNLTTAGFACSQCGQPLFVYKLEQVSEKGKAYTNYFGRCNVAEHEKLILLAQLKPEKDSDEAVTYSLGKFGQRALDFYSIHVTKESTHPVKPLAQIAGNRYASGPVGKALRDACMGTIASFLSKYQDIIIEHQKVVKGNQKRLESLRELAGKENLEYPSVTLPPQPHTKEGVDAYNEVIARVRMWVNLNLWQKLKLSRDDAKPLLRLKGFPSFPLVERQANEVDWWDMVCNVKKLINEKKEDGKVFWQNLAGYKRQEALRPYLSSEEDRKKGKKFARYQLGDLLLHLEKKHGEDWGKVYDEAWERIDKKVEGLSKHIKLEEERRSEDAQSKAALTDWLRAKASFVIEGLKEADKDEFCRCELKLQKWYGDLRGKPFAIEAENSILDISGFSKQYNCAFIWQKDGVKKLNLYLIINYFKGGKLRFKKIKPEAFEANRFYTVINKKSGEIVPMEVNFNFDDPNLIILPLAFGKRQGREFIWNDLLSLETGSLKLANGRVIEKTLYNRRTRQDEPALFVALTFERREVLDSSNIKPMNLIGVDRGENIPAVIALTDPEGCPLSRFKDSLGNPTHILRIGESYKEKQRTIQAKKEVEQRRAGGYSRKYASKAKNLADDMVRNTARDLLYYAVTQDAMLIFENLSRGFGRQGKRTFMAERQYTRMEDWLTAKLAYEGLPSQTYLSKTLAQYTSKTCSNCGFTITSADYDRVLEKLKKTATGWMTTINGKELKVEGQITYYNRYKRQNVVKDLSVELDRLSEESVNNDISSWTKGRSGEALSLLKKRFSHRPVQEKFVCLNCGFETHADEQAALNIARSWLFLRSQEYKKYQTNKTTGNTDKRAFVETWQSFYRKKLKEVWKPAV

SEQ ID NO: 48721 - protein, 978 aa, synthetic construct
  REGION 1..978: note = engineered CasX variant
QEIGRINKIRRRLVKDSNTKKAGKTGPMKTLLVRVMTPDLRERLENLRKKPENIPQPISNTSRANLNKLLTDYTEMKKAILHVYWEEFQKDPVGLMSRVAQPASKKIDQNKLKPEMDEKGNLTTAGFACSQCGQPLFVYKLEQVSEKGKAYTNYFGRCNVAEHEKLILLAQLKPEKDSDEAVTYSLGKFGQRALDFYSIHVTKESTHPVKPLAQIAGNRYASGPVGKALRDACMGTIASFLSKYQDIIIEHQKVVKGNQKRLESLRELAGKENLEYPSVTLPPQPHTKEGVDAYNEVIARVRMWVNLNLWQKLKLSRDDAKPLLRLKGFPSFPLVERQANEVDWWDMVCNVKKLINEKKEDGKVFWQNLAGYKRQEALRPYLSSEEDRKKGKKFARYQLGDLLLHLEKKHGEDWGKVYDEAWERIDKKVEGLSKHIKLEEERRSEDAQSKAALTDWLRAKASFVIEGLKEADKDEFCRCELKLQKWYGDLRGKPFAIEAENSILDISGFSKQYNCAFIWQKDGVKKLNLYLIINYFKGGKLRFKKIKPEAFEANRFYTVINKKSGEIVPMEVNFNFDDPNLIILPLAFGKRQGREFIWNDLLSLETGSLKLANGRVIEKTLYNRRTRQDEPALFVALTFERREVLDSSNIKPMNLIGVDRGENIPAVIALTDPEGCPLSRFKDSLGNPTHILRIGESYKEKQRTIQAKKEVEQRRAGGYSRKYASKAKNLADDMVRNTARDLLYYAVTQDAMLIFENLSRGFGRQGKRTFMAERQYTRMEDWLTAKLAYNGLPSKTYLSKTLAQYTSKTCSNCGFTITSADYDRVLEKLKKTATGWMTTINGKELKVEGQITYYNRYKRQNVVKDLSVELDRLSEESVNNDISSWTKGRSGEALSLLKKRFSHRPVQEKFVCLNCGFETHADEQAALNIARSWLFLRSQEYKKYQTNKTTGNTDKRAFVETWQSFYRKKLKEVWKPAV

SEQ ID NO: 48722 - protein, 978 aa, synthetic construct
  REGION 1..978: note = engineered CasX variant
QEIGRINKIRRRLVKDSNTKKAGKTGPMKTLLVRVMTPDLRERLENLRKKPENIPQPISNTSRANLNKLLTDYTEMKKAILHVYWEEFQKDPVGLMSRVAQPASKKIDQNKLKPEMDEKGNLTTAGFACSQCGQPLFVYKLEQVSEKGKAYTNYFGRCNVAEHEKLIQLAQLKPEKDSDEAVTYSLGKFGQRALDFYSIHVTKESTHPVKPLAQIAGNRYASGPVGKALRDACMGTIASFLSKYQDIIIEHQKVVKGNQKRLESLRELAGKENLEYPSVTLPPQPHTKEGVDAYNEVIARVRMWVNLNLWQKLKLSRDDAKPLLRLKGFPSFPLVERQANEVDWWDMVCNVKKLINEKKEDGKVFWQNLAGYKRQEALRPYLSSEEDRKKGKKFARYQLGDLLLHLEKKHGEDWGKVYDEAWERIDKKVEGLSKHIKLEEERRSEDAQSKAALTDWLRAKASFVIEGLKEADKDEFCRCELKLQKWYGDLRGKPFAIEAENSILDISGFSKQYNCAFIWQKDGVKKLNLYLIINYFKGGKLRFKKIKPEAFEANRFYTVINKKSGEIVPMEVNFNFDDPNLIILPLAFGKRQGREFIWNDLLSLETGSLKLANGRVIEKTLYNRRTRQDEPALFVALTFERREVLDSSNIKPMNLIGVDRGENIPAVIALTDPEGCPLSRFKDSLGNPTHILRIGESYKEKQRTIQAKKEVEQRRAGGYSRKYASKAKNLADDMVRNTARDLLYYAVTQDAMLIFENLSRGFGRQGKRTFMAERQYTRMEDWLTAKLAYEGLPSKTYLSKTLAQYTSKTCSNCGFTITSADYDRVLEKLKKTATGWMTTINGKELKVEGQITYYNRYKRQNVVKDLSVELDRLSEESVNNDISSWTKGRSGEALSLLKKRFSHRPVQEKFVCLNCGFETHADEQAALNIARSWLFLRSQEYKKYQTNKTTGNTDKRAFVETWQSFYRKKLKEVWKPAV

SEQ ID NO: 48723 - protein, 978 aa, synthetic construct
  REGION 1..978: note = engineered CasX variant
QEIGRINKIRRRLVKDSNTKKAGKTGPMKTLLVRVMTPDLRERLENLRKKPENIPQPISNTSRANLNKLLTDYTEMKKAILHVYWEEFQKDPVGLMSRVAQPASKKIDQNKLKPEMDEKGNLTTAGFACSQCGQPLFVYKLEQVSEKGKAYTNYFGRCNVAEHEKLILLAQLKPEKDSDEAVTYSLGKFGQRALDFYSIHVTKESTHPVKPLAQIAGNRYASGPVGKALRDACMGTIASFLSKYQDIIIEHQKVVKGNQKRLESLRELAGKENLEYPSVTLPPQPHTKEGVDAYNEVIARVRMWVNLNLWQKLKLSRDDAKPLLRLKGFPSFPLVERQANEVDWWDMVCNVKKLINEKKEDGKVFWQNLAIYKRQEALRPYLSSEEDRKKGKKFARYQLGDLLLHLEKKHGEDWGKVYDEAWERIDKKVEGLSKHIKLEEERRSEDAQSKAALTDWLRAKASFVIEGLKEADKDEFCRCELKLQKWYGDLRGKPFAIEAENSILDISGFSKQYNCAFIWQKDGVKKLNLYLIINYFKGGKLRFKKIKPEAFEANRFYTVINKKSGEIVPMEVNFNFDDPNLIILPLAFGKRQGREFIWNDLLSLETGSLKLANGRVIEKTLYNRRTRQDEPALFVALTFERREVLDSSNIKPMNLIGVDRGENIPAVIALTDPEGCPLSRFKDSLGNPTHILRIGESYKEKQRTIQAKKEVEQRRAGGYSRKYASKAKNLADDMVRNTARDLLYYAVTQDAMLIFENLSRGFGRQGKRTFMAERQYTRMEDWLTAKLAYEGLPSKTYLSKTLAQYTSKTCSNCGFTITSADYDRVLEKLKKTATGWMTTINGKELKVEGQITYYNRYKRQNVVKDLSVELDRLSEESVNNDISSWTKGRSGEALSLLKKRFSHRPVQEKFVCLNCGFETHADEQAALNIARSWLFLRSQEYKKYQTNKTTGNTDKRAFVETWQSFYRKKLKEVWKPAV

SEQ ID NO: 48724 - protein, 978 aa, synthetic construct
  REGION 1..978: note = engineered CasX variant
QEIGRINKIRRRLVKDSNTKKAGKTGPMKTLLVRVMTPDLRERLENLRKKPENIPQPISNTSRANLNKLLTDYTEMKKAILHVYWEEFQKDPVGLMSRVAQPASKKIDQNKLKPEMDEKGNLTTAGFACSQCGQPLFVYKLEQVSEKGKAYTNYFGRCNVAEHEKLILLAQLKPEKDSDEAVTYSLGKFGQRALDFYSIHVTKESTHPVKPLAQIAGNRYASGPVGKALRDACMGTIASFLSKYQDIIIEHQKVVKGNQKRLESLRELAGKENLEYPSVTLPPQPHTKEGVDAYNEVIARVRMWVNLNLWQKLKLSRDDAKPLLRLKGFPSFPLVERQANEVDWWDMVCNVKKLINEKKEDGKVFWQNLAGYKRQEALRPYLSSEEDREKGKKFARYQLGDLLLHLEKKHGEDWGKVYDEAWERIDKKVEGLSKHIKLEEERRSEDAQSKAALTDWLRAKASFVIEGLKEADKDEFCRCELKLQKWYGDLRGKPFAIEAENSILDISGFSKQYNCAFIWQKDGVKKLNLYLIINYFKGGKLRFKKIKPEAFEANRFYTVINKKSGEIVPMEVNFNFDDPNLIILPLAFGKRQGREFIWNDLLSLETGSLKLANGRVIEKTLYNRRTRQDEPALFVALTFERREVLDSSNIKPMNLIGVDRGENIPAVIALTDPEGCPLSRFKDSLGNPTHILRIGESYKEKQRTIQAKKEVEQRRAGGYSRKYASKAKNLADDMVRNTARDLLYYAVTQDAMLIFENLSRGFGRQGKRTFMAERQYTRMEDWLTAKLAYEGLPSKTYLSKTLAQYTSKTCSNCGFTITSADYDRVLEKLKKTATGWMTTINGKELKVEGQITYYNRYKRQNVVKDLSVELDRLSEESVNNDISSWTKGRSGEALSLLKKRFSHRPVQEKFVCLNCGFETHADEQAALNIARSWLFLRSQEYKKYQTNKTTGNTDKRAFVETWQSFYRKKLKEVWKPAV

SEQ ID NO: 48725 - protein, 978 aa, synthetic construct
  REGION 1..978: note = engineered CasX variant
QEIGRINKIRRRLVKDSNTKKAGKTGPMKTLLVRVMTPDLRERLENLRKKPENIPQPISNTSRANLNKLLTDYTEMKKAILHVYWEEFQKDPVGLMSRVAQPASKKIDQNKLKPEMDEKGNLTTAGFACSQCGQPLFVYKLEQVSEKGKAYTNYFGRCNVAEHEKLILLAQLKPEKDSDEAVTYSLGKFGQRALDFYSIHVTKESTHPVKPLAQIAGNRYASGPVGKALRDACMGTIASFLSKYQDIIIEHQKVVKGNQKRLESLRELAGKENLEYPSVTLPPQPHTKEGVDAYNEVIARVRMWVNLNLWQKLKLSRDDAKPLLRLKGFPSFPLVERQANEVDWWDMVCNVKKLINEKKEDGKVFWQNLAGYKRQEALRPYLSSEEDRKKGKKFARYQLGDLLLHLEKKHGEDWGKVYDEAWERIDKKVEGLSKHIKLEEERRSEDAQSKAALTDWLRAKASFVIEGLKEADKDEFCRCELKLQKWYGDLRGKPFAIEAENSILDISGFSKQYNCAFIWQKDGVKKLNLYLIINYFKGGKLRFKKIKPEAFEANRFYTVINKKSGEIVIMEVNFNFDDPNLIILPLAFGKRQGREFIWNDLLSLETGSLKLANGRVIEKTLYNRRTRQDEPALFVALTFERREVLDSSNIKPMNLIGVDRGENIPAVIALTDPEGCPLSRFKDSLGNPTHILRIGESYKEKQRTIQAKKEVEQRRAGGYSRKYASKAKNLADDMVRNTARDLLYYAVTQDAMLIFENLSRGFGRQGKRTFMAERQYTRMEDWLTAKLAYEGLPSKTYLSKTLAQYTSKTCSNCGFTITSADYDRVLEKLKKTATGWMTTINGKELKVEGQITYYNRYKRQNVVKDLSVELDRLSEESVNNDISSWTKGRSGEALSLLKKRFSHRPVQEKFVCLNCGFETHADEQAALNIARSWLFLRSQEYKKYQTNKTTGNTDKRAFVETWQSFYRKKLKEVWKPAV

SEQ ID NO: 48726 - protein, 979 aa, synthetic construct
  REGION 1..979: note = engineered CasX variant
QEIKGRINKIRRRLVKDSNTKKAGKTGPMKTLLVRVMTPDLRERLENLRKKPENIPQPISNTSRANLNKLLTDYTEMKKAILHVYWEEFQKDPVGLMSRVAQPASKKIDQNKLKPEMDEKGNLTTAGFACSQCGQPLFVYKLEQVSEKGKAYTNYFGRCNVAEHEKLILLAQLKPEKDSDEAVTYSLGKFGQRALDFYSIHVTKESTHPVKPLAQIAGNRYASGPVGKALRGACMGTIASFLSKYQDIIIEHQKVVKGNQKRLESLRELAGKENLEYPSVTLPPQPHTKEGVDAYNEVIARVRMWVNLNLWQKLKLSRDDAKPLLRLKGFPSFPLVERQANEVDWWDMVCNVKKLINEKKEDGKVFWQNLAGYKRQEALRPYLSSEEDRKKGKKFARYQLGDLLLHLEKKHGEDWGKVYDEAWERIDKKVEGLSKHIKLEEERRSEDAQSKAALTDWLRAKASFVIEGLKEADKDEFCRCELKLQKWYGDLRGKPFAIEAENSILDISGFSKQYNCAFIWQKDGVKKLNLYLIINYFKGGKLRFKKIKPEAFEANRFYTVINKKSGEIVPMEVNFNFDDPNLIILPLAFGKRQGREFIWNDLLSLETGSLKLANGRVIEKTLYNRRTRQDEPALFVALTFERREVLDSSNIKPMNLIGVDRGENIPAVIALTDPEGCPLSRFKDSLGNPTHILRIGESYKEKQRTIQAKKEVEQRRAGGYSRKYASKAKNLADDMVRNTARDLLYYAVTQDAMLIFENLSRGFGRQGKRTFMAERQYTRMEDWLTAKLAYEGLPSKTYLSKTLAQYTSKTCSNCGFTITSADYDRVLEKLKKTATGWMTTINGKELKVEGQITYYNRYKRQNVVKDLSVELDRLSEESVNNDISSWTKGRSGEALSLLKKRFSHRPVQEKFVCLNCGFETHADEQAALNIARSWLFLRSQEYKKYQTNKTTGNTDKRAFVETWQSFYRKKLKEVWKPAV

SEQ ID NO: 48727 - protein, 979 aa, synthetic construct
  REGION 1..979: note = engineered CasX variant
QEIKGRINKIRRRLVKDSNTKKAGKTGPMKTLLVRVMTPDLRERLENLRKKPENIPQPISNTSRANLNKLLTDYTEMKKAILHVYWEEFQKDPVGLMSRVAQPASKKIDQNKLKPEMDEKGNLTTAGFACSQCGQPLFVYKLEQVSEKGKAYTNYFGRCNVAEHEKLILLAQLKPEKDSDEAVTYSLGKFGQRALDFYSIHVTKESTHPVKPLAQIAGNRYASGPVGKALRDACMGTIASFLSKYQDIIIEHQKVVKGNQKRLESLRELAGKENLEYPSVTLPPQPHTKEGVDAYNEVIARVRMWVNLNLWQKLKLSRDDAKPLLRLKNFPSFPLVERQANEVDWWDMVCNVKKLINEKKEDGKVFWQNLAGYKRQEALRPYLSSEEDRKKGKKFARYQLGDLLLHLEKKHGEDWGKVYDEAWERIDKKVEGLSKHIKLEEERRSEDAQSKAALTDWLRAKASFVIEGLKEADKDEFCRCELKLQKWYGDLRGKPFAIEAENSILDISGFSKQYNCAFIWQKDGVKKLNLYLIINYFKGGKLRFKKIKPEAFEANRFYTVINKKSGEIVPMEVNFNFDDPNLIILPLAFGKRQGREFIWNDLLSLETGSLKLANGRVIEKTLYNRRTRQDEPALFVALTFERREVLDSSNIKPMNLIGVDRGENIPAVIALTDPEGCPLSRFKDSLGNPTHILRIGESYKEKQRTIQAKKEVEQRRAGGYSRKYASKAKNLADDMVRNTARDLLYYAVTQDAMLIFENLSRGFGRQGKRTFMAERQYTRMEDWLTAKLAYEGLPSKTYLSKTLAQYTSKTCSNCGFTITSADYDRVLEKLKKTATGWMTTINGKELKVEGQITYYNRYKRQNVVKDLSVELDRLSEESVNNDISSWTKGRSGEALSLLKKRFSHRPVQEKFVCLNCGFETHADEQAALNIARSWLFLRSQEYKKYQTNKTTGNTDKRAFVETWQSFYRKKLKEVWKPAV

SEQ ID NO: 48728 - protein, 979 aa, synthetic construct
  REGION 1..979: note = engineered CasX variant
QEIKGRINKIRRRLVKDSNTKKAGKTGPMKTLLVRVMTPDLRERLENLRKKPENIPQPISNTSRANLNKLLTDYTEMKKAILHVYWEEFQKDPVGLMSRVAQPASKKIDQNKLKPEMDEKGNLTTAGFACSQCGQPLFVYKLEQVSEKGKAYTNYFGRCNVAEHEKLILLAQLKPEKDSDEAVTYSLGKFGQRALDFYSIHVTKESTHPVKPLAQIAGNRYASGPVGKALRDACMGTIASFLSKYQDIIIEHQKVVKGNQKRLESLRELAGKENLEYPSVTLPPQPHTKEGVDAYNEVIARVRMWVNLNLWQKLKLSRDDAKPLLRLKGFPSFPLVERQANEVDWWDMVCNVKKLINEKKEDGKVFWQNLAGYKRQEALRPYLSSEEDRKKGKKFARYQLGDLLNHLEKKHGEDWGKVYDEAWERIDKKVEGLSKHIKLEEERRSEDAQSKAALTDWLRAKASFVIEGLKEADKDEFCRCELKLQKWYGDLRGKPFAIEAENSILDISGFSKQYNCAFIWQKDGVKKLNLYLIINYFKGGKLRFKKIKPEAFEANRFYTVINKKSGEIVPMEVNFNFDDPNLIILPLAFGKRQGREFIWNDLLSLETGSLKLANGRVIEKTLYNRRTRQDEPALFVALTFERREVLDSSNIKPMNLIGVDRGENIPAVIALTDPEGCPLSRFKDSLGNPTHILRIGESYKEKQRTIQAKKEVEQRRAGGYSRKYASKAKNLADDMVRNTARDLLYYAVTQDAMLIFENLSRGFGRQGKRTFMAERQYTRMEDWLTAKLAYEGLPSKTYLSKTLAQYTSKTCSNCGFTITSADYDRVLEKLKKTATGWMTTINGKELKVEGQITYYNRYKRQNVVKDLSVELDRLSEESVNNDISSWTKGRSGEALSLLKKRFSHRPVQEKFVCLNCGFETHADEQAALNIARSWLFLRSQEYKKYQTNKTTGNTDKRAFVETWQSFYRKKLKEVWKPAV

SEQ ID NO: 48729 - protein, 979 aa, synthetic construct
  REGION 1..979: note = engineered CasX variant
QEIKGRINKIRRRLVKDSNTKKAGKTGPMKTLLVRVMTPDLRERLENLRKKPENIPQPISNTSRANLNKLLTDYTEMKKAILHVYWEEFQKDPVGLMSRVAQPASKKIDQNKLKPEMDEKGNLTTAGFACSQCGQPLFVYKLEQVSEKGKAYTNYFGRCNVAEHEKLILLAQLKPEKDSDEAVTYSLGKFGQRALDFYSIHVTKESTHPVKPLAQIAGNRYASGPVGKALRDACMGTIASFLSKYQDIIIEHQKVVKGNQKRLESLRELAGKENLEYPSVTLPPQPHTKEGVDAYNEVIARVRMWVNLNLWQKLKLSRDDAKPLLRLKGFPSFPLVERQANEVDWWDMVCNVKKLINEKKEDGKVFWQNLAGYKRQEALRPYLSSEEDRKKGKKFARYQLGDLLWHLEKKHGEDWGKVYDEAWERIDKKVEGLSKHIKLEEERRSEDAQSKAALTDWLRAKASFVIEGLKEADKDEFCRCELKLQKWYGDLRGKPFAIEAENSILDISGFSKQYNCAFIWQKDGVKKLNLYLIINYFKGGKLRFKKIKPEAFEANRFYTVINKKSGEIVPMEVNFNFDDPNLIILPLAFGKRQGREFIWNDLLSLETGSLKLANGRVIEKTLYNRRTRQDEPALFVALTFERREVLDSSNIKPMNLIGVDRGENIPAVIALTDPEGCPLSRFKDSLGNPTHILRIGESYKEKQRTIQAKKEVEQRRAGGYSRKYASKAKNLADDMVRNTARDLLYYAVTQDAMLIFENLSRGFGRQGKRTFMAERQYTRMEDWLTAKLAYEGLPSKTYLSKTLAQYTSKTCSNCGFTITSADYDRVLEKLKKTATGWMTTINGKELKVEGQITYYNRYKRQNVVKDLSVELDRLSEESVNNDISSWTKGRSGEALSLLKKRFSHRPVQEKFVCLNCGFETHADEQAALNIARSWLFLRSQEYKKYQTNKTTGNTDKRAFVETWQSFYRKKLKEVWKPAV

SEQ ID NO: 48730 - protein, 979 aa, synthetic construct
  REGION 1..979: note = engineered CasX variant
QEIKGRINKIRRRLVKDSNTKKAGKTGPMKTLLVRVMTPDLRERLENLRKKPENIPQPISNTSRANLNKLLTDYTEMKKAILHVYWEEFQKDPVGLMSRVAQPASKKIDQNKLKPEMDEKGNLTTAGFACSQCGQPLFVYKLEQVSEKGKAYTNYFGRCNVAEHEKLILLAQLKPEKDSDEAVTYSLGKFGQRALDFYSIHVTKESTHPVKPLAQIAGNRYASGPVGKALRDACMGTIASFLSKYQDIIIEHQKVVKGNQKRLESLRELAGKENLEYPSVTLPPQPHTKEGVDAYNEVIARVRMWVNLNLWQKLKLSRDDAKPLLRLKGFPSFPLVERQANEVDWWDMVCNVKKLINEKKEDGKVFWQNLAGYKRQEALRPYLSSEEDRKKGKKFARYQLGDLLLHLYKKHGEDWGKVYDEAWERIDKKVEGLSKHIKLEEERRSEDAQSKAALTDWLRAKASFVIEGLKEADKDEFCRCELKLQKWYGDLRGKPFAIEAENSILDISGFSKQYNCAFIWQKDGVKKLNLYLIINYFKGGKLRFKKIKPEAFEANRFYTVINKKSGEIVPMEVNFNFDDPNLIILPLAFGKRQGREFIWNDLLSLETGSLKLANGRVIEKTLYNRRTRQDEPALFVALTFERREVLDSSNIKPMNLIGVDRGENIPAVIALTDPEGCPLSRFKDSLGNPTHILRIGESYKEKQRTIQAKKEVEQRRAGGYSRKYASKAKNLADDMVRNTARDLLYYAVTQDAMLIFENLSRGFGRQGKRTFMAERQYTRMEDWLTAKLAYEGLPSKTYLSKTLAQYTSKTCSNCGFTITSADYDRVLEKLKKTATGWMTTINGKELKVEGQITYYNRYKRQNVVKDLSVELDRLSEESVNNDISSWTKGRSGEALSLLKKRFSHRPVQEKFVCLNCGFETHADEQAALNIARSWLFLRSQEYKKYQTNKTTGNTDKRAFVETWQSFYRKKLKEVWKPAV

SEQ ID NO: 48731 - protein, 979 aa, synthetic construct
  REGION 1..979: note = engineered CasX variant
QEIKGRINKIRRRLVKDSNTKKAGKTGPMKTLLVRVMTPDLRERLENLRKKPENIPQPISNTSRANLNKLLTDYTEMKKAILHVYWEEFQKDPVGLMSRVAQPASKKIDQNKLKPEMDEKGNLTTAGFACSQCGQPLFVYKLEQVSEKGKAYTNYFGRCNVAEHEKLILLAQLKPEKDSDEAVTYSLGKFGQRALDFYSIHVTKESTHPVKPLAQIAGNRYASGPVGKALRDACMGTIASFLSKYQDIIIEHQKVVKGNQKRLESLRELAGKENLEYPSVTLPPQPHTKEGVDAYNEVIARVRMWVNLNLWQKLKLSRDDAKPLLRLKGFPSFPLVERQANEVDWWDMVCNVKKLINEKKEDGKVFWQNLAGYKRQEALRPYLSSEEDRKKGKKFARYQLGDLLLHLEKKHPEDWGKVYDEAWERIDKKVEGLSKHIKLEEERRSEDAQSKAALTDWLRAKASFVIEGLKEADKDEFCRCELKLQKWYGDLRGKPFAIEAENSILDISGFSKQYNCAFIWQKDGVKKLNLYLIINYFKGGKLRFKKIKPEAFEANRFYTVINKKSGEIVPMEVNFNFDDPNLIILPLAFGKRQGREFIWNDLLSLETGSLKLANGRVIEKTLYNRRTRQDEPALFVALTFERREVLDSSNIKPMNLIGVDRGENIPAVIALTDPEGCPLSRFKDSLGNPTHILRIGESYKEKQRTIQAKKEVEQRRAGGYSRKYASKAKNLADDMVRNTARDLLYYAVTQDAMLIFENLSRGFGRQGKRTFMAERQYTRMEDWLTAKLAYEGLPSKTYLSKTLAQYTSKTCSNCGFTITSADYDRVLEKLKKTATGWMTTINGKELKVEGQITYYNRYKRQNVVKDLSVELDRLSEESVNNDISSWTKGRSGEALSLLKKRFSHRPVQEKFVCLNCGFETHADEQAALNIARSWLFLRSQEYKKYQTNKTTGNTDKRAFVETWQSFYRKKLKEVWKPAV

SEQ ID NO: 48732 - protein, 980 aa, synthetic construct
  REGION 1..980: note = engineered CasX variant
QEIKGRINKIRRRLVKDSNTKKAGKTGPMKTLLVRVMTPDLRERLENLRKKPENIPQPISNTSRANLNKLLTDYTEMKKAILHVYWEEFQKDPVGLMSRVAQPASKKIDQNKLKPEMDEKGNLTTAGFACSQCGQPLFVYKLEQVSEKGKAYTNYFGRCNVAEHEKLILLAQLKPEKDSDEAVTYSLGKFGQRALDFYSIHVTKESTHPVKPLAQIAGNRYASGPVGKALRDACMGTIASFLSKYQDIIIEHQKVVKGNQKRLESLRELAGKENLEYPSVTLPPQPHTKEGVDAYNEVIARVRMWVNLNLWQKLKLSRDDAKPLLRLKGFPSFPLVERQANEVDWWDMVCNVKKLINEKKEDGKVFWQNLAGYKRQEALRPYLSSEEDRKKGKKFARYQLGDLLLHLEKKHGERDWGKVYDEAWERIDKKVEGLSKHIKLEEERRSEDAQSKAALTDWLRAKASFVIEGLKEADKDEFCRCELKLQKWYGDLRGKPFAIEAENSILDISGFSKQYNCAFIWQKDGVKKLNLYLIINYFKGGKLRFKKIKPEAFEANRFYTVINKKSGEIVPMEVNFNFDDPNLIILPLAFGKRQGREFIWNDLLSLETGSLKLANGRVIEKTLYNRRTRQDEPALFVALTFERREVLDSSNIKPMNLIGVDRGENIPAVIALTDPEGCPLSRFKDSLGNPTHILRIGESYKEKQRTIQAKKEVEQRRAGGYSRKYASKAKNLADDMVRNTARDLLYYAVTQDAMLIFENLSRGFGRQGKRTFMAERQYTRMEDWLTAKLAYEGLPSKTYLSKTLAQYTSKTCSNCGFTITSADYDRVLEKLKKTATGWMTTINGKELKVEGQITYYNRYKRQNVVKDLSVELDRLSEESVNNDISSWTKGRSGEALSLLKKRFSHRPVQEKFVCLNCGFETHADEQAALNIARSWLFLRSQEYKKYQTNKTTGNTDKRAFVETWQSFYRKKLKEVWKPAV

SEQ ID NO: 48733 - protein, 980 aa, synthetic construct
  REGION 1..980: note = engineered CasX variant
QEIKGRINKIRRRLVKDSNTKKAGKTGPMKTLLVRVMTPDLRERLENLRKKPENIPQPISNTSRANLNKLLTDYTEMKKAILHVYWEEFQKDPVGLMSRVAQPASKKIDQNKLKPEMDEKGNLTTAGFACSQCGQPLFVYKLEQVSEKGKAYTNYFGRCNVAEHEKLILLAQLKPEKDSDEAVTYSLGKFGQRALDFYSIHVTKESTHPVKPLAQIAGNRYASGPVGKALRDACMGTIASFLSKYQDIIIEHQKVVKGNQKRLESLRELAGKENLEYPSVTLPPQPHTKEGVDAYNEVIARVRMWVNLNLWQKLKLSRDDAKPLLRLKGFPSFPLVERQANEVDWWDMVCNVKKLINEKKEDGKVFWQNLAGYKRQEALRPYLSSEEDRKKGKKFARYQLGDLLLHLEKKHGEYDWGKVYDEAWERIDKKVEGLSKHIKLEEERRSEDAQSKAALTDWLRAKASFVIEGLKEADKDEFCRCELKLQKWYGDLRGKPFAIEAENSILDISGFSKQYNCAFIWQKDGVKKLNLYLIINYFKGGKLRFKKIKPEAFEANRFYTVINKKSGEIVPMEVNFNFDDPNLIILPLAFGKRQGREFIWNDLLSLETGSLKLANGRVIEKTLYNRRTRQDEPALFVALTFERREVLDSSNIKPMNLIGVDRGENIPAVIALTDPEGCPLSRFKDSLGNPTHILRIGESYKEKQRTIQAKKEVEQRRAGGYSRKYASKAKNLADDMVRNTARDLLYYAVTQDAMLIFENLSRGFGRQGKRTFMAERQYTRMEDWLTAKLAYEGLPSKTYLSKTLAQYTSKTCSNCGFTITSADYDRVLEKLKKTATGWMTTINGKELKVEGQITYYNRYKRQNVVKDLSVELDRLSEESVNNDISSWTKGRSGEALSLLKKRFSHRPVQEKFVCLNCGFETHADEQAALNIARSWLFLRSQEYKKYQTNKTTGNTDKRAFVETWQSFYRKKLKEVWKPAV

SEQ ID NO: 48734 - protein, 979 aa, synthetic construct
  REGION 1..979: note = engineered CasX variant
QEIKGRINKIRRRLVKDSNTKKAGKTGPMKTLLVRVMTPDLRERLENLRKKPENIPQPISNTSRANLNKLLTDYTEMKKAILHVYWEEFQKDPVGLMSRVAQPASKKIDQNKLKPEMDEKGNLTTAGFACSQCGQPLFVYKLEQVSEKGKAYTNYFGRCNVAEHEKLILLAQLKPEKDSDEAVTYSLGKFGQRALDFYSIHVTKESTHPVKPLAQIAGNRYASGPVGKALRDACMGTIASFLSKYQDIIIEHQKVVKGNQKRLESLRELAGKENLEYPSVTLPPQPHTKEGVDAYNEVIARVRMWVNLNLWQKLKLSRDDAKPLLRLKGFPSFPLVERQANEVDWWDMVCNVKKLINEKKEDGKVFWQNLAGYKRQEALRPYLSSEEDRKKGKKFARYQLGDLLLHLEKKHGEDWGDVYDEAWERIDKKVEGLSKHIKLEEERRSEDAQSKAALTDWLRAKASFVIEGLKEADKDEFCRCELKLQKWYGDLRGKPFAIEAENSILDISGFSKQYNCAFIWQKDGVKKLNLYLIINYFKGGKLRFKKIKPEAFEANRFYTVINKKSGEIVPMEVNFNFDDPNLIILPLAFGKRQGREFIWNDLLSLETGSLKLANGRVIEKTLYNRRTRQDEPALFVALTFERREVLDSSNIKPMNLIGVDRGENIPAVIALTDPEGCPLSRFKDSLGNPTHILRIGESYKEKQRTIQAKKEVEQRRAGGYSRKYASKAKNLADDMVRNTARDLLYYAVTQDAMLIFENLSRGFGRQGKRTFMAERQYTRMEDWLTAKLAYEGLPSKTYLSKTLAQYTSKTCSNCGFTITSADYDRVLEKLKKTATGWMTTINGKELKVEGQITYYNRYKRQNVVKDLSVELDRLSEESVNNDISSWTKGRSGEALSLLKKRFSHRPVQEKFVCLNCGFETHADEQAALNIARSWLFLRSQEYKKYQTNKTTGNTDKRAFVETWQSFYRKKLKEVWKPAV

SEQ ID NO: 48735 - protein, 979 aa, synthetic construct
  REGION 1..979: note = engineered CasX variant
QEIKGRINKIRRRLVKDSNTKKAGKTGPMKTLLVRVMTPDLRERLENLRKKPENIPQPISNTSRANLNKLLTDYTEMKKAILHVYWEEFQKDPVGLMSRVAQPASKKIDQNKLKPEMDEKGNLTTAGFACSQCGQPLFVYKLEQVSEKGKAYTNYFGRCNVAEHEKLILLAQLKPEKDSDEAVTYSLGKFGQRALDFYSIHVTKESTHPVKPLAQIAGNRYASGPVGKALRDACMGTIASFLSKYQDIIIEHQKVVKGNQKRLESLRELAGKENLEYPSVTLPPQPHTKEGVDAYNEVIARVRMWVNLNLWQKLKLSRDDAKPLLRLKGFPSFPLVERQANEVDWWDMVCNVKKLINEKKEDGKVFWQNLAGYKRQEALRPYLSSEEDRKKGKKFARYQLGDLLLHLEKKHGEDWGKVYGEAWERIDKKVEGLSKHIKLEEERRSEDAQSKAALTDWLRAKASFVIEGLKEADKDEFCRCELKLQKWYGDLRGKPFAIEAENSILDISGFSKQYNCAFIWQKDGVKKLNLYLIINYFKGGKLRFKKIKPEAFEANRFYTVINKKSGEIVPMEVNFNFDDPNLIILPLAFGKRQGREFIWNDLLSLETGSLKLANGRVIEKTLYNRRTRQDEPALFVALTFERREVLDSSNIKPMNLIGVDRGENIPAVIALTDPEGCPLSRFKDSLGNPTHILRIGESYKEKQRTIQAKKEVEQRRAGGYSRKYASKAKNLADDMVRNTARDLLYYAVTQDAMLIFENLSRGFGRQGKRTFMAERQYTRMEDWLTAKLAYEGLPSKTYLSKTLAQYTSKTCSNCGFTITSADYDRVLEKLKKTATGWMTTINGKELKVEGQITYYNRYKRQNVVKDLSVELDRLSEESVNNDISSWTKGRSGEALSLLKKRFSHRPVQEKFVCLNCGFETHADEQAALNIARSWLFLRSQEYKKYQTNKTTGNTDKRAFVETWQSFYRKKLKEVWKPAV

SEQ ID NO: 48736 - protein, 979 aa, synthetic construct
  REGION 1..979: note = engineered CasX variant
QEIKGRINKIRRRLVKDSNTKKAGKTGPMKTLLVRVMTPDLRERLENLRKKPENIPQPISNTSRANLNKLLTDYTEMKKAILHVYWEEFQKDPVGLMSRVAQPASKKIDQNKLKPEMDEKGNLTTAGFACSQCGQPLFVYKLEQVSEKGKAYTNYFGRCNVAEHEKLILLAQLKPEKDSDEAVTYSLGKFGQRALDFYSIHVTKESTHPVKPLAQIAGNRYASGPVGKALRDACMGTIASFLSKYQDIIIEHQKVVKGNQKRLESLRELAGKENLEYPSVTLPPQPHTKEGVDAYNEVIARVRMWVNLNLWQKLKLSRDDAKPLLRLKGFPSFPLVERQANEVDWWDMVCNVKKLINEKKEDGKVFWQNLAGYKRQEALRPYLSSEEDRKKGKKFARYQLGDLLLHLEKKHGEDWGKVYDEAWERIDKKVEGLSKHIKLEEERRSEDAQSKAALTDWLRAKASFVIEGKKEADKDEFCRCELKLQKWYGDLRGKPFAIEAENSILDISGFSKQYNCAFIWQKDGVKKLNLYLIINYFKGGKLRFKKIKPEAFEANRFYTVINKKSGEIVPMEVNFNFDDPNLIILPLAFGKRQGREFIWNDLLSLETGSLKLANGRVIEKTLYNRRTRQDEPALFVALTFERREVLDSSNIKPMNLIGVDRGENIPAVIALTDPEGCPLSRFKDSLGNPTHILRIGESYKEKQRTIQAKKEVEQRRAGGYSRKYASKAKNLADDMVRNTARDLLYYAVTQDAMLIFENLSRGFGRQGKRTFMAERQYTRMEDWLTAKLAYEGLPSKTYLSKTLAQYTSKTCSNCGFTITSADYDRVLEKLKKTATGWMTTINGKELKVEGQITYYNRYKRQNVVKDLSVELDRLSEESVNNDISSWTKGRSGEALSLLKKRFSHRPVQEKFVCLNCGFETHADEQAALNIARSWLFLRSQEYKKYQTNKTTGNTDKRAFVETWQSFYRKKLKEVWKPAV

SEQ ID NO: 48737 - protein, 979 aa, synthetic construct
  REGION 1..979: note = engineered CasX variant
QEIKGRINKIRRRLVKDSNTKKAGKTGPMKTLLVRVMTPDLRERLENLRKKPENIPQPISNTSRANLNKLLTDYTEMKKAILHVYWEEFQKDPVGLMSRVAQPASKKIDQNKLKPEMDEKGNLTTAGFACSQCGQPLFVYKLEQVSEKGKAYTNYFGRCNVAEHEKLILLAQLKPEKDSDEAVTYSLGKFGQRALDFYSIHVTKESTHPVKPLAQIAGNRYASGPVGKALRDACMGTIASFLSKYQDIIIEHQKVVKGNQKRLESLRELAGKENLEYPSVTLPPQPHTKEGVDAYNEVIARVRMWVNLNLWQKLKLSRDDAKPLLRLKGFPSFPLVERQANEVDWWDMVCNVKKLINEKKEDGKVFWQNLAGYKRQEALRPYLSSEEDRKKGKKFARYQLGDLLLHLEKKHGEDWGKVYDEAWERIDKKVEGLSKHIKLEEERRSEDAQSKAALTDWLRAKASFVIEGSKEADKDEFCRCELKLQKWYGDLRGKPFAIEAENSILDISGFSKQYNCAFIWQKDGVKKLNLYLIINYFKGGKLRFKKIKPEAFEANRFYTVINKKSGEIVPMEVNFNFDDPNLIILPLAFGKRQGREFIWNDLLSLETGSLKLANGRVIEKTLYNRRTRQDEPALFVALTFERREVLDSSNIKPMNLIGVDRGENIPAVIALTDPEGCPLSRFKDSLGNPTHILRIGESYKEKQRTIQAKKEVEQRRAGGYSRKYASKAKNLADDMVRNTARDLLYYAVTQDAMLIFENLSRGFGRQGKRTFMAERQYTRMEDWLTAKLAYEGLPSKTYLSKTLAQYTSKTCSNCGFTITSADYDRVLEKLKKTATGWMTTINGKELKVEGQITYYNRYKRQNVVKDLSVELDRLSEESVNNDISSWTKGRSGEALSLLKKRFSHRPVQEKFVCLNCGFETHADEQAALNIARSWLFLRSQEYKKYQTNKTTGNTDKRAFVETWQSFYRKKLKEVWKPAV

SEQ ID NO: 48738 - protein, 980 aa, synthetic construct
  REGION 1..980: note = engineered CasX variant
QEIKGRINKIRRRLVKDSNTKKAGKTGPMKTLLVRVMTPDLRERLENLRKKPENIPQPISNTSRANLNKLLTDYTEMKKAILHVYWEEFQKDPVGLMSRVAQPASKKIDQNKLKPEMDEKGNLTTAGFACSQCGQPLFVYKLEQVSEKGKAYTNYFGRCNVAEHEKLILLAQLKPEKDSDEAVTYSLGKFGQRALDFYSIHVTKESTHPVKPLAQIAGNRYASGPVGKALRDACMGTIASFLSKYQDIIIEHQKVVKGNQKRLESLRELAGKENLEYPSVTLPPQPHTKEGVDAYNEVIARVRMWVNLNLWQKLKLSRDDAKPLLRLKGFPSFPLVERQANEVDWWDMVCNVKKLINEKKEDGKVFWQNLAGYKRQEALRPYLSSEEDRKKGKKFARYQLGDLLLHLEKKHGEDWGKVYDEAWERIDKKVEGLSKHIKLEEERRSEDAQSKAALTDWLRAKASFVIEGLKEADDKDEFCRCELKLQKWYGDLRGKPFAIEAENSILDISGFSKQYNCAFIWQKDGVKKLNLYLIINYFKGGKLRFKKIKPEAFEANRFYTVINKKSGEIVPMEVNFNFDDPNLIILPLAFGKRQGREFIWNDLLSLETGSLKLANGRVIEKTLYNRRTRQDEPALFVALTFERREVLDSSNIKPMNLIGVDRGENIPAVIALTDPEGCPLSRFKDSLGNPTHILRIGESYKEKQRTIQAKKEVEQRRAGGYSRKYASKAKNLADDMVRNTARDLLYYAVTQDAMLIFENLSRGFGRQGKRTFMAERQYTRMEDWLTAKLAYEGLPSKTYLSKTLAQYTSKTCSNCGFTITSADYDRVLEKLKKTATGWMTTINGKELKVEGQITYYNRYKRQNVVKDLSVELDRLSEESVNNDISSWTKGRSGEALSLLKKRFSHRPVQEKFVCLNCGFETHADEQAALNIARSWLFLRSQEYKKYQTNKTTGNTDKRAFVETWQSFYRKKLKEVWKPAV

SEQ ID NO: 48739 - protein, 980 aa, synthetic construct
  REGION 1..980: note = engineered CasX variant
QEIKGRINKIRRRLVKDSNTKKAGKTGPMKTLLVRVMTPDLRERLENLRKKPENIPQPISNTSRANLNKLLTDYTEMKKAILHVYWEEFQKDPVGLMSRVAQPASKKIDQNKLKPEMDEKGNLTTAGFACSQCGQPLFVYKLEQVSEKGKAYTNYFGRCNVAEHEKLILLAQLKPEKDSDEAVTYSLGKFGQRALDFYSIHVTKESTHPVKPLAQIAGNRYASGPVGKALRDACMGTIASFLSKYQDIIIEHQKVVKGNQKRLESLRELAGKENLEYPSVTLPPQPHTKEGVDAYNEVIARVRMWVNLNLWQKLKLSRDDAKPLLRLKGFPSFPLVERQANEVDWWDMVCNVKKLINEKKEDGKVFWQNLAGYKRQEALRPYLSSEEDRKKGKKFARYQLGDLLLHLEKKHGEDWGKVYDEAWERIDKKVEGLSKHIKLEEERRSEDAQSKAALTDWLRAKASFVIEGLKEADKDEFCRCELKLQKWYGDLRGKPFAIEAENSILDISGFSKQYNCAFIWQKDGVKKLNLYLIINYFKGGKLRFKKIKPEAFEANRFYTVINKKSGEIVPMEVNFNFDDPNLIILPLAFGKRQGREFIWNDLLSLETGSLKLANGRVIEKTLYNRRTRQDEPALFVALTFERREVLDSSNIKPMNLIGVDRGENIPAVIALTDPEGCPLSRFKDSLGNPTHILRIGESYKEKQRTIQAKKEVEQRRAGGYSRKYASKAKNLADDMVRNTARDLLYYAVTQDAMLIFENLSRGFGRQGKRTFMAERQYTRMEDWLTAKLAYEGLPSKTYLSKTLAQYTSKTCSNCGFTITSADYDRVLEKLKKTATGWMTTINGKELKVEGQITYYNRYKRQNVVKDLSVELDRLSEESVNNDISSWTKGRSGNEALSLLKKRFSHRPVQEKFVCLNCGFETHADEQAALNIARSWLFLRSQEYKKYQTNKTTGNTDKRAFVETWQSFYRKKLKEVWKPAV

SEQ ID NO: 48740 - protein, 979 aa, synthetic construct
  REGION 1..979: note = engineered CasX variant
QEIKGRINKIRRRLVKDSNTKKAGKTGPMKTLLVRVMTPDLRERLENLRKKPENIPQPISNTSRANLNKLLTDYTEMKKAILHVYWEEFQKDPVGLMSRVAQPASKKIDQNKLKPEMDEKGNLTTAGFACSQCGQPLFVYKLEQVSEKGKAYTNYFGRCNVAEHEKLILLAQLKPEKDSDEAVTYSLGKFGQRALDFYSIHVTKESTHPVKPLAQIAGNRYASGPVGKALRDACMGTIASFLSKYQDIIIEHQKVVKGNQKRLESLRELAGKENLEYPSVTLPPQPHTKEGVDAYNEVIARVRMWVNLNLWQKLKLSRDDAKPLLRLKGFPSFPLVERQANEVDWWDMVCNVKKLINEKKEDGKVFWQNLAGYKRQEALRPYLSSEEDRQKGKKFARYQLGDLLLHLEKKHGEDWGKVYDEAWERIDKKVEGLSKHIKLEEERRSEDAQSKAALTDWLRAKASFVIEGLKEADKDEFCRCELKLQKWYGDLRGKPFAIEAENSILDISGFSKQYNCAFIWQKDGVKKLNLYLIINYFKGGKLRFKKIKPEAFEANRFYTVINKKSGEIVPMEVNFNFDDPNLIILPLAFGKRQGREFIWNDLLSLETGSLKLANGRVIEKTLYNRRTRQDEPALFVALTFERREVLDSSNIKPMNLIGVDRGENIPAVIALTDPEGCPLSRFKDSLGNPTHILRIGESYKEKQRTIQAKKEVEQRRAGGYSRKYASKAKNLADDMVRNTARDLLYYAVTQDAMLIFENLSRGFGRQGKRTFMAERQYTRMEDWLTAKLAYEGLPSKTYLSKTLAQYTSKTCSNCGFTITSADYDRVLEKLKKTATGWMTTINGKELKVEGQITYYNRYKRQNVVKDLSVELDRLSEESVNNDISSWTKGRSGEALSLLKKRFSHRPVQEKFVCLNCGFETHADEQAALNIARSWLFLRSQEYKKYQTNKTTGNTDKRAFVETWQSFYRKKLKEVWKPAV

SEQ ID NO: 48741 - protein, 979 aa, synthetic construct
  REGION 1..979: note = engineered CasX variant
QEIKGRINKIRRRLVKDSNTKKAGKTGPMKTLLVRVMTPDLRERLENLRKKPENIPQPISNTSRANLNKLLTDYTEMKKAILHVYWEEFQKDPVGLMSRVAQPASKKIDQNKLKPEMDEKGNLTTAGFACSQCGQPLFVYKLEQVSEKGKAYTNYFGRCNVAEHEKLILLAQLKPEKDSDEAVTYSLGKFGQRALDFYSIHVTKESTHPVKPLAQIAGNRYASGPVGKALRDACMGTIASFLSKYQDIIIEHQKVVKGNQKRLESLRELAGKENLEYPSVTLPPQPHTKEGVDAYNEVIARVRMWVNLNLWQKLKLSRDDAKPLLRLKGFPSFPLVERQANEVDWWDMVCNVKKLINEKKEDGKVFWQNLAGYKRQEALRPYLSSEEDRKKGKKFARYQLGDLLLHLEKKHGEDWGKVYDEAWERIDKKVEGLSKHIKLEEERRSEDAQSKAALTDWLRAKASFVIEGLKEADKDEFCRCELKLQKWYGDLRGKPFAIEAENSILDISGFSKQYNCAFIWQKDGVKKLNLYLIINYFKGGKLRFKKIKPEAFEANRFYTVINKKSGEIVPMEVNFNFDDPNLIILPLAFGKRQGREFIWNDLLSLETGSLKLANGRVIEKTLYNRRTRQDEPALFVALTFERREVLDSSNIKPMNLIGVDRGENIPAVIALTDPEGCPLSRFKDSLGNPTHILRIGESYKEKQRTIQAKKEVEQRRAGGYSRKYASKAKNLADDMVRNTARDLLYYAVTQDAMLIFENLSRGFGRQGKRTFMAERQYTRMEDWLTAKLAYEGLPSQTYLSKTLAQYTSKTCSNCGFTITSADYDRVLEKLKKTATGWMTTINGKELKVEGQITYYNRYKRQNVVKDLSVELDRLSEESVNNDISSWTKGRSGEALSLLKKRFSHRPVQEKFVCLNCGFETHADEQAALNIARSWLFLRSQEYKKYQTNKTTGNTDKRAFVETWQSFYRKKLKEVWKPAV

SEQ ID NO: 48742 - protein, 979 aa, synthetic construct
  REGION 1..979: note = engineered CasX variant
QEIKGRINKIRRRLVKDSNTKKAGKTGPMKTLLVRVMTPDLRERLENLRKKPENIPQPISNTSRANLNKLLTDYTEMKKAILHVYWEEFQKDPVGLMSRVAQPASKKIDQNKLKPEMDEKGNLTTAGFACSQCGQPLFVYKLEQVSEKGKAYTNYFGRCNVAEHEKLILLAQLKPEKDSDEAVTYSLGKFGQRALDFYSIHVTKESTHPVKPLAQIAGNRYASGPVGKALRDACMGTIASFLSKYQDIIIEHQKVVKGNQKRLESLRELAGKENLEYPSVTLPPQPHTKEGVDAYNEVIARVRMWVNLNLWQKLKLSRDDAKPLLRLKGFPSFPLVERQANEVDWWDMVCNVKKLINEKKEDGKVFWQNLAGYKRQEALRPYLSSEEDRKKGKKFARYQLGDLLLHLEKKHGEDWGKVYDEAWERIDKKVEGLSKHIKLEEERRSEDAQSKAALTDWLRAKASFVIEGLKEADKDEFCRCELKLQKWYGDLRGKPFAIEAENSILDISGFSKQYNCAFIWQKDGVKKLNLYLIINYFKGGKLRFKKIKPEAFEANRFYTVINKKSGEIVPMEVNFNFDDPNLIILPLAFGKRQGREFIWNDLLSLETGSLKLANGRVIEKTLYNRRTRQDEPALFVALTFERREVLDSSNIKPMNLIGVDRGENIPAVIALTDPEGCPLSRFKDSLGNPTHILRIGESYKEKQRTIQAKKEVEQRRAGGYSRKYASKAKNLADDMVRNTARDLLYYAVTQDAMLIFENLSRGFGRQGKRTFMAERQYTRMEDWLTAKLAYNGLPSKTYLSKTLAQYTSKTCSNCGFTITSADYDRVLEKLKKTATGWMTTINGKELKVEGQITYYNRYKRQNVVKDLSVELDRLSEESVNNDISSWTKGRSGEALSLLKKRFSHRPVQEKFVCLNCGFETHADEQAALNIARSWLFLRSQEYKKYQTNKTTGNTDKRAFVETWQSFYRKKLKEVWKPAV

SEQ ID NO: 48743 - protein, 979 aa, synthetic construct
  REGION 1..979: note = engineered CasX variant
QEIKGRINKIRRRLVKDSNTKKAGKTGPMKTLLVRVMTPDLRERLENLRKKPENIPQPISNTSRANLNKLLTDYTEMKKAILHVYWEEFQKDPVGLMSRVAQPASKKIDQNKLKPEMDEKGNLTTAGFACSQCGQPLFVYKLEQVSEKGKAYTNYFGRCNVAEHEKLIQLAQLKPEKDSDEAVTYSLGKFGQRALDFYSIHVTKESTHPVKPLAQIAGNRYASGPVGKALRDACMGTIASFLSKYQDIIIEHQKVVKGNQKRLESLRELAGKENLEYPSVTLPPQPHTKEGVDAYNEVIARVRMWVNLNLWQKLKLSRDDAKPLLRLKGFPSFPLVERQANEVDWWDMVCNVKKLINEKKEDGKVFWQNLAGYKRQEALRPYLSSEEDRKKGKKFARYQLGDLLLHLEKKHGEDWGKVYDEAWERIDKKVEGLSKHIKLEEERRSEDAQSKAALTDWLRAKASFVIEGLKEADKDEFCRCELKLQKWYGDLRGKPFAIEAENSILDISGFSKQYNCAFIWQKDGVKKLNLYLIINYFKGGKLRFKKIKPEAFEANRFYTVINKKSGEIVPMEVNFNFDDPNLIILPLAFGKRQGREFIWNDLLSLETGSLKLANGRVIEKTLYNRRTRQDEPALFVALTFERREVLDSSNIKPMNLIGVDRGENIPAVIALTDPEGCPLSRFKDSLGNPTHILRIGESYKEKQRTIQAKKEVEQRRAGGYSRKYASKAKNLADDMVRNTARDLLYYAVTQDAMLIFENLSRGFGRQGKRTFMAERQYTRMEDWLTAKLAYEGLPSKTYLSKTLAQYTSKTCSNCGFTITSADYDRVLEKLKKTATGWMTTINGKELKVEGQITYYNRYKRQNVVKDLSVELDRLSEESVNNDISSWTKGRSGEALSLLKKRFSHRPVQEKFVCLNCGFETHADEQAALNIARSWLFLRSQEYKKYQTNKTTGNTDKRAFVETWQSFYRKKLKEVWKPAV

SEQ ID NO: 48744 - protein, 979 aa, synthetic construct
  REGION 1..979: note = engineered CasX variant
QEIKGRINKIRRRLVKDSNTKKAGKTGPMKTLLVRVMTPDLRERLENLRKKPENIPQPISNTSRANLNKLLTDYTEMKKAILHVYWEEFQKDPVGLMSRVAQPASKKIDQNKLKPEMDEKGNLTTAGFACSQCGQPLFVYKLEQVSEKGKAYTNYFGRCNVAEHEKLILLAQLKPEKDSDEAVTYSLGKFGQRALDFYSIHVTKESTHPVKPLAQIAGNRYASGPVGKALRDACMGTIASFLSKYQDIIIEHQKVVKGNQKRLESLRELAGKENLEYPSVTLPPQPHTKEGVDAYNEVIARVRMWVNLNLWQKLKLSRDDAKPLLRLKGFPSFPLVERQANEVDWWDMVCNVKKLINEKKEDGKVFWQNLAIYKRQEALRPYLSSEEDRKKGKKFARYQLGDLLLHLEKKHGEDWGKVYDEAWERIDKKVEGLSKHIKLEEERRSEDAQSKAALTDWLRAKASFVIEGLKEADKDEFCRCELKLQKWYGDLRGKPFAIEAENSILDISGFSKQYNCAFIWQKDGVKKLNLYLIINYFKGGKLRFKKIKPEAFEANRFYTVINKKSGEIVPMEVNFNFDDPNLIILPLAFGKRQGREFIWNDLLSLETGSLKLANGRVIEKTLYNRRTRQDEPALFVALTFERREVLDSSNIKPMNLIGVDRGENIPAVIALTDPEGCPLSRFKDSLGNPTHILRIGESYKEKQRTIQAKKEVEQRRAGGYSRKYASKAKNLADDMVRNTARDLLYYAVTQDAMLIFENLSRGFGRQGKRTFMAERQYTRMEDWLTAKLAYEGLPSKTYLSKTLAQYTSKTCSNCGFTITSADYDRVLEKLKKTATGWMTTINGKELKVEGQITYYNRYKRQNVVKDLSVELDRLSEESVNNDISSWTKGRSGEALSLLKKRFSHRPVQEKFVCLNCGFETHADEQAALNIARSWLFLRSQEYKKYQTNKTTGNTDKRAFVETWQSFYRKKLKEVWKPAV

SEQ ID NO: 48745 - protein, 979 aa, synthetic construct
  REGION 1..979: note = engineered CasX variant
QEIKGRINKIRRRLVKDSNTKKAGKTGPMKTLLVRVMTPDLRERLENLRKKPENIPQPISNTSRANLNKLLTDYTEMKKAILHVYWEEFQKDPVGLMSRVAQPASKKIDQNKLKPEMDEKGNLTTAGFACSQCGQPLFVYKLEQVSEKGKAYTNYFGRCNVAEHEKLILLAQLKPEKDSDEAVTYSLGKFGQRALDFYSIHVTKESTHPVKPLAQIAGNRYASGPVGKALRDACMGTIASFLSKYQDIIIEHQKVVKGNQKRLESLRELAGKENLEYPSVTLPPQPHTKEGVDAYNEVIARVRMWVNLNLWQKLKLSRDDAKPLLRLKGFPSFPLVERQANEVDWWDMVCNVKKLINEKKEDGKVFWQNLAGYKRQEALRPYLSSEEDREKGKKFARYQLGDLLLHLEKKHGEDWGKVYDEAWERIDKKVEGLSKHIKLEEERRSEDAQSKAALTDWLRAKASFVIEGLKEADKDEFCRCELKLQKWYGDLRGKPFAIEAENSILDISGFSKQYNCAFIWQKDGVKKLNLYLIINYFKGGKLRFKKIKPEAFEANRFYTVINKKSGEIVPMEVNFNFDDPNLIILPLAFGKRQGREFIWNDLLSLETGSLKLANGRVIEKTLYNRRTRQDEPALFVALTFERREVLDSSNIKPMNLIGVDRGENIPAVIALTDPEGCPLSRFKDSLGNPTHILRIGESYKEKQRTIQAKKEVEQRRAGGYSRKYASKAKNLADDMVRNTARDLLYYAVTQDAMLIFENLSRGFGRQGKRTFMAERQYTRMEDWLTAKLAYEGLPSKTYLSKTLAQYTSKTCSNCGFTITSADYDRVLEKLKKTATGWMTTINGKELKVEGQITYYNRYKRQNVVKDLSVELDRLSEESVNNDISSWTKGRSGEALSLLKKRFSHRPVQEKFVCLNCGFETHADEQAALNIARSWLFLRSQEYKKYQTNKTTGNTDKRAFVETWQSFYRKKLKEVWKPAV

SEQ ID NO: 48746 - protein, 979 aa, synthetic construct
  REGION 1..979: note = engineered CasX variant
QEIKGRINKIRRRLVKDSNTKKAGKTGPMKTLLVRVMTPDLRERLENLRKKPENIPQPISNTSRANLNKLLTDYTEMKKAILHVYWEEFQKDPVGLMSRVAQPASKKIDQNKLKPEMDEKGNLTTAGFACSQCGQPLFVYKLEQVSEKGKAYTNYFGRCNVAEHEKLILLAQLKPEKDSDEAVTYSLGKFGQRALDFYSIHVTKESTHPVKPLAQIAGNRYASGPVGKALRDACMGTIASFLSKYQDIIIEHQKVVKGNQKRLESLRELAGKENLEYPSVTLPPQPHTKEGVDAYNEVIARVRMWVNLNLWQKLKLSRDDAKPLLRLKGFPSFPLVERQANEVDWWDMVCNVKKLINEKKEDGKVFWQNLAGYKRQEALRPYLSSEEDRKKGKKFARYQLGDLLLHLEKKHGEDWGKVYDEAWERIDKKVEGLSKHIKLEEERRSEDAQSKAALTDWLRAKASFVIEGLKEADKDEFCRCELKLQKWYGDLRGKPFAIEAENSILDISGFSKQYNCAFIWQKDGVKKLNLYLIINYFKGGKLRFKKIKPEAFEANRFYTVINKKSGEIVIMEVNFNFDDPNLIILPLAFGKRQGREFIWNDLLSLETGSLKLANGRVIEKTLYNRRTRQDEPALFVALTFERREVLDSSNIKPMNLIGVDRGENIPAVIALTDPEGCPLSRFKDSLGNPTHILRIGESYKEKQRTIQAKKEVEQRRAGGYSRKYASKAKNLADDMVRNTARDLLYYAVTQDAMLIFENLSRGFGRQGKRTFMAERQYTRMEDWLTAKLAYEGLPSKTYLSKTLAQYTSKTCSNCGFTITSADYDRVLEKLKKTATGWMTTINGKELKVEGQITYYNRYKRQNVVKDLSVELDRLSEESVNNDISSWTKGRSGEALSLLKKRFSHRPVQEKFVCLNCGFETHADEQAALNIARSWLFLRSQEYKKYQTNKTTGNTDKRAFVETWQSFYRKKLKEVWKPAV

SEQ ID NO: 48747 - protein, 978 aa, synthetic construct
  REGION 1..978: note = engineered CasX variant
QEIKRANKIRRRLVKDSNTKKAGKTGPMKTLLVRVMTPDLRERLENLRKKPENIPQPISNTSRANLNKLLTDYTEMKKAILHVYWEEFQKDPVGLMSRVAQPASKKIDQNKLKPEMDEKGNLTTAGFACSQCGQPLFVYKLEQVSEKGKAYTNYFGRCNVAEHEKLILLAQLKPEKDSDEAVTYSLGKFGQRALDFYSIHVTKESTHPVKPLAQIAGNRYASGPVGKALRGACMGTIASFLSKYQDIIIEHQKVVKGNQKRLESLRELAGKENLEYPSVTLPPQPHTKEGVDAYNEVIARVRMWVNLNLWQKLKLSRDDAKPLLRLKGFPSFPLVERQANEVDWWDMVCNVKKLINEKKEDGKVFWQNLAGYKRQEALRPYLSSEEDRKKGKKFARYQLGDLLLHLEKKHGEDWGKVYDEAWERIDKKVEGLSKHIKLEEERRSEDAQSKAALTDWLRAKASFVIEGLKEADKDEFCRCELKLQKWYGDLRGKPFAIEAENSILDISGFSKQYNCAFIWQKDGVKKLNLYLIINYFKGGKLRFKKIKPEAFEANRFYTVINKKSGEIVPMEVNFNFDDPNLIILPLAFGKRQGREFIWNDLLSLETGSLKLANGRVIEKTLYNRRTRQDEPALFVALTFERREVLDSSNIKPMNLIGVDRGENIPAVIALTDPEGCPLSRFKDSLGNPTHILRIGESYKEKQRTIQAKKEVEQRRAGGYSRKYASKAKNLADDMVRNTARDLLYYAVTQDAMLIFENLSRGFGRQGKRTFMAERQYTRMEDWLTAKLAYEGLPSKTYLSKTLAQYTSKTCSNCGFTITSADYDRVLEKLKKTATGWMTTINGKELKVEGQITYYNRYKRQNVVKDLSVELDRLSEESVNNDISSWTKGRSGEALSLLKKRFSHRPVQEKFVCLNCGFETHADEQAALNIARSWLFLRSQEYKKYQTNKTTGNTDKRAFVETWQSFYRKKLKEVWKPAV

SEQ ID NO: 48748 - protein, 978 aa, synthetic construct
  REGION 1..978: note = engineered CasX variant
QEIKRANKIRRRLVKDSNTKKAGKTGPMKTLLVRVMTPDLRERLENLRKKPENIPQPISNTSRANLNKLLTDYTEMKKAILHVYWEEFQKDPVGLMSRVAQPASKKIDQNKLKPEMDEKGNLTTAGFACSQCGQPLFVYKLEQVSEKGKAYTNYFGRCNVAEHEKLILLAQLKPEKDSDEAVTYSLGKFGQRALDFYSIHVTKESTHPVKPLAQIAGNRYASGPVGKALRDACMGTIASFLSKYQDIIIEHQKVVKGNQKRLESLRELAGKENLEYPSVTLPPQPHTKEGVDAYNEVIARVRMWVNLNLWQKLKLSRDDAKPLLRLKNFPSFPLVERQANEVDWWDMVCNVKKLINEKKEDGKVFWQNLAGYKRQEALRPYLSSEEDRKKGKKFARYQLGDLLLHLEKKHGEDWGKVYDEAWERIDKKVEGLSKHIKLEEERRSEDAQSKAALTDWLRAKASFVIEGLKEADKDEFCRCELKLQKWYGDLRGKPFAIEAENSILDISGFSKQYNCAFIWQKDGVKKLNLYLIINYFKGGKLRFKKIKPEAFEANRFYTVINKKSGEIVPMEVNFNFDDPNLIILPLAFGKRQGREFIWNDLLSLETGSLKLANGRVIEKTLYNRRTRQDEPALFVALTFERREVLDSSNIKPMNLIGVDRGENIPAVIALTDPEGCPLSRFKDSLGNPTHILRIGESYKEKQRTIQAKKEVEQRRAGGYSRKYASKAKNLADDMVRNTARDLLYYAVTQDAMLIFENLSRGFGRQGKRTFMAERQYTRMEDWLTAKLAYEGLPSKTYLSKTLAQYTSKTCSNCGFTITSADYDRVLEKLKKTATGWMTTINGKELKVEGQITYYNRYKRQNVVKDLSVELDRLSEESVNNDISSWTKGRSGEALSLLKKRFSHRPVQEKFVCLNCGFETHADEQAALNIARSWLFLRSQEYKKYQTNKTTGNTDKRAFVETWQSFYRKKLKEVWKPAV

SEQ ID NO: 48749 - protein, 978 aa, synthetic construct
  REGION 1..978: note = engineered CasX variant
QEIKRANKIRRRLVKDSNTKKAGKTGPMKTLLVRVMTPDLRERLENLRKKPENIPQPISNTSRANLNKLLTDYTEMKKAILHVYWEEFQKDPVGLMSRVAQPASKKIDQNKLKPEMDEKGNLTTAGFACSQCGQPLFVYKLEQVSEKGKAYTNYFGRCNVAEHEKLILLAQLKPEKDSDEAVTYSLGKFGQRALDFYSIHVTKESTHPVKPLAQIAGNRYASGPVGKALRDACMGTIASFLSKYQDIIIEHQKVVKGNQKRLESLRELAGKENLEYPSVTLPPQPHTKEGVDAYNEVIARVRMWVNLNLWQKLKLSRDDAKPLLRLKGFPSFPLVERQANEVDWWDMVCNVKKLINEKKEDGKVFWQNLAGYKRQEALRPYLSSEEDRKKGKKFARYQLGDLLNHLEKKHGEDWGKVYDEAWERIDKKVEGLSKHIKLEEERRSEDAQSKAALTDWLRAKASFVIEGLKEADKDEFCRCELKLQKWYGDLRGKPFAIEAENSILDISGFSKQYNCAFIWQKDGVKKLNLYLIINYFKGGKLRFKKIKPEAFEANRFYTVINKKSGEIVPMEVNFNFDDPNLIILPLAFGKRQGREFIWNDLLSLETGSLKLANGRVIEKTLYNRRTRQDEPALFVALTFERREVLDSSNIKPMNLIGVDRGENIPAVIALTDPEGCPLSRFKDSLGNPTHILRIGESYKEKQRTIQAKKEVEQRRAGGYSRKYASKAKNLADDMVRNTARDLLYYAVTQDAMLIFENLSRGFGRQGKRTFMAERQYTRMEDWLTAKLAYEGLPSKTYLSKTLAQYTSKTCSNCGFTITSADYDRVLEKLKKTATGWMTTINGKELKVEGQITYYNRYKRQNVVKDLSVELDRLSEESVNNDISSWTKGRSGEALSLLKKRFSHRPVQEKFVCLNCGFETHADEQAALNIARSWLFLRSQEYKKYQTNKTTGNTDKRAFVETWQSFYRKKLKEVWKPAV

SEQ ID NO: 48750 - protein, 978 aa, synthetic construct
  REGION 1..978: note = engineered CasX variant
QEIKRANKIRRRLVKDSNTKKAGKTGPMKTLLVRVMTPDLRERLENLRKKPENIPQPISNTSRANLNKLLTDYTEMKKAILHVYWEEFQKDPVGLMSRVAQPASKKIDQNKLKPEMDEKGNLTTAGFACSQCGQPLFVYKLEQVSEKGKAYTNYFGRCNVAEHEKLILLAQLKPEKDSDEAVTYSLGKFGQRALDFYSIHVTKESTHPVKPLAQIAGNRYASGPVGKALRDACMGTIASFLSKYQDIIIEHQKVVKGNQKRLESLRELAGKENLEYPSVTLPPQPHTKEGVDAYNEVIARVRMWVNLNLWQKLKLSRDDAKPLLRLKGFPSFPLVERQANEVDWWDMVCNVKKLINEKKEDGKVFWQNLAGYKRQEALRPYLSSEEDRKKGKKFARYQLGDLLWHLEKKHGEDWGKVYDEAWERIDKKVEGLSKHIKLEEERRSEDAQSKAALTDWLRAKASFVIEGLKEADKDEFCRCELKLQKWYGDLRGKPFAIEAENSILDISGFSKQYNCAFIWQKDGVKKLNLYLIINYFKGGKLRFKKIKPEAFEANRFYTVINKKSGEIVPMEVNFNFDDPNLIILPLAFGKRQGREFIWNDLLSLETGSLKLANGRVIEKTLYNRRTRQDEPALFVALTFERREVLDSSNIKPMNLIGVDRGENIPAVIALTDPEGCPLSRFKDSLGNPTHILRIGESYKEKQRTIQAKKEVEQRRAGGYSRKYASKAKNLADDMVRNTARDLLYYAVTQDAMLIFENLSRGFGRQGKRTFMAERQYTRMEDWLTAKLAYEGLPSKTYLSKTLAQYTSKTCSNCGFTITSADYDRVLEKLKKTATGWMTTINGKELKVEGQITYYNRYKRQNVVKDLSVELDRLSEESVNNDISSWTKGRSGEALSLLKKRFSHRPVQEKFVCLNCGFETHADEQAALNIARSWLFLRSQEYKKYQTNKTTGNTDKRAFVETWQSFYRKKLKEVWKPAV

SEQ ID NO: 48751 - protein, 978 aa, synthetic construct
  REGION 1..978: note = engineered CasX variant
QEIKRANKIRRRLVKDSNTKKAGKTGPMKTLLVRVMTPDLRERLENLRKKPENIPQPISNTSRANLNKLLTDYTEMKKAILHVYWEEFQKDPVGLMSRVAQPASKKIDQNKLKPEMDEKGNLTTAGFACSQCGQPLFVYKLEQVSEKGKAYTNYFGRCNVAEHEKLILLAQLKPEKDSDEAVTYSLGKFGQRALDFYSIHVTKESTHPVKPLAQIAGNRYASGPVGKALRDACMGTIASFLSKYQDIIIEHQKVVKGNQKRLESLRELAGKENLEYPSVTLPPQPHTKEGVDAYNEVIARVRMWVNLNLWQKLKLSRDDAKPLLRLKGFPSFPLVERQANEVDWWDMVCNVKKLINEKKEDGKVFWQNLAGYKRQEALRPYLSSEEDRKKGKKFARYQLGDLLLHLYKKHGEDWGKVYDEAWERIDKKVEGLSKHIKLEEERRSEDAQSKAALTDWLRAKASFVIEGLKEADKDEFCRCELKLQKWYGDLRGKPFAIEAENSILDISGFSKQYNCAFIWQKDGVKKLNLYLIINYFKGGKLRFKKIKPEAFEANRFYTVINKKSGEIVPMEVNFNFDDPNLIILPLAFGKRQGREFIWNDLLSLETGSLKLANGRVIEKTLYNRRTRQDEPALFVALTFERREVLDSSNIKPMNLIGVDRGENIPAVIALTDPEGCPLSRFKDSLGNPTHILRIGESYKEKQRTIQAKKEVEQRRAGGYSRKYASKAKNLADDMVRNTARDLLYYAVTQDAMLIFENLSRGFGRQGKRTFMAERQYTRMEDWLTAKLAYEGLPSKTYLSKTLAQYTSKTCSNCGFTITSADYDRVLEKLKKTATGWMTTINGKELKVEGQITYYNRYKRQNVVKDLSVELDRLSEESVNNDISSWTKGRSGEALSLLKKRFSHRPVQEKFVCLNCGFETHADEQAALNIARSWLFLRSQEYKKYQTNKTTGNTDKRAFVETWQSFYRKKLKEVWKPAV

SEQ ID NO: 48752 - protein, 978 aa, synthetic construct
  REGION 1..978: note = engineered CasX variant
QEIKRANKIRRRLVKDSNTKKAGKTGPMKTLLVRVMTPDLRERLENLRKKPENIPQPISNTSRANLNKLLTDYTEMKKAILHVYWEEFQKDPVGLMSRVAQPASKKIDQNKLKPEMDEKGNLTTAGFACSQCGQPLFVYKLEQVSEKGKAYTNYFGRCNVAEHEKLILLAQLKPEKDSDEAVTYSLGKFGQRALDFYSIHVTKESTHPVKPLAQIAGNRYASGPVGKALRDACMGTIASFLSKYQDIIIEHQKVVKGNQKRLESLRELAGKENLEYPSVTLPPQPHTKEGVDAYNEVIARVRMWVNLNLWQKLKLSRDDAKPLLRLKGFPSFPLVERQANEVDWWDMVCNVKKLINEKKEDGKVFWQNLAGYKRQEALRPYLSSEEDRKKGKKFARYQLGDLLLHLEKKHPEDWGKVYDEAWERIDKKVEGLSKHIKLEEERRSEDAQSKAALTDWLRAKASFVIEGLKEADKDEFCRCELKLQKWYGDLRGKPFAIEAENSILDISGFSKQYNCAFIWQKDGVKKLNLYLIINYFKGGKLRFKKIKPEAFEANRFYTVINKKSGEIVPMEVNFNFDDPNLIILPLAFGKRQGREFIWNDLLSLETGSLKLANGRVIEKTLYNRRTRQDEPALFVALTFERREVLDSSNIKPMNLIGVDRGENIPAVIALTDPEGCPLSRFKDSLGNPTHILRIGESYKEKQRTIQAKKEVEQRRAGGYSRKYASKAKNLADDMVRNTARDLLYYAVTQDAMLIFENLSRGFGRQGKRTFMAERQYTRMEDWLTAKLAYEGLPSKTYLSKTLAQYTSKTCSNCGFTITSADYDRVLEKLKKTATGWMTTINGKELKVEGQITYYNRYKRQNVVKDLSVELDRLSEESVNNDISSWTKGRSGEALSLLKKRFSHRPVQEKFVCLNCGFETHADEQAALNIARSWLFLRSQEYKKYQTNKTTGNTDKRAFVETWQSFYRKKLKEVWKPAV

SEQ ID NO: 48753 - protein, 979 aa, synthetic construct
  REGION 1..979: note = engineered CasX variant
QEIKRANKIRRRLVKDSNTKKAGKTGPMKTLLVRVMTPDLRERLENLRKKPENIPQPISNTSRANLNKLLTDYTEMKKAILHVYWEEFQKDPVGLMSRVAQPASKKIDQNKLKPEMDEKGNLTTAGFACSQCGQPLFVYKLEQVSEKGKAYTNYFGRCNVAEHEKLILLAQLKPEKDSDEAVTYSLGKFGQRALDFYSIHVTKESTHPVKPLAQIAGNRYASGPVGKALRDACMGTIASFLSKYQDIIIEHQKVVKGNQKRLESLRELAGKENLEYPSVTLPPQPHTKEGVDAYNEVIARVRMWVNLNLWQKLKLSRDDAKPLLRLKGFPSFPLVERQANEVDWWDMVCNVKKLINEKKEDGKVFWQNLAGYKRQEALRPYLSSEEDRKKGKKFARYQLGDLLLHLEKKHGERDWGKVYDEAWERIDKKVEGLSKHIKLEEERRSEDAQSKAALTDWLRAKASFVIEGLKEADKDEFCRCELKLQKWYGDLRGKPFAIEAENSILDISGFSKQYNCAFIWQKDGVKKLNLYLIINYFKGGKLRFKKIKPEAFEANRFYTVINKKSGEIVPMEVNFNFDDPNLIILPLAFGKRQGREFIWNDLLSLETGSLKLANGRVIEKTLYNRRTRQDEPALFVALTFERREVLDSSNIKPMNLIGVDRGENIPAVIALTDPEGCPLSRFKDSLGNPTHILRIGESYKEKQRTIQAKKEVEQRRAGGYSRKYASKAKNLADDMVRNTARDLLYYAVTQDAMLIFENLSRGFGRQGKRTFMAERQYTRMEDWLTAKLAYEGLPSKTYLSKTLAQYTSKTCSNCGFTITSADYDRVLEKLKKTATGWMTTINGKELKVEGQITYYNRYKRQNVVKDLSVELDRLSEESVNNDISSWTKGRSGEALSLLKKRFSHRPVQEKFVCLNCGFETHADEQAALNIARSWLFLRSQEYKKYQTNKTTGNTDKRAFVETWQSFYRKKLKEVWKPAV

SEQ ID NO: 48754 - protein, 979 aa, synthetic construct
  REGION 1..979: note = engineered CasX variant
QEIKRANKIRRRLVKDSNTKKAGKTGPMKTLLVRVMTPDLRERLENLRKKPENIPQPISNTSRANLNKLLTDYTEMKKAILHVYWEEFQKDPVGLMSRVAQPASKKIDQNKLKPEMDEKGNLTTAGFACSQCGQPLFVYKLEQVSEKGKAYTNYFGRCNVAEHEKLILLAQLKPEKDSDEAVTYSLGKFGQRALDFYSIHVTKESTHPVKPLAQIAGNRYASGPVGKALRDACMGTIASFLSKYQDIIIEHQKVVKGNQKRLESLRELAGKENLEYPSVTLPPQPHTKEGVDAYNEVIARVRMWVNLNLWQKLKLSRDDAKPLLRLKGFPSFPLVERQANEVDWWDMVCNVKKLINEKKEDGKVFWQNLAGYKRQEALRPYLSSEEDRKKGKKFARYQLGDLLLHLEKKHGEYDWGKVYDEAWERIDKKVEGLSKHIKLEEERRSEDAQSKAALTDWLRAKASFVIEGLKEADKDEFCRCELKLQKWYGDLRGKPFAIEAENSILDISGFSKQYNCAFIWQKDGVKKLNLYLIINYFKGGKLRFKKIKPEAFEANRFYTVINKKSGEIVPMEVNFNFDDPNLIILPLAFGKRQGREFIWNDLLSLETGSLKLANGRVIEKTLYNRRTRQDEPALFVALTFERREVLDSSNIKPMNLIGVDRGENIPAVIALTDPEGCPLSRFKDSLGNPTHILRIGESYKEKQRTIQAKKEVEQRRAGGYSRKYASKAKNLADDMVRNTARDLLYYAVTQDAMLIFENLSRGFGRQGKRTFMAERQYTRMEDWLTAKLAYEGLPSKTYLSKTLAQYTSKTCSNCGFTITSADYDRVLEKLKKTATGWMTTINGKELKVEGQITYYNRYKRQNVVKDLSVELDRLSEESVNNDISSWTKGRSGEALSLLKKRFSHRPVQEKFVCLNCGFETHADEQAALNIARSWLFLRSQEYKKYQTNKTTGNTDKRAFVETWQSFYRKKLKEVWKPAV

SEQ ID NO: 48755 - protein, 978 aa, synthetic construct
  REGION 1..978: note = engineered CasX variant
QEIKRANKIRRRLVKDSNTKKAGKTGPMKTLLVRVMTPDLRERLENLRKKPENIPQPISNTSRANLNKLLTDYTEMKKAILHVYWEEFQKDPVGLMSRVAQPASKKIDQNKLKPEMDEKGNLTTAGFACSQCGQPLFVYKLEQVSEKGKAYTNYFGRCNVAEHEKLILLAQLKPEKDSDEAVTYSLGKFGQRALDFYSIHVTKESTHPVKPLAQIAGNRYASGPVGKALRDACMGTIASFLSKYQDIIIEHQKVVKGNQKRLESLRELAGKENLEYPSVTLPPQPHTKEGVDAYNEVIARVRMWVNLNLWQKLKLSRDDAKPLLRLKGFPSFPLVERQANEVDWWDMVCNVKKLINEKKEDGKVFWQNLAGYKRQEALRPYLSSEEDRKKGKKFARYQLGDLLLHLEKKHGEDWGDVYDEAWERIDKKVEGLSKHIKLEEERRSEDAQSKAALTDWLRAKASFVIEGLKEADKDEFCRCELKLQKWYGDLRGKPFAIEAENSILDISGFSKQYNCAFIWQKDGVKKLNLYLIINYFKGGKLRFKKIKPEAFEANRFYTVINKKSGEIVPMEVNFNFDDPNLIILPLAFGKRQGREFIWNDLLSLETGSLKLANGRVIEKTLYNRRTRQDEPALFVALTFERREVLDSSNIKPMNLIGVDRGENIPAVIALTDPEGCPLSRFKDSLGNPTHILRIGESYKEKQRTIQAKKEVEQRRAGGYSRKYASKAKNLADDMVRNTARDLLYYAVTQDAMLIFENLSRGFGRQGKRTFMAERQYTRMEDWLTAKLAYEGLPSKTYLSKTLAQYTSKTCSNCGFTITSADYDRVLEKLKKTATGWMTTINGKELKVEGQITYYNRYKRQNVVKDLSVELDRLSEESVNNDISSWTKGRSGEALSLLKKRFSHRPVQEKFVCLNCGFETHADEQAALNIARSWLFLRSQEYKKYQTNKTTGNTDKRAFVETWQSFYRKKLKEVWKPAV

SEQ ID NO: 48756 - protein, 978 aa, synthetic construct
  REGION 1..978: note = engineered CasX variant
QEIKRANKIRRRLVKDSNTKKAGKTGPMKTLLVRVMTPDLRERLENLRKKPENIPQPISNTSRANLNKLLTDYTEMKKAILHVYWEEFQKDPVGLMSRVAQPASKKIDQNKLKPEMDEKGNLTTAGFACSQCGQPLFVYKLEQVSEKGKAYTNYFGRCNVAEHEKLILLAQLKPEKDSDEAVTYSLGKFGQRALDFYSIHVTKESTHPVKPLAQIAGNRYASGPVGKALRDACMGTIASFLSKYQDIIIEHQKVVKGNQKRLESLRELAGKENLEYPSVTLPPQPHTKEGVDAYNEVIARVRMWVNLNLWQKLKLSRDDAKPLLRLKGFPSFPLVERQANEVDWWDMVCNVKKLINEKKEDGKVFWQNLAGYKRQEALRPYLSSEEDRKKGKKFARYQLGDLLLHLEKKHGEDWGKVYGEAWERIDKKVEGLSKHIKLEEERRSEDAQSKAALTDWLRAKASFVIEGLKEADKDEFCRCELKLQKWYGDLRGKPFAIEAENSILDISGFSKQYNCAFIWQKDGVKKLNLYLIINYFKGGKLRFKKIKPEAFEANRFYTVINKKSGEIVPMEVNFNFDDPNLIILPLAFGKRQGREFIWNDLLSLETGSLKLANGRVIEKTLYNRRTRQDEPALFVALTFERREVLDSSNIKPMNLIGVDRGENIPAVIALTDPEGCPLSRFKDSLGNPTHILRIGESYKEKQRTIQAKKEVEQRRAGGYSRKYASKAKNLADDMVRNTARDLLYYAVTQDAMLIFENLSRGFGRQGKRTFMAERQYTRMEDWLTAKLAYEGLPSKTYLSKTLAQYTSKTCSNCGFTITSADYDRVLEKLKKTATGWMTTINGKELKVEGQITYYNRYKRQNVVKDLSVELDRLSEESVNNDISSWTKGRSGEALSLLKKRFSHRPVQEKFVCLNCGFETHADEQAALNIARSWLFLRSQEYKKYQTNKTTGNTDKRAFVETWQSFYRKKLKEVWKPAV

SEQ ID NO: 48757 - protein, 978 aa, synthetic construct
  REGION 1..978: note = engineered CasX variant
QEIKRANKIRRRLVKDSNTKKAGKTGPMKTLLVRVMTPDLRERLENLRKKPENIPQPISNTSRANLNKLLTDYTEMKKAILHVYWEEFQKDPVGLMSRVAQPASKKIDQNKLKPEMDEKGNLTTAGFACSQCGQPLFVYKLEQVSEKGKAYTNYFGRCNVAEHEKLILLAQLKPEKDSDEAVTYSLGKFGQRALDFYSIHVTKESTHPVKPLAQIAGNRYASGPVGKALRDACMGTIASFLSKYQDIIIEHQKVVKGNQKRLESLRELAGKENLEYPSVTLPPQPHTKEGVDAYNEVIARVRMWVNLNLWQKLKLSRDDAKPLLRLKGFPSFPLVERQANEVDWWDMVCNVKKLINEKKEDGKVFWQNLAGYKRQEALRPYLSSEEDRKKGKKFARYQLGDLLLHLEKKHGEDWGKVYDEAWERIDKKVEGLSKHIKLEEERRSEDAQSKAALTDWLRAKASFVIEGKKEADKDEFCRCELKLQKWYGDLRGKPFAIEAENSILDISGFSKQYNCAFIWQKDGVKKLNLYLIINYFKGGKLRFKKIKPEAFEANRFYTVINKKSGEIVPMEVNFNFDDPNLIILPLAFGKRQGREFIWNDLLSLETGSLKLANGRVIEKTLYNRRTRQDEPALFVALTFERREVLDSSNIKPMNLIGVDRGENIPAVIALTDPEGCPLSRFKDSLGNPTHILRIGESYKEKQRTIQAKKEVEQRRAGGYSRKYASKAKNLADDMVRNTARDLLYYAVTQDAMLIFENLSRGFGRQGKRTFMAERQYTRMEDWLTAKLAYEGLPSKTYLSKTLAQYTSKTCSNCGFTITSADYDRVLEKLKKTATGWMTTINGKELKVEGQITYYNRYKRQNVVKDLSVELDRLSEESVNNDISSWTKGRSGEALSLLKKRFSHRPVQEKFVCLNCGFETHADEQAALNIARSWLFLRSQEYKKYQTNKTTGNTDKRAFVETWQSFYRKKLKEVWKPAV

SEQ ID NO: 48758 - protein, 978 aa, synthetic construct
  REGION 1..978: note = engineered CasX variant
QEIKRANKIRRRLVKDSNTKKAGKTGPMKTLLVRVMTPDLRERLENLRKKPENIPQPISNTSRANLNKLLTDYTEMKKAILHVYWEEFQKDPVGLMSRVAQPASKKIDQNKLKPEMDEKGNLTTAGFACSQCGQPLFVYKLEQVSEKGKAYTNYFGRCNVAEHEKLILLAQLKPEKDSDEAVTYSLGKFGQRALDFYSIHVTKESTHPVKPLAQIAGNRYASGPVGKALRDACMGTIASFLSKYQDIIIEHQKVVKGNQKRLESLRELAGKENLEYPSVTLPPQPHTKEGVDAYNEVIARVRMWVNLNLWQKLKLSRDDAKPLLRLKGFPSFPLVERQANEVDWWDMVCNVKKLINEKKEDGKVFWQNLAGYKRQEALRPYLSSEEDRKKGKKFARYQLGDLLLHLEKKHGEDWGKVYDEAWERIDKKVEGLSKHIKLEEERRSEDAQSKAALTDWLRAKASFVIEGSKEADKDEFCRCELKLQKWYGDLRGKPFAIEAENSILDISGFSKQYNCAFIWQKDGVKKLNLYLIINYFKGGKLRFKKIKPEAFEANRFYTVINKKSGEIVPMEVNFNFDDPNLIILPLAFGKRQGREFIWNDLLSLETGSLKLANGRVIEKTLYNRRTRQDEPALFVALTFERREVLDSSNIKPMNLIGVDRGENIPAVIALTDPEGCPLSRFKDSLGNPTHILRIGESYKEKQRTIQAKKEVEQRRAGGYSRKYASKAKNLADDMVRNTARDLLYYAVTQDAMLIFENLSRGFGRQGKRTFMAERQYTRMEDWLTAKLAYEGLPSKTYLSKTLAQYTSKTCSNCGFTITSADYDRVLEKLKKTATGWMTTINGKELKVEGQITYYNRYKRQNVVKDLSVELDRLSEESVNNDISSWTKGRSGEALSLLKKRFSHRPVQEKFVCLNCGFETHADEQAALNIARSWLFLRSQEYKKYQTNKTTGNTDKRAFVETWQSFYRKKLKEVWKPAV

SEQ ID NO: 48759 - protein, 979 aa, synthetic construct
  REGION 1..979: note = engineered CasX variant
QEIKRANKIRRRLVKDSNTKKAGKTGPMKTLLVRVMTPDLRERLENLRKKPENIPQPISNTSRANLNKLLTDYTEMKKAILHVYWEEFQKDPVGLMSRVAQPASKKIDQNKLKPEMDEKGNLTTAGFACSQCGQPLFVYKLEQVSEKGKAYTNYFGRCNVAEHEKLILLAQLKPEKDSDEAVTYSLGKFGQRALDFYSIHVTKESTHPVKPLAQIAGNRYASGPVGKALRDACMGTIASFLSKYQDIIIEHQKVVKGNQKRLESLRELAGKENLEYPSVTLPPQPHTKEGVDAYNEVIARVRMWVNLNLWQKLKLSRDDAKPLLRLKGFPSFPLVERQANEVDWWDMVCNVKKLINEKKEDGKVFWQNLAGYKRQEALRPYLSSEEDRKKGKKFARYQLGDLLLHLEKKHGEDWGKVYDEAWERIDKKVEGLSKHIKLEEERRSEDAQSKAALTDWLRAKASFVIEGLKEADDKDEFCRCELKLQKWYGDLRGKPFAIEAENSILDISGFSKQYNCAFIWQKDGVKKLNLYLIINYFKGGKLRFKKIKPEAFEANRFYTVINKKSGEIVPMEVNFNFDDPNLIILPLAFGKRQGREFIWNDLLSLETGSLKLANGRVIEKTLYNRRTRQDEPALFVALTFERREVLDSSNIKPMNLIGVDRGENIPAVIALTDPEGCPLSRFKDSLGNPTHILRIGESYKEKQRTIQAKKEVEQRRAGGYSRKYASKAKNLADDMVRNTARDLLYYAVTQDAMLIFENLSRGFGRQGKRTFMAERQYTRMEDWLTAKLAYEGLPSKTYLSKTLAQYTSKTCSNCGFTITSADYDRVLEKLKKTATGWMTTINGKELKVEGQITYYNRYKRQNVVKDLSVELDRLSEESVNNDISSWTKGRSGEALSLLKKRFSHRPVQEKFVCLNCGFETHADEQAALNIARSWLFLRSQEYKKYQTNKTTGNTDKRAFVETWQSFYRKKLKEVWKPAV

SEQ ID NO: 48760 - protein, 979 aa, synthetic construct
  REGION 1..979: note = engineered CasX variant
QEIKRANKIRRRLVKDSNTKKAGKTGPMKTLLVRVMTPDLRERLENLRKKPENIPQPISNTSRANLNKLLTDYTEMKKAILHVYWEEFQKDPVGLMSRVAQPASKKIDQNKLKPEMDEKGNLTTAGFACSQCGQPLFVYKLEQVSEKGKAYTNYFGRCNVAEHEKLILLAQLKPEKDSDEAVTYSLGKFGQRALDFYSIHVTKESTHPVKPLAQIAGNRYASGPVGKALRDACMGTIASFLSKYQDIIIEHQKVVKGNQKRLESLRELAGKENLEYPSVTLPPQPHTKEGVDAYNEVIARVRMWVNLNLWQKLKLSRDDAKPLLRLKGFPSFPLVERQANEVDWWDMVCNVKKLINEKKEDGKVFWQNLAGYKRQEALRPYLSSEEDRKKGKKFARYQLGDLLLHLEKKHGEDWGKVYDEAWERIDKKVEGLSKHIKLEEERRSEDAQSKAALTDWLRAKASFVIEGLKEADKDEFCRCELKLQKWYGDLRGKPFAIEAENSILDISGFSKQYNCAFIWQKDGVKKLNLYLIINYFKGGKLRFKKIKPEAFEANRFYTVINKKSGEIVPMEVNFNFDDPNLIILPLAFGKRQGREFIWNDLLSLETGSLKLANGRVIEKTLYNRRTRQDEPALFVALTFERREVLDSSNIKPMNLIGVDRGENIPAVIALTDPEGCPLSRFKDSLGNPTHILRIGESYKEKQRTIQAKKEVEQRRAGGYSRKYASKAKNLADDMVRNTARDLLYYAVTQDAMLIFENLSRGFGRQGKRTFMAERQYTRMEDWLTAKLAYEGLPSKTYLSKTLAQYTSKTCSNCGFTITSADYDRVLEKLKKTATGWMTTINGKELKVEGQITYYNRYKRQNVVKDLSVELDRLSEESVNNDISSWTKGRSGNEALSLLKKRFSHRPVQEKFVCLNCGFETHADEQAALNIARSWLFLRSQEYKKYQTNKTTGNTDKRAFVETWQSFYRKKLKEVWKPAV

SEQ ID NO: 48761 - protein, 978 aa, synthetic construct
  REGION 1..978: note = engineered CasX variant
QEIKRANKIRRRLVKDSNTKKAGKTGPMKTLLVRVMTPDLRERLENLRKKPENIPQPISNTSRANLNKLLTDYTEMKKAILHVYWEEFQKDPVGLMSRVAQPASKKIDQNKLKPEMDEKGNLTTAGFACSQCGQPLFVYKLEQVSEKGKAYTNYFGRCNVAEHEKLILLAQLKPEKDSDEAVTYSLGKFGQRALDFYSIHVTKESTHPVKPLAQIAGNRYASGPVGKALRDACMGTIASFLSKYQDIIIEHQKVVKGNQKRLESLRELAGKENLEYPSVTLPPQPHTKEGVDAYNEVIARVRMWVNLNLWQKLKLSRDDAKPLLRLKGFPSFPLVERQANEVDWWDMVCNVKKLINEKKEDGKVFWQNLAGYKRQEALRPYLSSEEDRQKGKKFARYQLGDLLLHLEKKHGEDWGKVYDEAWERIDKKVEGLSKHIKLEEERRSEDAQSKAALTDWLRAKASFVIEGLKEADKDEFCRCELKLQKWYGDLRGKPFAIEAENSILDISGFSKQYNCAFIWQKDGVKKLNLYLIINYFKGGKLRFKKIKPEAFEANRFYTVINKKSGEIVPMEVNFNFDDPNLIILPLAFGKRQGREFIWNDLLSLETGSLKLANGRVIEKTLYNRRTRQDEPALFVALTFERREVLDSSNIKPMNLIGVDRGENIPAVIALTDPEGCPLSRFKDSLGNPTHILRIGESYKEKQRTIQAKKEVEQRRAGGYSRKYASKAKNLADDMVRNTARDLLYYAVTQDAMLIFENLSRGFGRQGKRTFMAERQYTRMEDWLTAKLAYEGLPSKTYLSKTLAQYTSKTCSNCGFTITSADYDRVLEKLKKTATGWMTTINGKELKVEGQITYYNRYKRQNVVKDLSVELDRLSEESVNNDISSWTKGRSGEALSLLKKRFSHRPVQEKFVCLNCGFETHADEQAALNIARSWLFLRSQEYKKYQTNKTTGNTDKRAFVETWQSFYRKKLKEVWKPAV

SEQ ID NO: 48762 - protein, 978 aa, synthetic construct
  REGION 1..978: note = engineered CasX variant
QEIKRANKIRRRLVKDSNTKKAGKTGPMKTLLVRVMTPDLRERLENLRKKPENIPQPISNTSRANLNKLLTDYTEMKKAILHVYWEEFQKDPVGLMSRVAQPASKKIDQNKLKPEMDEKGNLTTAGFACSQCGQPLFVYKLEQVSEKGKAYTNYFGRCNVAEHEKLILLAQLKPEKDSDEAVTYSLGKFGQRALDFYSIHVTKESTHPVKPLAQIAGNRYASGPVGKALRDACMGTIASFLSKYQDIIIEHQKVVKGNQKRLESLRELAGKENLEYPSVTLPPQPHTKEGVDAYNEVIARVRMWVNLNLWQKLKLSRDDAKPLLRLKGFPSFPLVERQANEVDWWDMVCNVKKLINEKKEDGKVFWQNLAGYKRQEALRPYLSSEEDRKKGKKFARYQLGDLLLHLEKKHGEDWGKVYDEAWERIDKKVEGLSKHIKLEEERRSEDAQSKAALTDWLRAKASFVIEGLKEADKDEFCRCELKLQKWYGDLRGKPFAIEAENSILDISGFSKQYNCAFIWQKDGVKKLNLYLIINYFKGGKLRFKKIKPEAFEANRFYTVINKKSGEIVPMEVNFNFDDPNLIILPLAFGKRQGREFIWNDLLSLETGSLKLANGRVIEKTLYNRRTRQDEPALFVALTFERREVLDSSNIKPMNLIGVDRGENIPAVIALTDPEGCPLSRFKDSLGNPTHILRIGESYKEKQRTIQAKKEVEQRRAGGYSRKYASKAKNLADDMVRNTARDLLYYAVTQDAMLIFENLSRGFGRQGKRTFMAERQYTRMEDWLTAKLAYEGLPSQTYLSKTLAQYTSKTCSNCGFTITSADYDRVLEKLKKTATGWMTTINGKELKVEGQITYYNRYKRQNVVKDLSVELDRLSEESVNNDISSWTKGRSGEALSLLKKRFSHRPVQEKFVCLNCGFETHADEQAALNIARSWLFLRSQEYKKYQTNKTTGNTDKRAFVETWQSFYRKKLKEVWKPAV

SEQ ID NO: 48763 - protein, 978 aa, synthetic construct
  REGION 1..978: note = engineered CasX variant
QEIKRANKIRRRLVKDSNTKKAGKTGPMKTLLVRVMTPDLRERLENLRKKPENIPQPISNTSRANLNKLLTDYTEMKKAILHVYWEEFQKDPVGLMSRVAQPASKKIDQNKLKPEMDEKGNLTTAGFACSQCGQPLFVYKLEQVSEKGKAYTNYFGRCNVAEHEKLILLAQLKPEKDSDEAVTYSLGKFGQRALDFYSIHVTKESTHPVKPLAQIAGNRYASGPVGKALRDACMGTIASFLSKYQDIIIEHQKVVKGNQKRLESLRELAGKENLEYPSVTLPPQPHTKEGVDAYNEVIARVRMWVNLNLWQKLKLSRDDAKPLLRLKGFPSFPLVERQANEVDWWDMVCNVKKLINEKKEDGKVFWQNLAGYKRQEALRPYLSSEEDRKKGKKFARYQLGDLLLHLEKKHGEDWGKVYDEAWERIDKKVEGLSKHIKLEEERRSEDAQSKAALTDWLRAKASFVIEGLKEADKDEFCRCELKLQKWYGDLRGKPFAIEAENSILDISGFSKQYNCAFIWQKDGVKKLNLYLIINYFKGGKLRFKKIKPEAFEANRFYTVINKKSGEIVPMEVNFNFDDPNLIILPLAFGKRQGREFIWNDLLSLETGSLKLANGRVIEKTLYNRRTRQDEPALFVALTFERREVLDSSNIKPMNLIGVDRGENIPAVIALTDPEGCPLSRFKDSLGNPTHILRIGESYKEKQRTIQAKKEVEQRRAGGYSRKYASKAKNLADDMVRNTARDLLYYAVTQDAMLIFENLSRGFGRQGKRTFMAERQYTRMEDWLTAKLAYNGLPSKTYLSKTLAQYTSKTCSNCGFTITSADYDRVLEKLKKTATGWMTTINGKELKVEGQITYYNRYKRQNVVKDLSVELDRLSEESVNNDISSWTKGRSGEALSLLKKRFSHRPVQEKFVCLNCGFETHADEQAALNIARSWLFLRSQEYKKYQTNKTTGNTDKRAFVETWQSFYRKKLKEVWKPAV

SEQ ID NO: 48764 - protein, 978 aa, synthetic construct
  REGION 1..978: note = engineered CasX variant
QEIKRANKIRRRLVKDSNTKKAGKTGPMKTLLVRVMTPDLRERLENLRKKPENIPQPISNTSRANLNKLLTDYTEMKKAILHVYWEEFQKDPVGLMSRVAQPASKKIDQNKLKPEMDEKGNLTTAGFACSQCGQPLFVYKLEQVSEKGKAYTNYFGRCNVAEHEKLIQLAQLKPEKDSDEAVTYSLGKFGQRALDFYSIHVTKESTHPVKPLAQIAGNRYASGPVGKALRDACMGTIASFLSKYQDIIIEHQKVVKGNQKRLESLRELAGKENLEYPSVTLPPQPHTKEGVDAYNEVIARVRMWVNLNLWQKLKLSRDDAKPLLRLKGFPSFPLVERQANEVDWWDMVCNVKKLINEKKEDGKVFWQNLAGYKRQEALRPYLSSEEDRKKGKKFARYQLGDLLLHLEKKHGEDWGKVYDEAWERIDKKVEGLSKHIKLEEERRSEDAQSKAALTDWLRAKASFVIEGLKEADKDEFCRCELKLQKWYGDLRGKPFAIEAENSILDISGFSKQYNCAFIWQKDGVKKLNLYLIINYFKGGKLRFKKIKPEAFEANRFYTVINKKSGEIVPMEVNFNFDDPNLIILPLAFGKRQGREFIWNDLLSLETGSLKLANGRVIEKTLYNRRTRQDEPALFVALTFERREVLDSSNIKPMNLIGVDRGENIPAVIALTDPEGCPLSRFKDSLGNPTHILRIGESYKEKQRTIQAKKEVEQRRAGGYSRKYASKAKNLADDMVRNTARDLLYYAVTQDAMLIFENLSRGFGRQGKRTFMAERQYTRMEDWLTAKLAYEGLPSKTYLSKTLAQYTSKTCSNCGFTITSADYDRVLEKLKKTATGWMTTINGKELKVEGQITYYNRYKRQNVVKDLSVELDRLSEESVNNDISSWTKGRSGEALSLLKKRFSHRPVQEKFVCLNCGFETHADEQAALNIARSWLFLRSQEYKKYQTNKTTGNTDKRAFVETWQSFYRKKLKEVWKPAV

SEQ ID NO: 48765 - protein, 978 aa, synthetic construct
  REGION 1..978: note = engineered CasX variant
QEIKRANKIRRRLVKDSNTKKAGKTGPMKTLLVRVMTPDLRERLENLRKKPENIPQPISNTSRANLNKLLTDYTEMKKAILHVYWEEFQKDPVGLMSRVAQPASKKIDQNKLKPEMDEKGNLTTAGFACSQCGQPLFVYKLEQVSEKGKAYTNYFGRCNVAEHEKLILLAQLKPEKDSDEAVTYSLGKFGQRALDFYSIHVTKESTHPVKPLAQIAGNRYASGPVGKALRDACMGTIASFLSKYQDIIIEHQKVVKGNQKRLESLRELAGKENLEYPSVTLPPQPHTKEGVDAYNEVIARVRMWVNLNLWQKLKLSRDDAKPLLRLKGFPSFPLVERQANEVDWWDMVCNVKKLINEKKEDGKVFWQNLAIYKRQEALRPYLSSEEDRKKGKKFARYQLGDLLLHLEKKHGEDWGKVYDEAWERIDKKVEGLSKHIKLEEERRSEDAQSKAALTDWLRAKASFVIEGLKEADKDEFCRCELKLQKWYGDLRGKPFAIEAENSILDISGFSKQYNCAFIWQKDGVKKLNLYLIINYFKGGKLRFKKIKPEAFEANRFYTVINKKSGEIVPMEVNFNFDDPNLIILPLAFGKRQGREFIWNDLLSLETGSLKLANGRVIEKTLYNRRTRQDEPALFVALTFERREVLDSSNIKPMNLIGVDRGENIPAVIALTDPEGCPLSRFKDSLGNPTHILRIGESYKEKQRTIQAKKEVEQRRAGGYSRKYASKAKNLADDMVRNTARDLLYYAVTQDAMLIFENLSRGFGRQGKRTFMAERQYTRMEDWLTAKLAYEGLPSKTYLSKTLAQYTSKTCSNCGFTITSADYDRVLEKLKKTATGWMTTINGKELKVEGQITYYNRYKRQNVVKDLSVELDRLSEESVNNDISSWTKGRSGEALSLLKKRFSHRPVQEKFVCLNCGFETHADEQAALNIARSWLFLRSQEYKKYQTNKTTGNTDKRAFVETWQSFYRKKLKEVWKPAV

SEQ ID NO: 48766 - protein, 978 aa, synthetic construct
  REGION 1..978: note = engineered CasX variant
QEIKRANKIRRRLVKDSNTKKAGKTGPMKTLLVRVMTPDLRERLENLRKKPENIPQPISNTSRANLNKLLTDYTEMKKAILHVYWEEFQKDPVGLMSRVAQPASKKIDQNKLKPEMDEKGNLTTAGFACSQCGQPLFVYKLEQVSEKGKAYTNYFGRCNVAEHEKLILLAQLKPEKDSDEAVTYSLGKFGQRALDFYSIHVTKESTHPVKPLAQIAGNRYASGPVGKALRDACMGTIASFLSKYQDIIIEHQKVVKGNQKRLESLRELAGKENLEYPSVTLPPQPHTKEGVDAYNEVIARVRMWVNLNLWQKLKLSRDDAKPLLRLKGFPSFPLVERQANEVDWWDMVCNVKKLINEKKEDGKVFWQNLAGYKRQEALRPYLSSEEDREKGKKFARYQLGDLLLHLEKKHGEDWGKVYDEAWERIDKKVEGLSKHIKLEEERRSEDAQSKAALTDWLRAKASFVIEGLKEADKDEFCRCELKLQKWYGDLRGKPFAIEAENSILDISGFSKQYNCAFIWQKDGVKKLNLYLIINYFKGGKLRFKKIKPEAFEANRFYTVINKKSGEIVPMEVNFNFDDPNLIILPLAFGKRQGREFIWNDLLSLETGSLKLANGRVIEKTLYNRRTRQDEPALFVALTFERREVLDSSNIKPMNLIGVDRGENIPAVIALTDPEGCPLSRFKDSLGNPTHILRIGESYKEKQRTIQAKKEVEQRRAGGYSRKYASKAKNLADDMVRNTARDLLYYAVTQDAMLIFENLSRGFGRQGKRTFMAERQYTRMEDWLTAKLAYEGLPSKTYLSKTLAQYTSKTCSNCGFTITSADYDRVLEKLKKTATGWMTTINGKELKVEGQITYYNRYKRQNVVKDLSVELDRLSEESVNNDISSWTKGRSGEALSLLKKRFSHRPVQEKFVCLNCGFETHADEQAALNIARSWLFLRSQEYKKYQTNKTTGNTDKRAFVETWQSFYRKKLKEVWKPAV

SEQ ID NO: 48767 - protein, 978 aa, synthetic construct
  REGION 1..978: note = engineered CasX variant
QEIKRANKIRRRLVKDSNTKKAGKTGPMKTLLVRVMTPDLRERLENLRKKPENIPQPISNTSRANLNKLLTDYTEMKKAILHVYWEEFQKDPVGLMSRVAQPASKKIDQNKLKPEMDEKGNLTTAGFACSQCGQPLFVYKLEQVSEKGKAYTNYFGRCNVAEHEKLILLAQLKPEKDSDEAVTYSLGKFGQRALDFYSIHVTKESTHPVKPLAQIAGNRYASGPVGKALRDACMGTIASFLSKYQDIIIEHQKVVKGNQKRLESLRELAGKENLEYPSVTLPPQPHTKEGVDAYNEVIARVRMWVNLNLWQKLKLSRDDAKPLLRLKGFPSFPLVERQANEVDWWDMVCNVKKLINEKKEDGKVFWQNLAGYKRQEALRPYLSSEEDRKKGKKFARYQLGDLLLHLEKKHGEDWGKVYDEAWERIDKKVEGLSKHIKLEEERRSEDAQSKAALTDWLRAKASFVIEGLKEADKDEFCRCELKLQKWYGDLRGKPFAIEAENSILDISGFSKQYNCAFIWQKDGVKKLNLYLIINYFKGGKLRFKKIKPEAFEANRFYTVINKKSGEIVIMEVNFNFDDPNLIILPLAFGKRQGREFIWNDLLSLETGSLKLANGRVIEKTLYNRRTRQDEPALFVALTFERREVLDSSNIKPMNLIGVDRGENIPAVIALTDPEGCPLSRFKDSLGNPTHILRIGESYKEKQRTIQAKKEVEQRRAGGYSRKYASKAKNLADDMVRNTARDLLYYAVTQDAMLIFENLSRGFGRQGKRTFMAERQYTRMEDWLTAKLAYEGLPSKTYLSKTLAQYTSKTCSNCGFTITSADYDRVLEKLKKTATGWMTTINGKELKVEGQITYYNRYKRQNVVKDLSVELDRLSEESVNNDISSWTKGRSGEALSLLKKRFSHRPVQEKFVCLNCGFETHADEQAALNIARSWLFLRSQEYKKYQTNKTTGNTDKRAFVETWQSFYRKKLKEVWKPAV

SEQ ID NO: 48768 - protein, 978 aa, synthetic construct
  REGION 1..978: note = engineered CasX variant
QEIKRISKIRRRLVKDSNTKKAGKTGPMKTLLVRVMTPDLRERLENLRKKPENIPQPISNTSRANLNKLLTDYTEMKKAILHVYWEEFQKDPVGLMSRVAQPASKKIDQNKLKPEMDEKGNLTTAGFACSQCGQPLFVYKLEQVSEKGKAYTNYFGRCNVAEHEKLILLAQLKPEKDSDEAVTYSLGKFGQRALDFYSIHVTKESTHPVKPLAQIAGNRYASGPVGKALRGACMGTIASFLSKYQDIIIEHQKVVKGNQKRLESLRELAGKENLEYPSVTLPPQPHTKEGVDAYNEVIARVRMWVNLNLWQKLKLSRDDAKPLLRLKGFPSFPLVERQANEVDWWDMVCNVKKLINEKKEDGKVFWQNLAGYKRQEALRPYLSSEEDRKKGKKFARYQLGDLLLHLEKKHGEDWGKVYDEAWERIDKKVEGLSKHIKLEEERRSEDAQSKAALTDWLRAKASFVIEGLKEADKDEFCRCELKLQKWYGDLRGKPFAIEAENSILDISGFSKQYNCAFIWQKDGVKKLNLYLIINYFKGGKLRFKKIKPEAFEANRFYTVINKKSGEIVPMEVNFNFDDPNLIILPLAFGKRQGREFIWNDLLSLETGSLKLANGRVIEKTLYNRRTRQDEPALFVALTFERREVLDSSNIKPMNLIGVDRGENIPAVIALTDPEGCPLSRFKDSLGNPTHILRIGESYKEKQRTIQAKKEVEQRRAGGYSRKYASKAKNLADDMVRNTARDLLYYAVTQDAMLIFENLSRGFGRQGKRTFMAERQYTRMEDWLTAKLAYEGLPSKTYLSKTLAQYTSKTCSNCGFTITSADYDRVLEKLKKTATGWMTTINGKELKVEGQITYYNRYKRQNVVKDLSVELDRLSEESVNNDISSWTKGRSGEALSLLKKRFSHRPVQEKFVCLNCGFETHADEQAALNIARSWLFLRSQEYKKYQTNKTTGNTDKRAFVETWQSFYRKKLKEVWKPAV

SEQ ID NO: 48769 - protein, 978 aa, synthetic construct
  REGION 1..978: note = engineered CasX variant
QEIKRISKIRRRLVKDSNTKKAGKTGPMKTLLVRVMTPDLRERLENLRKKPENIPQPISNTSRANLNKLLTDYTEMKKAILHVYWEEFQKDPVGLMSRVAQPASKKIDQNKLKPEMDEKGNLTTAGFACSQCGQPLFVYKLEQVSEKGKAYTNYFGRCNVAEHEKLILLAQLKPEKDSDEAVTYSLGKFGQRALDFYSIHVTKESTHPVKPLAQIAGNRYASGPVGKALRDACMGTIASFLSKYQDIIIEHQKVVKGNQKRLESLRELAGKENLEYPSVTLPPQPHTKEGVDAYNEVIARVRMWVNLNLWQKLKLSRDDAKPLLRLKNFPSFPLVERQANEVDWWDMVCNVKKLINEKKEDGKVFWQNLAGYKRQEALRPYLSSEEDRKKGKKFARYQLGDLLLHLEKKHGEDWGKVYDEAWERIDKKVEGLSKHIKLEEERRSEDAQSKAALTDWLRAKASFVIEGLKEADKDEFCRCELKLQKWYGDLRGKPFAIEAENSILDISGFSKQYNCAFIWQKDGVKKLNLYLIINYFKGGKLRFKKIKPEAFEANRFYTVINKKSGEIVPMEVNFNFDDPNLIILPLAFGKRQGREFIWNDLLSLETGSLKLANGRVIEKTLYNRRTRQDEPALFVALTFERREVLDSSNIKPMNLIGVDRGENIPAVIALTDPEGCPLSRFKDSLGNPTHILRIGESYKEKQRTIQAKKEVEQRRAGGYSRKYASKAKNLADDMVRNTARDLLYYAVTQDAMLIFENLSRGFGRQGKRTFMAERQYTRMEDWLTAKLAYEGLPSKTYLSKTLAQYTSKTCSNCGFTITSADYDRVLEKLKKTATGWMTTINGKELKVEGQITYYNRYKRQNVVKDLSVELDRLSEESVNNDISSWTKGRSGEALSLLKKRFSHRPVQEKFVCLNCGFETHADEQAALNIARSWLFLRSQEYKKYQTNKTTGNTDKRAFVETWQSFYRKKLKEVWKPAV

SEQ ID NO: 48770 - protein, 978 aa, synthetic construct
  REGION 1..978: note = engineered CasX variant
QEIKRISKIRRRLVKDSNTKKAGKTGPMKTLLVRVMTPDLRERLENLRKKPENIPQPISNTSRANLNKLLTDYTEMKKAILHVYWEEFQKDPVGLMSRVAQPASKKIDQNKLKPEMDEKGNLTTAGFACSQCGQPLFVYKLEQVSEKGKAYTNYFGRCNVAEHEKLILLAQLKPEKDSDEAVTYSLGKFGQRALDFYSIHVTKESTHPVKPLAQIAGNRYASGPVGKALRDACMGTIASFLSKYQDIIIEHQKVVKGNQKRLESLRELAGKENLEYPSVTLPPQPHTKEGVDAYNEVIARVRMWVNLNLWQKLKLSRDDAKPLLRLKGFPSFPLVERQANEVDWWDMVCNVKKLINEKKEDGKVFWQNLAGYKRQEALRPYLSSEEDRKKGKKFARYQLGDLLNHLEKKHGEDWGKVYDEAWERIDKKVEGLSKHIKLEEERRSEDAQSKAALTDWLRAKASFVIEGLKEADKDEFCRCELKLQKWYGDLRGKPFAIEAENSILDISGFSKQYNCAFIWQKDGVKKLNLYLIINYFKGGKLRFKKIKPEAFEANRFYTVINKKSGEIVPMEVNFNFDDPNLIILPLAFGKRQGREFIWNDLLSLETGSLKLANGRVIEKTLYNRRTRQDEPALFVALTFERREVLDSSNIKPMNLIGVDRGENIPAVIALTDPEGCPLSRFKDSLGNPTHILRIGESYKEKQRTIQAKKEVEQRRAGGYSRKYASKAKNLADDMVRNTARDLLYYAVTQDAMLIFENLSRGFGRQGKRTFMAERQYTRMEDWLTAKLAYEGLPSKTYLSKTLAQYTSKTCSNCGFTITSADYDRVLEKLKKTATGWMTTINGKELKVEGQITYYNRYKRQNVVKDLSVELDRLSEESVNNDISSWTKGRSGEALSLLKKRFSHRPVQEKFVCLNCGFETHADEQAALNIARSWLFLRSQEYKKYQTNKTTGNTDKRAFVETWQSFYRKKLKEVWKPAV

SEQ ID NO: 48771 - protein, 978 aa, synthetic construct
  REGION 1..978: note = engineered CasX variant
QEIKRISKIRRRLVKDSNTKKAGKTGPMKTLLVRVMTPDLRERLENLRKKPENIPQPISNTSRANLNKLLTDYTEMKKAILHVYWEEFQKDPVGLMSRVAQPASKKIDQNKLKPEMDEKGNLTTAGFACSQCGQPLFVYKLEQVSEKGKAYTNYFGRCNVAEHEKLILLAQLKPEKDSDEAVTYSLGKFGQRALDFYSIHVTKESTHPVKPLAQIAGNRYASGPVGKALRDACMGTIASFLSKYQDIIIEHQKVVKGNQKRLESLRELAGKENLEYPSVTLPPQPHTKEGVDAYNEVIARVRMWVNLNLWQKLKLSRDDAKPLLRLKGFPSFPLVERQANEVDWWDMVCNVKKLINEKKEDGKVFWQNLAGYKRQEALRPYLSSEEDRKKGKKFARYQLGDLLWHLEKKHGEDWGKVYDEAWERIDKKVEGLSKHIKLEEERRSEDAQSKAALTDWLRAKASFVIEGLKEADKDEFCRCELKLQKWYGDLRGKPFAIEAENSILDISGFSKQYNCAFIWQKDGVKKLNLYLIINYFKGGKLRFKKIKPEAFEANRFYTVINKKSGEIVPMEVNFNFDDPNLIILPLAFGKRQGREFIWNDLLSLETGSLKLANGRVIEKTLYNRRTRQDEPALFVALTFERREVLDSSNIKPMNLIGVDRGENIPAVIALTDPEGCPLSRFKDSLGNPTHILRIGESYKEKQRTIQAKKEVEQRRAGGYSRKYASKAKNLADDMVRNTARDLLYYAVTQDAMLIFENLSRGFGRQGKRTFMAERQYTRMEDWLTAKLAYEGLPSKTYLSKTLAQYTSKTCSNCGFTITSADYDRVLEKLKKTATGWMTTINGKELKVEGQITYYNRYKRQNVVKDLSVELDRLSEESVNNDISSWTKGRSGEALSLLKKRFSHRPVQEKFVCLNCGFETHADEQAALNIARSWLFLRSQEYKKYQTNKTTGNTDKRAFVETWQSFYRKKLKEVWKPAV

SEQ ID NO: 48772 - protein, 978 aa, synthetic construct
  REGION 1..978: note = engineered CasX variant
QEIKRISKIRRRLVKDSNTKKAGKTGPMKTLLVRVMTPDLRERLENLRKKPENIPQPISNTSRANLNKLLTDYTEMKKAILHVYWEEFQKDPVGLMSRVAQPASKKIDQNKLKPEMDEKGNLTTAGFACSQCGQPLFVYKLEQVSEKGKAYTNYFGRCNVAEHEKLILLAQLKPEKDSDEAVTYSLGKFGQRALDFYSIHVTKESTHPVKPLAQIAGNRYASGPVGKALRDACMGTIASFLSKYQDIIIEHQKVVKGNQKRLESLRELAGKENLEYPSVTLPPQPHTKEGVDAYNEVIARVRMWVNLNLWQKLKLSRDDAKPLLRLKGFPSFPLVERQANEVDWWDMVCNVKKLINEKKEDGKVFWQNLAGYKRQEALRPYLSSEEDRKKGKKFARYQLGDLLLHLYKKHGEDWGKVYDEAWERIDKKVEGLSKHIKLEEERRSEDAQSKAALTDWLRAKASFVIEGLKEADKDEFCRCELKLQKWYGDLRGKPFAIEAENSILDISGFSKQYNCAFIWQKDGVKKLNLYLIINYFKGGKLRFKKIKPEAFEANRFYTVINKKSGEIVPMEVNFNFDDPNLIILPLAFGKRQGREFIWNDLLSLETGSLKLANGRVIEKTLYNRRTRQDEPALFVALTFERREVLDSSNIKPMNLIGVDRGENIPAVIALTDPEGCPLSRFKDSLGNPTHILRIGESYKEKQRTIQAKKEVEQRRAGGYSRKYASKAKNLADDMVRNTARDLLYYAVTQDAMLIFENLSRGFGRQGKRTFMAERQYTRMEDWLTAKLAYEGLPSKTYLSKTLAQYTSKTCSNCGFTITSADYDRVLEKLKKTATGWMTTINGKELKVEGQITYYNRYKRQNVVKDLSVELDRLSEESVNNDISSWTKGRSGEALSLLKKRFSHRPVQEKFVCLNCGFETHADEQAALNIARSWLFLRSQEYKKYQTNKTTGNTDKRAFVETWQSFYRKKLKEVWKPAV

SEQ ID NO: 48773 - protein, 978 aa, synthetic construct
  REGION 1..978: note = engineered CasX variant
QEIKRISKIRRRLVKDSNTKKAGKTGPMKTLLVRVMTPDLRERLENLRKKPENIPQPISNTSRANLNKLLTDYTEMKKAILHVYWEEFQKDPVGLMSRVAQPASKKIDQNKLKPEMDEKGNLTTAGFACSQCGQPLFVYKLEQVSEKGKAYTNYFGRCNVAEHEKLILLAQLKPEKDSDEAVTYSLGKFGQRALDFYSIHVTKESTHPVKPLAQIAGNRYASGPVGKALRDACMGTIASFLSKYQDIIIEHQKVVKGNQKRLESLRELAGKENLEYPSVTLPPQPHTKEGVDAYNEVIARVRMWVNLNLWQKLKLSRDDAKPLLRLKGFPSFPLVERQANEVDWWDMVCNVKKLINEKKEDGKVFWQNLAGYKRQEALRPYLSSEEDRKKGKKFARYQLGDLLLHLEKKHPEDWGKVYDEAWERIDKKVEGLSKHIKLEEERRSEDAQSKAALTDWLRAKASFVIEGLKEADKDEFCRCELKLQKWYGDLRGKPFAIEAENSILDISGFSKQYNCAFIWQKDGVKKLNLYLIINYFKGGKLRFKKIKPEAFEANRFYTVINKKSGEIVPMEVNFNFDDPNLIILPLAFGKRQGREFIWNDLLSLETGSLKLANGRVIEKTLYNRRTRQDEPALFVALTFERREVLDSSNIKPMNLIGVDRGENIPAVIALTDPEGCPLSRFKDSLGNPTHILRIGESYKEKQRTIQAKKEVEQRRAGGYSRKYASKAKNLADDMVRNTARDLLYYAVTQDAMLIFENLSRGFGRQGKRTFMAERQYTRMEDWLTAKLAYEGLPSKTYLSKTLAQYTSKTCSNCGFTITSADYDRVLEKLKKTATGWMTTINGKELKVEGQITYYNRYKRQNVVKDLSVELDRLSEESVNNDISSWTKGRSGEALSLLKKRFSHRPVQEKFVCLNCGFETHADEQAALNIARSWLFLRSQEYKKYQTNKTTGNTDKRAFVETWQSFYRKKLKEVWKPAV

SEQ ID NO: 48774 - protein, 979 aa, synthetic construct
  REGION 1..979: note = engineered CasX variant
QEIKRISKIRRRLVKDSNTKKAGKTGPMKTLLVRVMTPDLRERLENLRKKPENIPQPISNTSRANLNKLLTDYTEMKKAILHVYWEEFQKDPVGLMSRVAQPASKKIDQNKLKPEMDEKGNLTTAGFACSQCGQPLFVYKLEQVSEKGKAYTNYFGRCNVAEHEKLILLAQLKPEKDSDEAVTYSLGKFGQRALDFYSIHVTKESTHPVKPLAQIAGNRYASGPVGKALRDACMGTIASFLSKYQDIIIEHQKVVKGNQKRLESLRELAGKENLEYPSVTLPPQPHTKEGVDAYNEVIARVRMWVNLNLWQKLKLSRDDAKPLLRLKGFPSFPLVERQANEVDWWDMVCNVKKLINEKKEDGKVFWQNLAGYKRQEALRPYLSSEEDRKKGKKFARYQLGDLLLHLEKKHGERDWGKVYDEAWERIDKKVEGLSKHIKLEEERRSEDAQSKAALTDWLRAKASFVIEGLKEADKDEFCRCELKLQKWYGDLRGKPFAIEAENSILDISGFSKQYNCAFIWQKDGVKKLNLYLIINYFKGGKLRFKKIKPEAFEANRFYTVINKKSGEIVPMEVNFNFDDPNLIILPLAFGKRQGREFIWNDLLSLETGSLKLANGRVIEKTLYNRRTRQDEPALFVALTFERREVLDSSNIKPMNLIGVDRGENIPAVIALTDPEGCPLSRFKDSLGNPTHILRIGESYKEKQRTIQAKKEVEQRRAGGYSRKYASKAKNLADDMVRNTARDLLYYAVTQDAMLIFENLSRGFGRQGKRTFMAERQYTRMEDWLTAKLAYEGLPSKTYLSKTLAQYTSKTCSNCGFTITSADYDRVLEKLKKTATGWMTTINGKELKVEGQITYYNRYKRQNVVKDLSVELDRLSEESVNNDISSWTKGRSGEALSLLKKRFSHRPVQEKFVCLNCGFETHADEQAALNIARSWLFLRSQEYKKYQTNKTTGNTDKRAFVETWQSFYRKKLKEVWKPAV

SEQ ID NO: 48775 - protein, 979 aa, synthetic construct
  REGION 1..979: note = engineered CasX variant
QEIKRISKIRRRLVKDSNTKKAGKTGPMKTLLVRVMTPDLRERLENLRKKPENIPQPISNTSRANLNKLLTDYTEMKKAILHVYWEEFQKDPVGLMSRVAQPASKKIDQNKLKPEMDEKGNLTTAGFACSQCGQPLFVYKLEQVSEKGKAYTNYFGRCNVAEHEKLILLAQLKPEKDSDEAVTYSLGKFGQRALDFYSIHVTKESTHPVKPLAQIAGNRYASGPVGKALRDACMGTIASFLSKYQDIIIEHQKVVKGNQKRLESLRELAGKENLEYPSVTLPPQPHTKEGVDAYNEVIARVRMWVNLNLWQKLKLSRDDAKPLLRLKGFPSFPLVERQANEVDWWDMVCNVKKLINEKKEDGKVFWQNLAGYKRQEALRPYLSSEEDRKKGKKFARYQLGDLLLHLEKKHGEYDWGKVYDEAWERIDKKVEGLSKHIKLEEERRSEDAQSKAALTDWLRAKASFVIEGLKEADKDEFCRCELKLQKWYGDLRGKPFAIEAENSILDISGFSKQYNCAFIWQKDGVKKLNLYLIINYFKGGKLRFKKIKPEAFEANRFYTVINKKSGEIVPMEVNFNFDDPNLIILPLAFGKRQGREFIWNDLLSLETGSLKLANGRVIEKTLYNRRTRQDEPALFVALTFERREVLDSSNIKPMNLIGVDRGENIPAVIALTDPEGCPLSRFKDSLGNPTHILRIGESYKEKQRTIQAKKEVEQRRAGGYSRKYASKAKNLADDMVRNTARDLLYYAVTQDAMLIFENLSRGFGRQGKRTFMAERQYTRMEDWLTAKLAYEGLPSKTYLSKTLAQYTSKTCSNCGFTITSADYDRVLEKLKKTATGWMTTINGKELKVEGQITYYNRYKRQNVVKDLSVELDRLSEESVNNDISSWTKGRSGEALSLLKKRFSHRPVQEKFVCLNCGFETHADEQAALNIARSWLFLRSQEYKKYQTNKTTGNTDKRAFVETWQSFYRKKLKEVWKPAV

SEQ ID NO: 48776 - protein, 978 aa, synthetic construct
  REGION 1..978: note = engineered CasX variant
QEIKRISKIRRRLVKDSNTKKAGKTGPMKTLLVRVMTPDLRERLENLRKKPENIPQPISNTSRANLNKLLTDYTEMKKAILHVYWEEFQKDPVGLMSRVAQPASKKIDQNKLKPEMDEKGNLTTAGFACSQCGQPLFVYKLEQVSEKGKAYTNYFGRCNVAEHEKLILLAQLKPEKDSDEAVTYSLGKFGQRALDFYSIHVTKESTHPVKPLAQIAGNRYASGPVGKALRDACMGTIASFLSKYQDIIIEHQKVVKGNQKRLESLRELAGKENLEYPSVTLPPQPHTKEGVDAYNEVIARVRMWVNLNLWQKLKLSRDDAKPLLRLKGFPSFPLVERQANEVDWWDMVCNVKKLINEKKEDGKVFWQNLAGYKRQEALRPYLSSEEDRKKGKKFARYQLGDLLLHLEKKHGEDWGDVYDEAWERIDKKVEGLSKHIKLEEERRSEDAQSKAALTDWLRAKASFVIEGLKEADKDEFCRCELKLQKWYGDLRGKPFAIEAENSILDISGFSKQYNCAFIWQKDGVKKLNLYLIINYFKGGKLRFKKIKPEAFEANRFYTVINKKSGEIVPMEVNFNFDDPNLIILPLAFGKRQGREFIWNDLLSLETGSLKLANGRVIEKTLYNRRTRQDEPALFVALTFERREVLDSSNIKPMNLIGVDRGENIPAVIALTDPEGCPLSRFKDSLGNPTHILRIGESYKEKQRTIQAKKEVEQRRAGGYSRKYASKAKNLADDMVRNTARDLLYYAVTQDAMLIFENLSRGFGRQGKRTFMAERQYTRMEDWLTAKLAYEGLPSKTYLSKTLAQYTSKTCSNCGFTITSADYDRVLEKLKKTATGWMTTINGKELKVEGQITYYNRYKRQNVVKDLSVELDRLSEESVNNDISSWTKGRSGEALSLLKKRFSHRPVQEKFVCLNCGFETHADEQAALNIARSWLFLRSQEYKKYQTNKTTGNTDKRAFVETWQSFYRKKLKEVWKPAV

SEQ ID NO: 48777 - protein, 978 aa, synthetic construct
  REGION 1..978: note = engineered CasX variant
QEIKRISKIRRRLVKDSNTKKAGKTGPMKTLLVRVMTPDLRERLENLRKKPENIPQPISNTSRANLNKLLTDYTEMKKAILHVYWEEFQKDPVGLMSRVAQPASKKIDQNKLKPEMDEKGNLTTAGFACSQCGQPLFVYKLEQVSEKGKAYTNYFGRCNVAEHEKLILLAQLKPEKDSDEAVTYSLGKFGQRALDFYSIHVTKESTHPVKPLAQIAGNRYASGPVGKALRDACMGTIASFLSKYQDIIIEHQKVVKGNQKRLESLRELAGKENLEYPSVTLPPQPHTKEGVDAYNEVIARVRMWVNLNLWQKLKLSRDDAKPLLRLKGFPSFPLVERQANEVDWWDMVCNVKKLINEKKEDGKVFWQNLAGYKRQEALRPYLSSEEDRKKGKKFARYQLGDLLLHLEKKHGEDWGKVYGEAWERIDKKVEGLSKHIKLEEERRSEDAQSKAALTDWLRAKASFVIEGLKEADKDEFCRCELKLQKWYGDLRGKPFAIEAENSILDISGFSKQYNCAFIWQKDGVKKLNLYLIINYFKGGKLRFKKIKPEAFEANRFYTVINKKSGEIVPMEVNFNFDDPNLIILPLAFGKRQGREFIWNDLLSLETGSLKLANGRVIEKTLYNRRTRQDEPALFVALTFERREVLDSSNIKPMNLIGVDRGENIPAVIALTDPEGCPLSRFKDSLGNPTHILRIGESYKEKQRTIQAKKEVEQRRAGGYSRKYASKAKNLADDMVRNTARDLLYYAVTQDAMLIFENLSRGFGRQGKRTFMAERQYTRMEDWLTAKLAYEGLPSKTYLSKTLAQYTSKTCSNCGFTITSADYDRVLEKLKKTATGWMTTINGKELKVEGQITYYNRYKRQNVVKDLSVELDRLSEESVNNDISSWTKGRSGEALSLLKKRFSHRPVQEKFVCLNCGFETHADEQAALNIARSWLFLRSQEYKKYQTNKTTGNTDKRAFVETWQSFYRKKLKEVWKPAV

SEQ ID NO: 48778 - protein, 978 aa, synthetic construct
  REGION 1..978: note = engineered CasX variant
QEIKRISKIRRRLVKDSNTKKAGKTGPMKTLLVRVMTPDLRERLENLRKKPENIPQPISNTSRANLNKLLTDYTEMKKAILHVYWEEFQKDPVGLMSRVAQPASKKIDQNKLKPEMDEKGNLTTAGFACSQCGQPLFVYKLEQVSEKGKAYTNYFGRCNVAEHEKLILLAQLKPEKDSDEAVTYSLGKFGQRALDFYSIHVTKESTHPVKPLAQIAGNRYASGPVGKALRDACMGTIASFLSKYQDIIIEHQKVVKGNQKRLESLRELAGKENLEYPSVTLPPQPHTKEGVDAYNEVIARVRMWVNLNLWQKLKLSRDDAKPLLRLKGFPSFPLVERQANEVDWWDMVCNVKKLINEKKEDGKVFWQNLAGYKRQEALRPYLSSEEDRKKGKKFARYQLGDLLLHLEKKHGEDWGKVYDEAWERIDKKVEGLSKHIKLEEERRSEDAQSKAALTDWLRAKASFVIEGKKEADKDEFCRCELKLQKWYGDLRGKPFAIEAENSILDISGFSKQYNCAFIWQKDGVKKLNLYLIINYFKGGKLRFKKIKPEAFEANRFYTVINKKSGEIVPMEVNFNFDDPNLIILPLAFGKRQGREFIWNDLLSLETGSLKLANGRVIEKTLYNRRTRQDEPALFVALTFERREVLDSSNIKPMNLIGVDRGENIPAVIALTDPEGCPLSRFKDSLGNPTHILRIGESYKEKQRTIQAKKEVEQRRAGGYSRKYASKAKNLADDMVRNTARDLLYYAVTQDAMLIFENLSRGFGRQGKRTFMAERQYTRMEDWLTAKLAYEGLPSKTYLSKTLAQYTSKTCSNCGFTITSADYDRVLEKLKKTATGWMTTINGKELKVEGQITYYNRYKRQNVVKDLSVELDRLSEESVNNDISSWTKGRSGEALSLLKKRFSHRPVQEKFVCLNCGFETHADEQAALNIARSWLFLRSQEYKKYQTNKTTGNTDKRAFVETWQSFYRKKLKEVWKPAV

SEQ ID NO: 48779 - protein, 978 aa, synthetic construct
  REGION 1..978: note = engineered CasX variant
QEIKRISKIRRRLVKDSNTKKAGKTGPMKTLLVRVMTPDLRERLENLRKKPENIPQPISNTSRANLNKLLTDYTEMKKAILHVYWEEFQKDPVGLMSRVAQPASKKIDQNKLKPEMDEKGNLTTAGFACSQCGQPLFVYKLEQVSEKGKAYTNYFGRCNVAEHEKLILLAQLKPEKDSDEAVTYSLGKFGQRALDFYSIHVTKESTHPVKPLAQIAGNRYASGPVGKALRDACMGTIASFLSKYQDIIIEHQKVVKGNQKRLESLRELAGKENLEYPSVTLPPQPHTKEGVDAYNEVIARVRMWVNLNLWQKLKLSRDDAKPLLRLKGFPSFPLVERQANEVDWWDMVCNVKKLINEKKEDGKVFWQNLAGYKRQEALRPYLSSEEDRKKGKKFARYQLGDLLLHLEKKHGEDWGKVYDEAWERIDKKVEGLSKHIKLEEERRSEDAQSKAALTDWLRAKASFVIEGSKEADKDEFCRCELKLQKWYGDLRGKPFAIEAENSILDISGFSKQYNCAFIWQKDGVKKLNLYLIINYFKGGKLRFKKIKPEAFEANRFYTVINKKSGEIVPMEVNFNFDDPNLIILPLAFGKRQGREFIWNDLLSLETGSLKLANGRVIEKTLYNRRTRQDEPALFVALTFERREVLDSSNIKPMNLIGVDRGENIPAVIALTDPEGCPLSRFKDSLGNPTHILRIGESYKEKQRTIQAKKEVEQRRAGGYSRKYASKAKNLADDMVRNTARDLLYYAVTQDAMLIFENLSRGFGRQGKRTFMAERQYTRMEDWLTAKLAYEGLPSKTYLSKTLAQYTSKTCSNCGFTITSADYDRVLEKLKKTATGWMTTINGKELKVEGQITYYNRYKRQNVVKDLSVELDRLSEESVNNDISSWTKGRSGEALSLLKKRFSHRPVQEKFVCLNCGFETHADEQAALNIARSWLFLRSQEYKKYQTNKTTGNTDKRAFVETWQSFYRKKLKEVWKPAV

SEQ ID NO: 48780 - protein, 979 aa, synthetic construct
  REGION 1..979: note = engineered CasX variant
QEIKRISKIRRRLVKDSNTKKAGKTGPMKTLLVRVMTPDLRERLENLRKKPENIPQPISNTSRANLNKLLTDYTEMKKAILHVYWEEFQKDPVGLMSRVAQPASKKIDQNKLKPEMDEKGNLTTAGFACSQCGQPLFVYKLEQVSEKGKAYTNYFGRCNVAEHEKLILLAQLKPEKDSDEAVTYSLGKFGQRALDFYSIHVTKESTHPVKPLAQIAGNRYASGPVGKALRDACMGTIASFLSKYQDIIIEHQKVVKGNQKRLESLRELAGKENLEYPSVTLPPQPHTKEGVDAYNEVIARVRMWVNLNLWQKLKLSRDDAKPLLRLKGFPSFPLVERQANEVDWWDMVCNVKKLINEKKEDGKVFWQNLAGYKRQEALRPYLSSEEDRKKGKKFARYQLGDLLLHLEKKHGEDWGKVYDEAWERIDKKVEGLSKHIKLEEERRSEDAQSKAALTDWLRAKASFVIEGLKEADDKDEFCRCELKLQKWYGDLRGKPFAIEAENSILDISGFSKQYNCAFIWQKDGVKKLNLYLIINYFKGGKLRFKKIKPEAFEANRFYTVINKKSGEIVPMEVNFNFDDPNLIILPLAFGKRQGREFIWNDLLSLETGSLKLANGRVIEKTLYNRRTRQDEPALFVALTFERREVLDSSNIKPMNLIGVDRGENIPAVIALTDPEGCPLSRFKDSLGNPTHILRIGESYKEKQRTIQAKKEVEQRRAGGYSRKYASKAKNLADDMVRNTARDLLYYAVTQDAMLIFENLSRGFGRQGKRTFMAERQYTRMEDWLTAKLAYEGLPSKTYLSKTLAQYTSKTCSNCGFTITSADYDRVLEKLKKTATGWMTTINGKELKVEGQITYYNRYKRQNVVKDLSVELDRLSEESVNNDISSWTKGRSGEALSLLKKRFSHRPVQEKFVCLNCGFETHADEQAALNIARSWLFLRSQEYKKYQTNKTTGNTDKRAFVETWQSFYRKKLKEVWKPAV

SEQ ID NO: 48781 - protein, 979 aa, synthetic construct
  REGION 1..979: note = engineered CasX variant
QEIKRISKIRRRLVKDSNTKKAGKTGPMKTLLVRVMTPDLRERLENLRKKPENIPQPISNTSRANLNKLLTDYTEMKKAILHVYWEEFQKDPVGLMSRVAQPASKKIDQNKLKPEMDEKGNLTTAGFACSQCGQPLFVYKLEQVSEKGKAYTNYFGRCNVAEHEKLILLAQLKPEKDSDEAVTYSLGKFGQRALDFYSIHVTKESTHPVKPLAQIAGNRYASGPVGKALRDACMGTIASFLSKYQDIIIEHQKVVKGNQKRLESLRELAGKENLEYPSVTLPPQPHTKEGVDAYNEVIARVRMWVNLNLWQKLKLSRDDAKPLLRLKGFPSFPLVERQANEVDWWDMVCNVKKLINEKKEDGKVFWQNLAGYKRQEALRPYLSSEEDRKKGKKFARYQLGDLLLHLEKKHGEDWGKVYDEAWERIDKKVEGLSKHIKLEEERRSEDAQSKAALTDWLRAKASFVIEGLKEADKDEFCRCELKLQKWYGDLRGKPFAIEAENSILDISGFSKQYNCAFIWQKDGVKKLNLYLIINYFKGGKLRFKKIKPEAFEANRFYTVINKKSGEIVPMEVNFNFDDPNLIILPLAFGKRQGREFIWNDLLSLETGSLKLANGRVIEKTLYNRRTRQDEPALFVALTFERREVLDSSNIKPMNLIGVDRGENIPAVIALTDPEGCPLSRFKDSLGNPTHILRIGESYKEKQRTIQAKKEVEQRRAGGYSRKYASKAKNLADDMVRNTARDLLYYAVTQDAMLIFENLSRGFGRQGKRTFMAERQYTRMEDWLTAKLAYEGLPSKTYLSKTLAQYTSKTCSNCGFTITSADYDRVLEKLKKTATGWMTTINGKELKVEGQITYYNRYKRQNVVKDLSVELDRLSEESVNNDISSWTKGRSGNEALSLLKKRFSHRPVQEKFVCLNCGFETHADEQAALNIARSWLFLRSQEYKKYQTNKTTGNTDKRAFVETWQSFYRKKLKEVWKPAV

SEQ ID NO: 48782 - protein, 978 aa, synthetic construct
  REGION 1..978: note = engineered CasX variant
QEIKRISKIRRRLVKDSNTKKAGKTGPMKTLLVRVMTPDLRERLENLRKKPENIPQPISNTSRANLNKLLTDYTEMKKAILHVYWEEFQKDPVGLMSRVAQPASKKIDQNKLKPEMDEKGNLTTAGFACSQCGQPLFVYKLEQVSEKGKAYTNYFGRCNVAEHEKLILLAQLKPEKDSDEAVTYSLGKFGQRALDFYSIHVTKESTHPVKPLAQIAGNRYASGPVGKALRDACMGTIASFLSKYQDIIIEHQKVVKGNQKRLESLRELAGKENLEYPSVTLPPQPHTKEGVDAYNEVIARVRMWVNLNLWQKLKLSRDDAKPLLRLKGFPSFPLVERQANEVDWWDMVCNVKKLINEKKEDGKVFWQNLAGYKRQEALRPYLSSEEDRQKGKKFARYQLGDLLLHLEKKHGEDWGKVYDEAWERIDKKVEGLSKHIKLEEERRSEDAQSKAALTDWLRAKASFVIEGLKEADKDEFCRCELKLQKWYGDLRGKPFAIEAENSILDISGFSKQYNCAFIWQKDGVKKLNLYLIINYFKGGKLRFKKIKPEAFEANRFYTVINKKSGEIVPMEVNFNFDDPNLIILPLAFGKRQGREFIWNDLLSLETGSLKLANGRVIEKTLYNRRTRQDEPALFVALTFERREVLDSSNIKPMNLIGVDRGENIPAVIALTDPEGCPLSRFKDSLGNPTHILRIGESYKEKQRTIQAKKEVEQRRAGGYSRKYASKAKNLADDMVRNTARDLLYYAVTQDAMLIFENLSRGFGRQGKRTFMAERQYTRMEDWLTAKLAYEGLPSKTYLSKTLAQYTSKTCSNCGFTITSADYDRVLEKLKKTATGWMTTINGKELKVEGQITYYNRYKRQNVVKDLSVELDRLSEESVNNDISSWTKGRSGEALSLLKKRFSHRPVQEKFVCLNCGFETHADEQAALNIARSWLFLRSQEYKKYQTNKTTGNTDKRAFVETWQSFYRKKLKEVWKPAV

SEQ ID NO: 48783 - protein, 978 aa, synthetic construct
  REGION 1..978: note = engineered CasX variant
QEIKRISKIRRRLVKDSNTKKAGKTGPMKTLLVRVMTPDLRERLENLRKKPENIPQPISNTSRANLNKLLTDYTEMKKAILHVYWEEFQKDPVGLMSRVAQPASKKIDQNKLKPEMDEKGNLTTAGFACSQCGQPLFVYKLEQVSEKGKAYTNYFGRCNVAEHEKLILLAQLKPEKDSDEAVTYSLGKFGQRALDFYSIHVTKESTHPVKPLAQIAGNRYASGPVGKALRDACMGTIASFLSKYQDIIIEHQKVVKGNQKRLESLRELAGKENLEYPSVTLPPQPHTKEGVDAYNEVIARVRMWVNLNLWQKLKLSRDDAKPLLRLKGFPSFPLVERQANEVDWWDMVCNVKKLINEKKEDGKVFWQNLAGYKRQEALRPYLSSEEDRKKGKKFARYQLGDLLLHLEKKHGEDWGKVYDEAWERIDKKVEGLSKHIKLEEERRSEDAQSKAALTDWLRAKASFVIEGLKEADKDEFCRCELKLQKWYGDLRGKPFAIEAENSILDISGFSKQYNCAFIWQKDGVKKLNLYLIINYFKGGKLRFKKIKPEAFEANRFYTVINKKSGEIVPMEVNFNFDDPNLIILPLAFGKRQGREFIWNDLLSLETGSLKLANGRVIEKTLYNRRTRQDEPALFVALTFERREVLDSSNIKPMNLIGVDRGENIPAVIALTDPEGCPLSRFKDSLGNPTHILRIGESYKEKQRTIQAKKEVEQRRAGGYSRKYASKAKNLADDMVRNTARDLLYYAVTQDAMLIFENLSRGFGRQGKRTFMAERQYTRMEDWLTAKLAYEGLPSQTYLSKTLAQYTSKTCSNCGFTITSADYDRVLEKLKKTATGWMTTINGKELKVEGQITYYNRYKRQNVVKDLSVELDRLSEESVNNDISSWTKGRSGEALSLLKKRFSHRPVQEKFVCLNCGFETHADEQAALNIARSWLFLRSQEYKKYQTNKTTGNTDKRAFVETWQSFYRKKLKEVWKPAV

SEQ ID NO: 48784 - protein, 978 aa, synthetic construct
  REGION 1..978: note = engineered CasX variant
QEIKRISKIRRRLVKDSNTKKAGKTGPMKTLLVRVMTPDLRERLENLRKKPENIPQPISNTSRANLNKLLTDYTEMKKAILHVYWEEFQKDPVGLMSRVAQPASKKIDQNKLKPEMDEKGNLTTAGFACSQCGQPLFVYKLEQVSEKGKAYTNYFGRCNVAEHEKLILLAQLKPEKDSDEAVTYSLGKFGQRALDFYSIHVTKESTHPVKPLAQIAGNRYASGPVGKALRDACMGTIASFLSKYQDIIIEHQKVVKGNQKRLESLRELAGKENLEYPSVTLPPQPHTKEGVDAYNEVIARVRMWVNLNLWQKLKLSRDDAKPLLRLKGFPSFPLVERQANEVDWWDMVCNVKKLINEKKEDGKVFWQNLAGYKRQEALRPYLSSEEDRKKGKKFARYQLGDLLLHLEKKHGEDWGKVYDEAWERIDKKVEGLSKHIKLEEERRSEDAQSKAALTDWLRAKASFVIEGLKEADKDEFCRCELKLQKWYGDLRGKPFAIEAENSILDISGFSKQYNCAFIWQKDGVKKLNLYLIINYFKGGKLRFKKIKPEAFEANRFYTVINKKSGEIVPMEVNFNFDDPNLIILPLAFGKRQGREFIWNDLLSLETGSLKLANGRVIEKTLYNRRTRQDEPALFVALTFERREVLDSSNIKPMNLIGVDRGENIPAVIALTDPEGCPLSRFKDSLGNPTHILRIGESYKEKQRTIQAKKEVEQRRAGGYSRKYASKAKNLADDMVRNTARDLLYYAVTQDAMLIFENLSRGFGRQGKRTFMAERQYTRMEDWLTAKLAYNGLPSKTYLSKTLAQYTSKTCSNCGFTITSADYDRVLEKLKKTATGWMTTINGKELKVEGQITYYNRYKRQNVVKDLSVELDRLSEESVNNDISSWTKGRSGEALSLLKKRFSHRPVQEKFVCLNCGFETHADEQAALNIARSWLFLRSQEYKKYQTNKTTGNTDKRAFVETWQSFYRKKLKEVWKPAV

SEQ ID NO: 48785 - protein, 978 aa, synthetic construct
  REGION 1..978: note = engineered CasX variant
QEIKRISKIRRRLVKDSNTKKAGKTGPMKTLLVRVMTPDLRERLENLRKKPENIPQPISNTSRANLNKLLTDYTEMKKAILHVYWEEFQKDPVGLMSRVAQPASKKIDQNKLKPEMDEKGNLTTAGFACSQCGQPLFVYKLEQVSEKGKAYTNYFGRCNVAEHEKLIQLAQLKPEKDSDEAVTYSLGKFGQRALDFYSIHVTKESTHPVKPLAQIAGNRYASGPVGKALRDACMGTIASFLSKYQDIIIEHQKVVKGNQKRLESLRELAGKENLEYPSVTLPPQPHTKEGVDAYNEVIARVRMWVNLNLWQKLKLSRDDAKPLLRLKGFPSFPLVERQANEVDWWDMVCNVKKLINEKKEDGKVFWQNLAGYKRQEALRPYLSSEEDRKKGKKFARYQLGDLLLHLEKKHGEDWGKVYDEAWERIDKKVEGLSKHIKLEEERRSEDAQSKAALTDWLRAKASFVIEGLKEADKDEFCRCELKLQKWYGDLRGKPFAIEAENSILDISGFSKQYNCAFIWQKDGVKKLNLYLIINYFKGGKLRFKKIKPEAFEANRFYTVINKKSGEIVPMEVNFNFDDPNLIILPLAFGKRQGREFIWNDLLSLETGSLKLANGRVIEKTLYNRRTRQDEPALFVALTFERREVLDSSNIKPMNLIGVDRGENIPAVIALTDPEGCPLSRFKDSLGNPTHILRIGESYKEKQRTIQAKKEVEQRRAGGYSRKYASKAKNLADDMVRNTARDLLYYAVTQDAMLIFENLSRGFGRQGKRTFMAERQYTRMEDWLTAKLAYEGLPSKTYLSKTLAQYTSKTCSNCGFTITSADYDRVLEKLKKTATGWMTTINGKELKVEGQITYYNRYKRQNVVKDLSVELDRLSEESVNNDISSWTKGRSGEALSLLKKRFSHRPVQEKFVCLNCGFETHADEQAALNIARSWLFLRSQEYKKYQTNKTTGNTDKRAFVETWQSFYRKKLKEVWKPAV

SEQ ID NO: 48786 - protein, 978 aa, synthetic construct
  REGION 1..978: note = engineered CasX variant
QEIKRISKIRRRLVKDSNTKKAGKTGPMKTLLVRVMTPDLRERLENLRKKPENIPQPISNTSRANLNKLLTDYTEMKKAILHVYWEEFQKDPVGLMSRVAQPASKKIDQNKLKPEMDEKGNLTTAGFACSQCGQPLFVYKLEQVSEKGKAYTNYFGRCNVAEHEKLILLAQLKPEKDSDEAVTYSLGKFGQRALDFYSIHVTKESTHPVKPLAQIAGNRYASGPVGKALRDACMGTIASFLSKYQDIIIEHQKVVKGNQKRLESLRELAGKENLEYPSVTLPPQPHTKEGVDAYNEVIARVRMWVNLNLWQKLKLSRDDAKPLLRLKGFPSFPLVERQANEVDWWDMVCNVKKLINEKKEDGKVFWQNLAIYKRQEALRPYLSSEEDRKKGKKFARYQLGDLLLHLEKKHGEDWGKVYDEAWERIDKKVEGLSKHIKLEEERRSEDAQSKAALTDWLRAKASFVIEGLKEADKDEFCRCELKLQKWYGDLRGKPFAIEAENSILDISGFSKQYNCAFIWQKDGVKKLNLYLIINYFKGGKLRFKKIKPEAFEANRFYTVINKKSGEIVPMEVNFNFDDPNLIILPLAFGKRQGREFIWNDLLSLETGSLKLANGRVIEKTLYNRRTRQDEPALFVALTFERREVLDSSNIKPMNLIGVDRGENIPAVIALTDPEGCPLSRFKDSLGNPTHILRIGESYKEKQRTIQAKKEVEQRRAGGYSRKYASKAKNLADDMVRNTARDLLYYAVTQDAMLIFENLSRGFGRQGKRTFMAERQYTRMEDWLTAKLAYEGLPSKTYLSKTLAQYTSKTCSNCGFTITSADYDRVLEKLKKTATGWMTTINGKELKVEGQITYYNRYKRQNVVKDLSVELDRLSEESVNNDISSWTKGRSGEALSLLKKRFSHRPVQEKFVCLNCGFETHADEQAALNIARSWLFLRSQEYKKYQTNKTTGNTDKRAFVETWQSFYRKKLKEVWKPAV

SEQ ID NO: 48787 - protein, 978 aa, synthetic construct
  REGION 1..978: note = engineered CasX variant
QEIKRISKIRRRLVKDSNTKKAGKTGPMKTLLVRVMTPDLRERLENLRKKPENIPQPISNTSRANLNKLLTDYTEMKKAILHVYWEEFQKDPVGLMSRVAQPASKKIDQNKLKPEMDEKGNLTTAGFACSQCGQPLFVYKLEQVSEKGKAYTNYFGRCNVAEHEKLILLAQLKPEKDSDEAVTYSLGKFGQRALDFYSIHVTKESTHPVKPLAQIAGNRYASGPVGKALRDACMGTIASFLSKYQDIIIEHQKVVKGNQKRLESLRELAGKENLEYPSVTLPPQPHTKEGVDAYNEVIARVRMWVNLNLWQKLKLSRDDAKPLLRLKGFPSFPLVERQANEVDWWDMVCNVKKLINEKKEDGKVFWQNLAGYKRQEALRPYLSSEEDREKGKKFARYQLGDLLLHLEKKHGEDWGKVYDEAWERIDKKVEGLSKHIKLEEERRSEDAQSKAALTDWLRAKASFVIEGLKEADKDEFCRCELKLQKWYGDLRGKPFAIEAENSILDISGFSKQYNCAFIWQKDGVKKLNLYLIINYFKGGKLRFKKIKPEAFEANRFYTVINKKSGEIVPMEVNFNFDDPNLIILPLAFGKRQGREFIWNDLLSLETGSLKLANGRVIEKTLYNRRTRQDEPALFVALTFERREVLDSSNIKPMNLIGVDRGENIPAVIALTDPEGCPLSRFKDSLGNPTHILRIGESYKEKQRTIQAKKEVEQRRAGGYSRKYASKAKNLADDMVRNTARDLLYYAVTQDAMLIFENLSRGFGRQGKRTFMAERQYTRMEDWLTAKLAYEGLPSKTYLSKTLAQYTSKTCSNCGFTITSADYDRVLEKLKKTATGWMTTINGKELKVEGQITYYNRYKRQNVVKDLSVELDRLSEESVNNDISSWTKGRSGEALSLLKKRFSHRPVQEKFVCLNCGFETHADEQAALNIARSWLFLRSQEYKKYQTNKTTGNTDKRAFVETWQSFYRKKLKEVWKPAV

SEQ ID NO: 48788 - protein, 978 aa, synthetic construct
  REGION 1..978: note = engineered CasX variant
QEIKRISKIRRRLVKDSNTKKAGKTGPMKTLLVRVMTPDLRERLENLRKKPENIPQPISNTSRANLNKLLTDYTEMKKAILHVYWEEFQKDPVGLMSRVAQPASKKIDQNKLKPEMDEKGNLTTAGFACSQCGQPLFVYKLEQVSEKGKAYTNYFGRCNVAEHEKLILLAQLKPEKDSDEAVTYSLGKFGQRALDFYSIHVTKESTHPVKPLAQIAGNRYASGPVGKALRDACMGTIASFLSKYQDIIIEHQKVVKGNQKRLESLRELAGKENLEYPSVTLPPQPHTKEGVDAYNEVIARVRMWVNLNLWQKLKLSRDDAKPLLRLKGFPSFPLVERQANEVDWWDMVCNVKKLINEKKEDGKVFWQNLAGYKRQEALRPYLSSEEDRKKGKKFARYQLGDLLLHLEKKHGEDWGKVYDEAWERIDKKVEGLSKHIKLEEERRSEDAQSKAALTDWLRAKASFVIEGLKEADKDEFCRCELKLQKWYGDLRGKPFAIEAENSILDISGFSKQYNCAFIWQKDGVKKLNLYLIINYFKGGKLRFKKIKPEAFEANRFYTVINKKSGEIVIMEVNFNFDDPNLIILPLAFGKRQGREFIWNDLLSLETGSLKLANGRVIEKTLYNRRTRQDEPALFVALTFERREVLDSSNIKPMNLIGVDRGENIPAVIALTDPEGCPLSRFKDSLGNPTHILRIGESYKEKQRTIQAKKEVEQRRAGGYSRKYASKAKNLADDMVRNTARDLLYYAVTQDAMLIFENLSRGFGRQGKRTFMAERQYTRMEDWLTAKLAYEGLPSKTYLSKTLAQYTSKTCSNCGFTITSADYDRVLEKLKKTATGWMTTINGKELKVEGQITYYNRYKRQNVVKDLSVELDRLSEESVNNDISSWTKGRSGEALSLLKKRFSHRPVQEKFVCLNCGFETHADEQAALNIARSWLFLRSQEYKKYQTNKTTGNTDKRAFVETWQSFYRKKLKEVWKPAV

SEQ ID NO: 48789 - protein, 978 aa, synthetic construct
  REGION 1..978: note = engineered CasX variant
QEIKRINGIRRRLVKDSNTKKAGKTGPMKTLLVRVMTPDLRERLENLRKKPENIPQPISNTSRANLNKLLTDYTEMKKAILHVYWEEFQKDPVGLMSRVAQPASKKIDQNKLKPEMDEKGNLTTAGFACSQCGQPLFVYKLEQVSEKGKAYTNYFGRCNVAEHEKLILLAQLKPEKDSDEAVTYSLGKFGQRALDFYSIHVTKESTHPVKPLAQIAGNRYASGPVGKALRGACMGTIASFLSKYQDIIIEHQKVVKGNQKRLESLRELAGKENLEYPSVTLPPQPHTKEGVDAYNEVIARVRMWVNLNLWQKLKLSRDDAKPLLRLKGFPSFPLVERQANEVDWWDMVCNVKKLINEKKEDGKVFWQNLAGYKRQEALRPYLSSEEDRKKGKKFARYQLGDLLLHLEKKHGEDWGKVYDEAWERIDKKVEGLSKHIKLEEERRSEDAQSKAALTDWLRAKASFVIEGLKEADKDEFCRCELKLQKWYGDLRGKPFAIEAENSILDISGFSKQYNCAFIWQKDGVKKLNLYLIINYFKGGKLRFKKIKPEAFEANRFYTVINKKSGEIVPMEVNFNFDDPNLIILPLAFGKRQGREFIWNDLLSLETGSLKLANGRVIEKTLYNRRTRQDEPALFVALTFERREVLDSSNIKPMNLIGVDRGENIPAVIALTDPEGCPLSRFKDSLGNPTHILRIGESYKEKQRTIQAKKEVEQRRAGGYSRKYASKAKNLADDMVRNTARDLLYYAVTQDAMLIFENLSRGFGRQGKRTFMAERQYTRMEDWLTAKLAYEGLPSKTYLSKTLAQYTSKTCSNCGFTITSADYDRVLEKLKKTATGWMTTINGKELKVEGQITYYNRYKRQNVVKDLSVELDRLSEESVNNDISSWTKGRSGEALSLLKKRFSHRPVQEKFVCLNCGFETHADEQAALNIARSWLFLRSQEYKKYQTNKTTGNTDKRAFVETWQSFYRKKLKEVWKPAV

SEQ ID NO: 48790 - protein, 978 aa, synthetic construct
  REGION 1..978: note = engineered CasX variant
QEIKRINGIRRRLVKDSNTKKAGKTGPMKTLLVRVMTPDLRERLENLRKKPENIPQPISNTSRANLNKLLTDYTEMKKAILHVYWEEFQKDPVGLMSRVAQPASKKIDQNKLKPEMDEKGNLTTAGFACSQCGQPLFVYKLEQVSEKGKAYTNYFGRCNVAEHEKLILLAQLKPEKDSDEAVTYSLGKFGQRALDFYSIHVTKESTHPVKPLAQIAGNRYASGPVGKALRDACMGTIASFLSKYQDIIIEHQKVVKGNQKRLESLRELAGKENLEYPSVTLPPQPHTKEGVDAYNEVIARVRMWVNLNLWQKLKLSRDDAKPLLRLKNFPSFPLVERQANEVDWWDMVCNVKKLINEKKEDGKVFWQNLAGYKRQEALRPYLSSEEDRKKGKKFARYQLGDLLLHLEKKHGEDWGKVYDEAWERIDKKVEGLSKHIKLEEERRSEDAQSKAALTDWLRAKASFVIEGLKEADKDEFCRCELKLQKWYGDLRGKPFAIEAENSILDISGFSKQYNCAFIWQKDGVKKLNLYLIINYFKGGKLRFKKIKPEAFEANRFYTVINKKSGEIVPMEVNFNFDDPNLIILPLAFGKRQGREFIWNDLLSLETGSLKLANGRVIEKTLYNRRTRQDEPALFVALTFERREVLDSSNIKPMNLIGVDRGENIPAVIALTDPEGCPLSRFKDSLGNPTHILRIGESYKEKQRTIQAKKEVEQRRAGGYSRKYASKAKNLADDMVRNTARDLLYYAVTQDAMLIFENLSRGFGRQGKRTFMAERQYTRMEDWLTAKLAYEGLPSKTYLSKTLAQYTSKTCSNCGFTITSADYDRVLEKLKKTATGWMTTINGKELKVEGQITYYNRYKRQNVVKDLSVELDRLSEESVNNDISSWTKGRSGEALSLLKKRFSHRPVQEKFVCLNCGFETHADEQAALNIARSWLFLRSQEYKKYQTNKTTGNTDKRAFVETWQSFYRKKLKEVWKPAV

SEQ ID NO: 48791 - protein, 978 aa, synthetic construct
  REGION 1..978: note = engineered CasX variant
QEIKRINGIRRRLVKDSNTKKAGKTGPMKTLLVRVMTPDLRERLENLRKKPENIPQPISNTSRANLNKLLTDYTEMKKAILHVYWEEFQKDPVGLMSRVAQPASKKIDQNKLKPEMDEKGNLTTAGFACSQCGQPLFVYKLEQVSEKGKAYTNYFGRCNVAEHEKLILLAQLKPEKDSDEAVTYSLGKFGQRALDFYSIHVTKESTHPVKPLAQIAGNRYASGPVGKALRDACMGTIASFLSKYQDIIIEHQKVVKGNQKRLESLRELAGKENLEYPSVTLPPQPHTKEGVDAYNEVIARVRMWVNLNLWQKLKLSRDDAKPLLRLKGFPSFPLVERQANEVDWWDMVCNVKKLINEKKEDGKVFWQNLAGYKRQEALRPYLSSEEDRKKGKKFARYQLGDLLNHLEKKHGEDWGKVYDEAWERIDKKVEGLSKHIKLEEERRSEDAQSKAALTDWLRAKASFVIEGLKEADKDEFCRCELKLQKWYGDLRGKPFAIEAENSILDISGFSKQYNCAFIWQKDGVKKLNLYLIINYFKGGKLRFKKIKPEAFEANRFYTVINKKSGEIVPMEVNFNFDDPNLIILPLAFGKRQGREFIWNDLLSLETGSLKLANGRVIEKTLYNRRTRQDEPALFVALTFERREVLDSSNIKPMNLIGVDRGENIPAVIALTDPEGCPLSRFKDSLGNPTHILRIGESYKEKQRTIQAKKEVEQRRAGGYSRKYASKAKNLADDMVRNTARDLLYYAVTQDAMLIFENLSRGFGRQGKRTFMAERQYTRMEDWLTAKLAYEGLPSKTYLSKTLAQYTSKTCSNCGFTITSADYDRVLEKLKKTATGWMTTINGKELKVEGQITYYNRYKRQNVVKDLSVELDRLSEESVNNDISSWTKGRSGEALSLLKKRFSHRPVQEKFVCLNCGFETHADEQAALNIARSWLFLRSQEYKKYQTNKTTGNTDKRAFVETWQSFYRKKLKEVWKPAV

SEQ ID NO: 48792 - protein, 978 aa, synthetic construct
  REGION 1..978: note = engineered CasX variant
QEIKRINGIRRRLVKDSNTKKAGKTGPMKTLLVRVMTPDLRERLENLRKKPENIPQPISNTSRANLNKLLTDYTEMKKAILHVYWEEFQKDPVGLMSRVAQPASKKIDQNKLKPEMDEKGNLTTAGFACSQCGQPLFVYKLEQVSEKGKAYTNYFGRCNVAEHEKLILLAQLKPEKDSDEAVTYSLGKFGQRALDFYSIHVTKESTHPVKPLAQIAGNRYASGPVGKALRDACMGTIASFLSKYQDIIIEHQKVVKGNQKRLESLRELAGKENLEYPSVTLPPQPHTKEGVDAYNEVIARVRMWVNLNLWQKLKLSRDDAKPLLRLKGFPSFPLVERQANEVDWWDMVCNVKKLINEKKEDGKVFWQNLAGYKRQEALRPYLSSEEDRKKGKKFARYQLGDLLWHLEKKHGEDWGKVYDEAWERIDKKVEGLSKHIKLEEERRSEDAQSKAALTDWLRAKASFVIEGLKEADKDEFCRCELKLQKWYGDLRGKPFAIEAENSILDISGFSKQYNCAFIWQKDGVKKLNLYLIINYFKGGKLRFKKIKPEAFEANRFYTVINKKSGEIVPMEVNFNFDDPNLIILPLAFGKRQGREFIWNDLLSLETGSLKLANGRVIEKTLYNRRTRQDEPALFVALTFERREVLDSSNIKPMNLIGVDRGENIPAVIALTDPEGCPLSRFKDSLGNPTHILRIGESYKEKQRTIQAKKEVEQRRAGGYSRKYASKAKNLADDMVRNTARDLLYYAVTQDAMLIFENLSRGFGRQGKRTFMAERQYTRMEDWLTAKLAYEGLPSKTYLSKTLAQYTSKTCSNCGFTITSADYDRVLEKLKKTATGWMTTINGKELKVEGQITYYNRYKRQNVVKDLSVELDRLSEESVNNDISSWTKGRSGEALSLLKKRFSHRPVQEKFVCLNCGFETHADEQAALNIARSWLFLRSQEYKKYQTNKTTGNTDKRAFVETWQSFYRKKLKEVWKPAV

SEQ ID NO: 48793 - protein, 978 aa, synthetic construct
  REGION 1..978: note = engineered CasX variant
QEIKRINGIRRRLVKDSNTKKAGKTGPMKTLLVRVMTPDLRERLENLRKKPENIPQPISNTSRANLNKLLTDYTEMKKAILHVYWEEFQKDPVGLMSRVAQPASKKIDQNKLKPEMDEKGNLTTAGFACSQCGQPLFVYKLEQVSEKGKAYTNYFGRCNVAEHEKLILLAQLKPEKDSDEAVTYSLGKFGQRALDFYSIHVTKESTHPVKPLAQIAGNRYASGPVGKALRDACMGTIASFLSKYQDIIIEHQKVVKGNQKRLESLRELAGKENLEYPSVTLPPQPHTKEGVDAYNEVIARVRMWVNLNLWQKLKLSRDDAKPLLRLKGFPSFPLVERQANEVDWWDMVCNVKKLINEKKEDGKVFWQNLAGYKRQEALRPYLSSEEDRKKGKKFARYQLGDLLLHLYKKHGEDWGKVYDEAWERIDKKVEGLSKHIKLEEERRSEDAQSKAALTDWLRAKASFVIEGLKEADKDEFCRCELKLQKWYGDLRGKPFAIEAENSILDISGFSKQYNCAFIWQKDGVKKLNLYLIINYFKGGKLRFKKIKPEAFEANRFYTVINKKSGEIVPMEVNFNFDDPNLIILPLAFGKRQGREFIWNDLLSLETGSLKLANGRVIEKTLYNRRTRQDEPALFVALTFERREVLDSSNIKPMNLIGVDRGENIPAVIALTDPEGCPLSRFKDSLGNPTHILRIGESYKEKQRTIQAKKEVEQRRAGGYSRKYASKAKNLADDMVRNTARDLLYYAVTQDAMLIFENLSRGFGRQGKRTFMAERQYTRMEDWLTAKLAYEGLPSKTYLSKTLAQYTSKTCSNCGFTITSADYDRVLEKLKKTATGWMTTINGKELKVEGQITYYNRYKRQNVVKDLSVELDRLSEESVNNDISSWTKGRSGEALSLLKKRFSHRPVQEKFVCLNCGFETHADEQAALNIARSWLFLRSQEYKKYQTNKTTGNTDKRAFVETWQSFYRKKLKEVWKPAV

SEQ ID NO: 48794 - protein, 978 aa, synthetic construct
  REGION 1..978: note = engineered CasX variant
QEIKRINGIRRRLVKDSNTKKAGKTGPMKTLLVRVMTPDLRERLENLRKKPENIPQPISNTSRANLNKLLTDYTEMKKAILHVYWEEFQKDPVGLMSRVAQPASKKIDQNKLKPEMDEKGNLTTAGFACSQCGQPLFVYKLEQVSEKGKAYTNYFGRCNVAEHEKLILLAQLKPEKDSDEAVTYSLGKFGQRALDFYSIHVTKESTHPVKPLAQIAGNRYASGPVGKALRDACMGTIASFLSKYQDIIIEHQKVVKGNQKRLESLRELAGKENLEYPSVTLPPQPHTKEGVDAYNEVIARVRMWVNLNLWQKLKLSRDDAKPLLRLKGFPSFPLVERQANEVDWWDMVCNVKKLINEKKEDGKVFWQNLAGYKRQEALRPYLSSEEDRKKGKKFARYQLGDLLLHLEKKHPEDWGKVYDEAWERIDKKVEGLSKHIKLEEERRSEDAQSKAALTDWLRAKASFVIEGLKEADKDEFCRCELKLQKWYGDLRGKPFAIEAENSILDISGFSKQYNCAFIWQKDGVKKLNLYLIINYFKGGKLRFKKIKPEAFEANRFYTVINKKSGEIVPMEVNFNFDDPNLIILPLAFGKRQGREFIWNDLLSLETGSLKLANGRVIEKTLYNRRTRQDEPALFVALTFERREVLDSSNIKPMNLIGVDRGENIPAVIALTDPEGCPLSRFKDSLGNPTHILRIGESYKEKQRTIQAKKEVEQRRAGGYSRKYASKAKNLADDMVRNTARDLLYYAVTQDAMLIFENLSRGFGRQGKRTFMAERQYTRMEDWLTAKLAYEGLPSKTYLSKTLAQYTSKTCSNCGFTITSADYDRVLEKLKKTATGWMTTINGKELKVEGQITYYNRYKRQNVVKDLSVELDRLSEESVNNDISSWTKGRSGEALSLLKKRFSHRPVQEKFVCLNCGFETHADEQAALNIARSWLFLRSQEYKKYQTNKTTGNTDKRAFVETWQSFYRKKLKEVWKPAV

SEQ ID NO: 48795 - protein, 979 aa, synthetic construct
  REGION 1..979: note = engineered CasX variant
QEIKRINGIRRRLVKDSNTKKAGKTGPMKTLLVRVMTPDLRERLENLRKKPENIPQPISNTSRANLNKLLTDYTEMKKAILHVYWEEFQKDPVGLMSRVAQPASKKIDQNKLKPEMDEKGNLTTAGFACSQCGQPLFVYKLEQVSEKGKAYTNYFGRCNVAEHEKLILLAQLKPEKDSDEAVTYSLGKFGQRALDFYSIHVTKESTHPVKPLAQIAGNRYASGPVGKALRDACMGTIASFLSKYQDIIIEHQKVVKGNQKRLESLRELAGKENLEYPSVTLPPQPHTKEGVDAYNEVIARVRMWVNLNLWQKLKLSRDDAKPLLRLKGFPSFPLVERQANEVDWWDMVCNVKKLINEKKEDGKVFWQNLAGYKRQEALRPYLSSEEDRKKGKKFARYQLGDLLLHLEKKHGERDWGKVYDEAWERIDKKVEGLSKHIKLEEERRSEDAQSKAALTDWLRAKASFVIEGLKEADKDEFCRCELKLQKWYGDLRGKPFAIEAENSILDISGFSKQYNCAFIWQKDGVKKLNLYLIINYFKGGKLRFKKIKPEAFEANRFYTVINKKSGEIVPMEVNFNFDDPNLIILPLAFGKRQGREFIWNDLLSLETGSLKLANGRVIEKTLYNRRTRQDEPALFVALTFERREVLDSSNIKPMNLIGVDRGENIPAVIALTDPEGCPLSRFKDSLGNPTHILRIGESYKEKQRTIQAKKEVEQRRAGGYSRKYASKAKNLADDMVRNTARDLLYYAVTQDAMLIFENLSRGFGRQGKRTFMAERQYTRMEDWLTAKLAYEGLPSKTYLSKTLAQYTSKTCSNCGFTITSADYDRVLEKLKKTATGWMTTINGKELKVEGQITYYNRYKRQNVVKDLSVELDRLSEESVNNDISSWTKGRSGEALSLLKKRFSHRPVQEKFVCLNCGFETHADEQAALNIARSWLFLRSQEYKKYQTNKTTGNTDKRAFVETWQSFYRKKLKEVWKPAV

SEQ ID NO: 48796 - protein, 979 aa, synthetic construct
  REGION 1..979: note = engineered CasX variant
QEIKRINGIRRRLVKDSNTKKAGKTGPMKTLLVRVMTPDLRERLENLRKKPENIPQPISNTSRANLNKLLTDYTEMKKAILHVYWEEFQKDPVGLMSRVAQPASKKIDQNKLKPEMDEKGNLTTAGFACSQCGQPLFVYKLEQVSEKGKAYTNYFGRCNVAEHEKLILLAQLKPEKDSDEAVTYSLGKFGQRALDFYSIHVTKESTHPVKPLAQIAGNRYASGPVGKALRDACMGTIASFLSKYQDIIIEHQKVVKGNQKRLESLRELAGKENLEYPSVTLPPQPHTKEGVDAYNEVIARVRMWVNLNLWQKLKLSRDDAKPLLRLKGFPSFPLVERQANEVDWWDMVCNVKKLINEKKEDGKVFWQNLAGYKRQEALRPYLSSEEDRKKGKKFARYQLGDLLLHLEKKHGEYDWGKVYDEAWERIDKKVEGLSKHIKLEEERRSEDAQSKAALTDWLRAKASFVIEGLKEADKDEFCRCELKLQKWYGDLRGKPFAIEAENSILDISGFSKQYNCAFIWQKDGVKKLNLYLIINYFKGGKLRFKKIKPEAFEANRFYTVINKKSGEIVPMEVNFNFDDPNLIILPLAFGKRQGREFIWNDLLSLETGSLKLANGRVIEKTLYNRRTRQDEPALFVALTFERREVLDSSNIKPMNLIGVDRGENIPAVIALTDPEGCPLSRFKDSLGNPTHILRIGESYKEKQRTIQAKKEVEQRRAGGYSRKYASKAKNLADDMVRNTARDLLYYAVTQDAMLIFENLSRGFGRQGKRTFMAERQYTRMEDWLTAKLAYEGLPSKTYLSKTLAQYTSKTCSNCGFTITSADYDRVLEKLKKTATGWMTTINGKELKVEGQITYYNRYKRQNVVKDLSVELDRLSEESVNNDISSWTKGRSGEALSLLKKRFSHRPVQEKFVCLNCGFETHADEQAALNIARSWLFLRSQEYKKYQTNKTTGNTDKRAFVETWQSFYRKKLKEVWKPAV

SEQ ID NO: 48797 - protein, 978 aa, synthetic construct
  REGION 1..978: note = engineered CasX variant
QEIKRINGIRRRLVKDSNTKKAGKTGPMKTLLVRVMTPDLRERLENLRKKPENIPQPISNTSRANLNKLLTDYTEMKKAILHVYWEEFQKDPVGLMSRVAQPASKKIDQNKLKPEMDEKGNLTTAGFACSQCGQPLFVYKLEQVSEKGKAYTNYFGRCNVAEHEKLILLAQLKPEKDSDEAVTYSLGKFGQRALDFYSIHVTKESTHPVKPLAQIAGNRYASGPVGKALRDACMGTIASFLSKYQDIIIEHQKVVKGNQKRLESLRELAGKENLEYPSVTLPPQPHTKEGVDAYNEVIARVRMWVNLNLWQKLKLSRDDAKPLLRLKGFPSFPLVERQANEVDWWDMVCNVKKLINEKKEDGKVFWQNLAGYKRQEALRPYLSSEEDRKKGKKFARYQLGDLLLHLEKKHGEDWGDVYDEAWERIDKKVEGLSKHIKLEEERRSEDAQSKAALTDWLRAKASFVIEGLKEADKDEFCRCELKLQKWYGDLRGKPFAIEAENSILDISGFSKQYNCAFIWQKDGVKKLNLYLIINYFKGGKLRFKKIKPEAFEANRFYTVINKKSGEIVPMEVNFNFDDPNLIILPLAFGKRQGREFIWNDLLSLETGSLKLANGRVIEKTLYNRRTRQDEPALFVALTFERREVLDSSNIKPMNLIGVDRGENIPAVIALTDPEGCPLSRFKDSLGNPTHILRIGESYKEKQRTIQAKKEVEQRRAGGYSRKYASKAKNLADDMVRNTARDLLYYAVTQDAMLIFENLSRGFGRQGKRTFMAERQYTRMEDWLTAKLAYEGLPSKTYLSKTLAQYTSKTCSNCGFTITSADYDRVLEKLKKTATGWMTTINGKELKVEGQITYYNRYKRQNVVKDLSVELDRLSEESVNNDISSWTKGRSGEALSLLKKRFSHRPVQEKFVCLNCGFETHADEQAALNIARSWLFLRSQEYKKYQTNKTTGNTDKRAFVETWQSFYRKKLKEVWKPAV

SEQ ID NO: 48798 - protein, 978 aa, synthetic construct
  REGION 1..978: note = engineered CasX variant
QEIKRINGIRRRLVKDSNTKKAGKTGPMKTLLVRVMTPDLRERLENLRKKPENIPQPISNTSRANLNKLLTDYTEMKKAILHVYWEEFQKDPVGLMSRVAQPASKKIDQNKLKPEMDEKGNLTTAGFACSQCGQPLFVYKLEQVSEKGKAYTNYFGRCNVAEHEKLILLAQLKPEKDSDEAVTYSLGKFGQRALDFYSIHVTKESTHPVKPLAQIAGNRYASGPVGKALRDACMGTIASFLSKYQDIIIEHQKVVKGNQKRLESLRELAGKENLEYPSVTLPPQPHTKEGVDAYNEVIARVRMWVNLNLWQKLKLSRDDAKPLLRLKGFPSFPLVERQANEVDWWDMVCNVKKLINEKKEDGKVFWQNLAGYKRQEALRPYLSSEEDRKKGKKFARYQLGDLLLHLEKKHGEDWGKVYGEAWERIDKKVEGLSKHIKLEEERRSEDAQSKAALTDWLRAKASFVIEGLKEADKDEFCRCELKLQKWYGDLRGKPFAIEAENSILDISGFSKQYNCAFIWQKDGVKKLNLYLIINYFKGGKLRFKKIKPEAFEANRFYTVINKKSGEIVPMEVNFNFDDPNLIILPLAFGKRQGREFIWNDLLSLETGSLKLANGRVIEKTLYNRRTRQDEPALFVALTFERREVLDSSNIKPMNLIGVDRGENIPAVIALTDPEGCPLSRFKDSLGNPTHILRIGESYKEKQRTIQAKKEVEQRRAGGYSRKYASKAKNLADDMVRNTARDLLYYAVTQDAMLIFENLSRGFGRQGKRTFMAERQYTRMEDWLTAKLAYEGLPSKTYLSKTLAQYTSKTCSNCGFTITSADYDRVLEKLKKTATGWMTTINGKELKVEGQITYYNRYKRQNVVKDLSVELDRLSEESVNNDISSWTKGRSGEALSLLKKRFSHRPVQEKFVCLNCGFETHADEQAALNIARSWLFLRSQEYKKYQTNKTTGNTDKRAFVETWQSFYRKKLKEVWKPAV

SEQ ID NO: 48799 - protein, 978 aa, synthetic construct
  REGION 1..978: note = engineered CasX variant
QEIKRINGIRRRLVKDSNTKKAGKTGPMKTLLVRVMTPDLRERLENLRKKPENIPQPISNTSRANLNKLLTDYTEMKKAILHVYWEEFQKDPVGLMSRVAQPASKKIDQNKLKPEMDEKGNLTTAGFACSQCGQPLFVYKLEQVSEKGKAYTNYFGRCNVAEHEKLILLAQLKPEKDSDEAVTYSLGKFGQRALDFYSIHVTKESTHPVKPLAQIAGNRYASGPVGKALRDACMGTIASFLSKYQDIIIEHQKVVKGNQKRLESLRELAGKENLEYPSVTLPPQPHTKEGVDAYNEVIARVRMWVNLNLWQKLKLSRDDAKPLLRLKGFPSFPLVERQANEVDWWDMVCNVKKLINEKKEDGKVFWQNLAGYKRQEALRPYLSSEEDRKKGKKFARYQLGDLLLHLEKKHGEDWGKVYDEAWERIDKKVEGLSKHIKLEEERRSEDAQSKAALTDWLRAKASFVIEGKKEADKDEFCRCELKLQKWYGDLRGKPFAIEAENSILDISGFSKQYNCAFIWQKDGVKKLNLYLIINYFKGGKLRFKKIKPEAFEANRFYTVINKKSGEIVPMEVNFNFDDPNLIILPLAFGKRQGREFIWNDLLSLETGSLKLANGRVIEKTLYNRRTRQDEPALFVALTFERREVLDSSNIKPMNLIGVDRGENIPAVIALTDPEGCPLSRFKDSLGNPTHILRIGESYKEKQRTIQAKKEVEQRRAGGYSRKYASKAKNLADDMVRNTARDLLYYAVTQDAMLIFENLSRGFGRQGKRTFMAERQYTRMEDWLTAKLAYEGLPSKTYLSKTLAQYTSKTCSNCGFTITSADYDRVLEKLKKTATGWMTTINGKELKVEGQITYYNRYKRQNVVKDLSVELDRLSEESVNNDISSWTKGRSGEALSLLKKRFSHRPVQEKFVCLNCGFETHADEQAALNIARSWLFLRSQEYKKYQTNKTTGNTDKRAFVETWQSFYRKKLKEVWKPAV

SEQ ID NO: 48800 - protein, 978 aa, synthetic construct
  REGION 1..978: note = engineered CasX variant
QEIKRINGIRRRLVKDSNTKKAGKTGPMKTLLVRVMTPDLRERLENLRKKPENIPQPISNTSRANLNKLLTDYTEMKKAILHVYWEEFQKDPVGLMSRVAQPASKKIDQNKLKPEMDEKGNLTTAGFACSQCGQPLFVYKLEQVSEKGKAYTNYFGRCNVAEHEKLILLAQLKPEKDSDEAVTYSLGKFGQRALDFYSIHVTKESTHPVKPLAQIAGNRYASGPVGKALRDACMGTIASFLSKYQDIIIEHQKVVKGNQKRLESLRELAGKENLEYPSVTLPPQPHTKEGVDAYNEVIARVRMWVNLNLWQKLKLSRDDAKPLLRLKGFPSFPLVERQANEVDWWDMVCNVKKLINEKKEDGKVFWQNLAGYKRQEALRPYLSSEEDRKKGKKFARYQLGDLLLHLEKKHGEDWGKVYDEAWERIDKKVEGLSKHIKLEEERRSEDAQSKAALTDWLRAKASFVIEGSKEADKDEFCRCELKLQKWYGDLRGKPFAIEAENSILDISGFSKQYNCAFIWQKDGVKKLNLYLIINYFKGGKLRFKKIKPEAFEANRFYTVINKKSGEIVPMEVNFNFDDPNLIILPLAFGKRQGREFIWNDLLSLETGSLKLANGRVIEKTLYNRRTRQDEPALFVALTFERREVLDSSNIKPMNLIGVDRGENIPAVIALTDPEGCPLSRFKDSLGNPTHILRIGESYKEKQRTIQAKKEVEQRRAGGYSRKYASKAKNLADDMVRNTARDLLYYAVTQDAMLIFENLSRGFGRQGKRTFMAERQYTRMEDWLTAKLAYEGLPSKTYLSKTLAQYTSKTCSNCGFTITSADYDRVLEKLKKTATGWMTTINGKELKVEGQITYYNRYKRQNVVKDLSVELDRLSEESVNNDISSWTKGRSGEALSLLKKRFSHRPVQEKFVCLNCGFETHADEQAALNIARSWLFLRSQEYKKYQTNKTTGNTDKRAFVETWQSFYRKKLKEVWKPAV

SEQ ID NO: 48801 - protein, 979 aa, synthetic construct
  REGION 1..979: note = engineered CasX variant
QEIKRINGIRRRLVKDSNTKKAGKTGPMKTLLVRVMTPDLRERLENLRKKPENIPQPISNTSRANLNKLLTDYTEMKKAILHVYWEEFQKDPVGLMSRVAQPASKKIDQNKLKPEMDEKGNLTTAGFACSQCGQPLFVYKLEQVSEKGKAYTNYFGRCNVAEHEKLILLAQLKPEKDSDEAVTYSLGKFGQRALDFYSIHVTKESTHPVKPLAQIAGNRYASGPVGKALRDACMGTIASFLSKYQDIIIEHQKVVKGNQKRLESLRELAGKENLEYPSVTLPPQPHTKEGVDAYNEVIARVRMWVNLNLWQKLKLSRDDAKPLLRLKGFPSFPLVERQANEVDWWDMVCNVKKLINEKKEDGKVFWQNLAGYKRQEALRPYLSSEEDRKKGKKFARYQLGDLLLHLEKKHGEDWGKVYDEAWERIDKKVEGLSKHIKLEEERRSEDAQSKAALTDWLRAKASFVIEGLKEADDKDEFCRCELKLQKWYGDLRGKPFAIEAENSILDISGFSKQYNCAFIWQKDGVKKLNLYLIINYFKGGKLRFKKIKPEAFEANRFYTVINKKSGEIVPMEVNFNFDDPNLIILPLAFGKRQGREFIWNDLLSLETGSLKLANGRVIEKTLYNRRTRQDEPALFVALTFERREVLDSSNIKPMNLIGVDRGENIPAVIALTDPEGCPLSRFKDSLGNPTHILRIGESYKEKQRTIQAKKEVEQRRAGGYSRKYASKAKNLADDMVRNTARDLLYYAVTQDAMLIFENLSRGFGRQGKRTFMAERQYTRMEDWLTAKLAYEGLPSKTYLSKTLAQYTSKTCSNCGFTITSADYDRVLEKLKKTATGWMTTINGKELKVEGQITYYNRYKRQNVVKDLSVELDRLSEESVNNDISSWTKGRSGEALSLLKKRFSHRPVQEKFVCLNCGFETHADEQAALNIARSWLFLRSQEYKKYQTNKTTGNTDKRAFVETWQSFYRKKLKEVWKPAV

SEQ ID NO: 48802 - protein, 979 aa, synthetic construct
  REGION 1..979: note = engineered CasX variant
QEIKRINGIRRRLVKDSNTKKAGKTGPMKTLLVRVMTPDLRERLENLRKKPENIPQPISNTSRANLNKLLTDYTEMKKAILHVYWEEFQKDPVGLMSRVAQPASKKIDQNKLKPEMDEKGNLTTAGFACSQCGQPLFVYKLEQVSEKGKAYTNYFGRCNVAEHEKLILLAQLKPEKDSDEAVTYSLGKFGQRALDFYSIHVTKESTHPVKPLAQIAGNRYASGPVGKALRDACMGTIASFLSKYQDIIIEHQKVVKGNQKRLESLRELAGKENLEYPSVTLPPQPHTKEGVDAYNEVIARVRMWVNLNLWQKLKLSRDDAKPLLRLKGFPSFPLVERQANEVDWWDMVCNVKKLINEKKEDGKVFWQNLAGYKRQEALRPYLSSEEDRKKGKKFARYQLGDLLLHLEKKHGEDWGKVYDEAWERIDKKVEGLSKHIKLEEERRSEDAQSKAALTDWLRAKASFVIEGLKEADKDEFCRCELKLQKWYGDLRGKPFAIEAENSILDISGFSKQYNCAFIWQKDGVKKLNLYLIINYFKGGKLRFKKIKPEAFEANRFYTVINKKSGEIVPMEVNFNFDDPNLIILPLAFGKRQGREFIWNDLLSLETGSLKLANGRVIEKTLYNRRTRQDEPALFVALTFERREVLDSSNIKPMNLIGVDRGENIPAVIALTDPEGCPLSRFKDSLGNPTHILRIGESYKEKQRTIQAKKEVEQRRAGGYSRKYASKAKNLADDMVRNTARDLLYYAVTQDAMLIFENLSRGFGRQGKRTFMAERQYTRMEDWLTAKLAYEGLPSKTYLSKTLAQYTSKTCSNCGFTITSADYDRVLEKLKKTATGWMTTINGKELKVEGQITYYNRYKRQNVVKDLSVELDRLSEESVNNDISSWTKGRSGNEALSLLKKRFSHRPVQEKFVCLNCGFETHADEQAALNIARSWLFLRSQEYKKYQTNKTTGNTDKRAFVETWQSFYRKKLKEVWKPAV

SEQ ID NO: 48803 - protein, 978 aa, synthetic construct
  REGION 1..978: note = engineered CasX variant
QEIKRINGIRRRLVKDSNTKKAGKTGPMKTLLVRVMTPDLRERLENLRKKPENIPQPISNTSRANLNKLLTDYTEMKKAILHVYWEEFQKDPVGLMSRVAQPASKKIDQNKLKPEMDEKGNLTTAGFACSQCGQPLFVYKLEQVSEKGKAYTNYFGRCNVAEHEKLILLAQLKPEKDSDEAVTYSLGKFGQRALDFYSIHVTKESTHPVKPLAQIAGNRYASGPVGKALRDACMGTIASFLSKYQDIIIEHQKVVKGNQKRLESLRELAGKENLEYPSVTLPPQPHTKEGVDAYNEVIARVRMWVNLNLWQKLKLSRDDAKPLLRLKGFPSFPLVERQANEVDWWDMVCNVKKLINEKKEDGKVFWQNLAGYKRQEALRPYLSSEEDRQKGKKFARYQLGDLLLHLEKKHGEDWGKVYDEAWERIDKKVEGLSKHIKLEEERRSEDAQSKAALTDWLRAKASFVIEGLKEADKDEFCRCELKLQKWYGDLRGKPFAIEAENSILDISGFSKQYNCAFIWQKDGVKKLNLYLIINYFKGGKLRFKKIKPEAFEANRFYTVINKKSGEIVPMEVNFNFDDPNLIILPLAFGKRQGREFIWNDLLSLETGSLKLANGRVIEKTLYNRRTRQDEPALFVALTFERREVLDSSNIKPMNLIGVDRGENIPAVIALTDPEGCPLSRFKDSLGNPTHILRIGESYKEKQRTIQAKKEVEQRRAGGYSRKYASKAKNLADDMVRNTARDLLYYAVTQDAMLIFENLSRGFGRQGKRTFMAERQYTRMEDWLTAKLAYEGLPSKTYLSKTLAQYTSKTCSNCGFTITSADYDRVLEKLKKTATGWMTTINGKELKVEGQITYYNRYKRQNVVKDLSVELDRLSEESVNNDISSWTKGRSGEALSLLKKRFSHRPVQEKFVCLNCGFETHADEQAALNIARSWLFLRSQEYKKYQTNKTTGNTDKRAFVETWQSFYRKKLKEVWKPAV

SEQ ID NO: 48804 - protein, 978 aa, synthetic construct
  REGION 1..978: note = engineered CasX variant
QEIKRINGIRRRLVKDSNTKKAGKTGPMKTLLVRVMTPDLRERLENLRKKPENIPQPISNTSRANLNKLLTDYTEMKKAILHVYWEEFQKDPVGLMSRVAQPASKKIDQNKLKPEMDEKGNLTTAGFACSQCGQPLFVYKLEQVSEKGKAYTNYFGRCNVAEHEKLILLAQLKPEKDSDEAVTYSLGKFGQRALDFYSIHVTKESTHPVKPLAQIAGNRYASGPVGKALRDACMGTIASFLSKYQDIIIEHQKVVKGNQKRLESLRELAGKENLEYPSVTLPPQPHTKEGVDAYNEVIARVRMWVNLNLWQKLKLSRDDAKPLLRLKGFPSFPLVERQANEVDWWDMVCNVKKLINEKKEDGKVFWQNLAGYKRQEALRPYLSSEEDRKKGKKFARYQLGDLLLHLEKKHGEDWGKVYDEAWERIDKKVEGLSKHIKLEEERRSEDAQSKAALTDWLRAKASFVIEGLKEADKDEFCRCELKLQKWYGDLRGKPFAIEAENSILDISGFSKQYNCAFIWQKDGVKKLNLYLIINYFKGGKLRFKKIKPEAFEANRFYTVINKKSGEIVPMEVNFNFDDPNLIILPLAFGKRQGREFIWNDLLSLETGSLKLANGRVIEKTLYNRRTRQDEPALFVALTFERREVLDSSNIKPMNLIGVDRGENIPAVIALTDPEGCPLSRFKDSLGNPTHILRIGESYKEKQRTIQAKKEVEQRRAGGYSRKYASKAKNLADDMVRNTARDLLYYAVTQDAMLIFENLSRGFGRQGKRTFMAERQYTRMEDWLTAKLAYEGLPSQTYLSKTLAQYTSKTCSNCGFTITSADYDRVLEKLKKTATGWMTTINGKELKVEGQITYYNRYKRQNVVKDLSVELDRLSEESVNNDISSWTKGRSGEALSLLKKRFSHRPVQEKFVCLNCGFETHADEQAALNIARSWLFLRSQEYKKYQTNKTTGNTDKRAFVETWQSFYRKKLKEVWKPAV

SEQ ID NO: 48805 - protein, 978 aa, synthetic construct
  REGION 1..978: note = engineered CasX variant
QEIKRINGIRRRLVKDSNTKKAGKTGPMKTLLVRVMTPDLRERLENLRKKPENIPQPISNTSRANLNKLLTDYTEMKKAILHVYWEEFQKDPVGLMSRVAQPASKKIDQNKLKPEMDEKGNLTTAGFACSQCGQPLFVYKLEQVSEKGKAYTNYFGRCNVAEHEKLILLAQLKPEKDSDEAVTYSLGKFGQRALDFYSIHVTKESTHPVKPLAQIAGNRYASGPVGKALRDACMGTIASFLSKYQDIIIEHQKVVKGNQKRLESLRELAGKENLEYPSVTLPPQPHTKEGVDAYNEVIARVRMWVNLNLWQKLKLSRDDAKPLLRLKGFPSFPLVERQANEVDWWDMVCNVKKLINEKKEDGKVFWQNLAGYKRQEALRPYLSSEEDRKKGKKFARYQLGDLLLHLEKKHGEDWGKVYDEAWERIDKKVEGLSKHIKLEEERRSEDAQSKAALTDWLRAKASFVIEGLKEADKDEFCRCELKLQKWYGDLRGKPFAIEAENSILDISGFSKQYNCAFIWQKDGVKKLNLYLIINYFKGGKLRFKKIKPEAFEANRFYTVINKKSGEIVPMEVNFNFDDPNLIILPLAFGKRQGREFIWNDLLSLETGSLKLANGRVIEKTLYNRRTRQDEPALFVALTFERREVLDSSNIKPMNLIGVDRGENIPAVIALTDPEGCPLSRFKDSLGNPTHILRIGESYKEKQRTIQAKKEVEQRRAGGYSRKYASKAKNLADDMVRNTARDLLYYAVTQDAMLIFENLSRGFGRQGKRTFMAERQYTRMEDWLTAKLAYNGLPSKTYLSKTLAQYTSKTCSNCGFTITSADYDRVLEKLKKTATGWMTTINGKELKVEGQITYYNRYKRQNVVKDLSVELDRLSEESVNNDISSWTKGRSGEALSLLKKRFSHRPVQEKFVCLNCGFETHADEQAALNIARSWLFLRSQEYKKYQTNKTTGNTDKRAFVETWQSFYRKKLKEVWKPAV

SEQ ID NO: 48806 - protein, 978 aa, synthetic construct
  REGION 1..978: note = engineered CasX variant
QEIKRINGIRRRLVKDSNTKKAGKTGPMKTLLVRVMTPDLRERLENLRKKPENIPQPISNTSRANLNKLLTDYTEMKKAILHVYWEEFQKDPVGLMSRVAQPASKKIDQNKLKPEMDEKGNLTTAGFACSQCGQPLFVYKLEQVSEKGKAYTNYFGRCNVAEHEKLIQLAQLKPEKDSDEAVTYSLGKFGQRALDFYSIHVTKESTHPVKPLAQIAGNRYASGPVGKALRDACMGTIASFLSKYQDIIIEHQKVVKGNQKRLESLRELAGKENLEYPSVTLPPQPHTKEGVDAYNEVIARVRMWVNLNLWQKLKLSRDDAKPLLRLKGFPSFPLVERQANEVDWWDMVCNVKKLINEKKEDGKVFWQNLAGYKRQEALRPYLSSEEDRKKGKKFARYQLGDLLLHLEKKHGEDWGKVYDEAWERIDKKVEGLSKHIKLEEERRSEDAQSKAALTDWLRAKASFVIEGLKEADKDEFCRCELKLQKWYGDLRGKPFAIEAENSILDISGFSKQYNCAFIWQKDGVKKLNLYLIINYFKGGKLRFKKIKPEAFEANRFYTVINKKSGEIVPMEVNFNFDDPNLIILPLAFGKRQGREFIWNDLLSLETGSLKLANGRVIEKTLYNRRTRQDEPALFVALTFERREVLDSSNIKPMNLIGVDRGENIPAVIALTDPEGCPLSRFKDSLGNPTHILRIGESYKEKQRTIQAKKEVEQRRAGGYSRKYASKAKNLADDMVRNTARDLLYYAVTQDAMLIFENLSRGFGRQGKRTFMAERQYTRMEDWLTAKLAYEGLPSKTYLSKTLAQYTSKTCSNCGFTITSADYDRVLEKLKKTATGWMTTINGKELKVEGQITYYNRYKRQNVVKDLSVELDRLSEESVNNDISSWTKGRSGEALSLLKKRFSHRPVQEKFVCLNCGFETHADEQAALNIARSWLFLRSQEYKKYQTNKTTGNTDKRAFVETWQSFYRKKLKEVWKPAV

SEQ ID NO: 48807 - protein, 978 aa, synthetic construct
  REGION 1..978: note = engineered CasX variant
QEIKRINGIRRRLVKDSNTKKAGKTGPMKTLLVRVMTPDLRERLENLRKKPENIPQPISNTSRANLNKLLTDYTEMKKAILHVYWEEFQKDPVGLMSRVAQPASKKIDQNKLKPEMDEKGNLTTAGFACSQCGQPLFVYKLEQVSEKGKAYTNYFGRCNVAEHEKLILLAQLKPEKDSDEAVTYSLGKFGQRALDFYSIHVTKESTHPVKPLAQIAGNRYASGPVGKALRDACMGTIASFLSKYQDIIIEHQKVVKGNQKRLESLRELAGKENLEYPSVTLPPQPHTKEGVDAYNEVIARVRMWVNLNLWQKLKLSRDDAKPLLRLKGFPSFPLVERQANEVDWWDMVCNVKKLINEKKEDGKVFWQNLAIYKRQEALRPYLSSEEDRKKGKKFARYQLGDLLLHLEKKHGEDWGKVYDEAWERIDKKVEGLSKHIKLEEERRSEDAQSKAALTDWLRAKASFVIEGLKEADKDEFCRCELKLQKWYGDLRGKPFAIEAENSILDISGFSKQYNCAFIWQKDGVKKLNLYLIINYFKGGKLRFKKIKPEAFEANRFYTVINKKSGEIVPMEVNFNFDDPNLIILPLAFGKRQGREFIWNDLLSLETGSLKLANGRVIEKTLYNRRTRQDEPALFVALTFERREVLDSSNIKPMNLIGVDRGENIPAVIALTDPEGCPLSRFKDSLGNPTHILRIGESYKEKQRTIQAKKEVEQRRAGGYSRKYASKAKNLADDMVRNTARDLLYYAVTQDAMLIFENLSRGFGRQGKRTFMAERQYTRMEDWLTAKLAYEGLPSKTYLSKTLAQYTSKTCSNCGFTITSADYDRVLEKLKKTATGWMTTINGKELKVEGQITYYNRYKRQNVVKDLSVELDRLSEESVNNDISSWTKGRSGEALSLLKKRFSHRPVQEKFVCLNCGFETHADEQAALNIARSWLFLRSQEYKKYQTNKTTGNTDKRAFVETWQSFYRKKLKEVWKPAV

SEQ ID NO: 48808 - protein, 978 aa, synthetic construct
  REGION 1..978: note = engineered CasX variant
QEIKRINGIRRRLVKDSNTKKAGKTGPMKTLLVRVMTPDLRERLENLRKKPENIPQPISNTSRANLNKLLTDYTEMKKAILHVYWEEFQKDPVGLMSRVAQPASKKIDQNKLKPEMDEKGNLTTAGFACSQCGQPLFVYKLEQVSEKGKAYTNYFGRCNVAEHEKLILLAQLKPEKDSDEAVTYSLGKFGQRALDFYSIHVTKESTHPVKPLAQIAGNRYASGPVGKALRDACMGTIASFLSKYQDIIIEHQKVVKGNQKRLESLRELAGKENLEYPSVTLPPQPHTKEGVDAYNEVIARVRMWVNLNLWQKLKLSRDDAKPLLRLKGFPSFPLVERQANEVDWWDMVCNVKKLINEKKEDGKVFWQNLAGYKRQEALRPYLSSEEDREKGKKFARYQLGDLLLHLEKKHGEDWGKVYDEAWERIDKKVEGLSKHIKLEEERRSEDAQSKAALTDWLRAKASFVIEGLKEADKDEFCRCELKLQKWYGDLRGKPFAIEAENSILDISGFSKQYNCAFIWQKDGVKKLNLYLIINYFKGGKLRFKKIKPEAFEANRFYTVINKKSGEIVPMEVNFNFDDPNLIILPLAFGKRQGREFIWNDLLSLETGSLKLANGRVIEKTLYNRRTRQDEPALFVALTFERREVLDSSNIKPMNLIGVDRGENIPAVIALTDPEGCPLSRFKDSLGNPTHILRIGESYKEKQRTIQAKKEVEQRRAGGYSRKYASKAKNLADDMVRNTARDLLYYAVTQDAMLIFENLSRGFGRQGKRTFMAERQYTRMEDWLTAKLAYEGLPSKTYLSKTLAQYTSKTCSNCGFTITSADYDRVLEKLKKTATGWMTTINGKELKVEGQITYYNRYKRQNVVKDLSVELDRLSEESVNNDISSWTKGRSGEALSLLKKRFSHRPVQEKFVCLNCGFETHADEQAALNIARSWLFLRSQEYKKYQTNKTTGNTDKRAFVETWQSFYRKKLKEVWKPAV

SEQ ID NO: 48809 - protein, 978 aa, synthetic construct
  REGION 1..978: note = engineered CasX variant
QEIKRINGIRRRLVKDSNTKKAGKTGPMKTLLVRVMTPDLRERLENLRKKPENIPQPISNTSRANLNKLLTDYTEMKKAILHVYWEEFQKDPVGLMSRVAQPASKKIDQNKLKPEMDEKGNLTTAGFACSQCGQPLFVYKLEQVSEKGKAYTNYFGRCNVAEHEKLILLAQLKPEKDSDEAVTYSLGKFGQRALDFYSIHVTKESTHPVKPLAQIAGNRYASGPVGKALRDACMGTIASFLSKYQDIIIEHQKVVKGNQKRLESLRELAGKENLEYPSVTLPPQPHTKEGVDAYNEVIARVRMWVNLNLWQKLKLSRDDAKPLLRLKGFPSFPLVERQANEVDWWDMVCNVKKLINEKKEDGKVFWQNLAGYKRQEALRPYLSSEEDRKKGKKFARYQLGDLLLHLEKKHGEDWGKVYDEAWERIDKKVEGLSKHIKLEEERRSEDAQSKAALTDWLRAKASFVIEGLKEADKDEFCRCELKLQKWYGDLRGKPFAIEAENSILDISGFSKQYNCAFIWQKDGVKKLNLYLIINYFKGGKLRFKKIKPEAFEANRFYTVINKKSGEIVIMEVNFNFDDPNLIILPLAFGKRQGREFIWNDLLSLETGSLKLANGRVIEKTLYNRRTRQDEPALFVALTFERREVLDSSNIKPMNLIGVDRGENIPAVIALTDPEGCPLSRFKDSLGNPTHILRIGESYKEKQRTIQAKKEVEQRRAGGYSRKYASKAKNLADDMVRNTARDLLYYAVTQDAMLIFENLSRGFGRQGKRTFMAERQYTRMEDWLTAKLAYEGLPSKTYLSKTLAQYTSKTCSNCGFTITSADYDRVLEKLKKTATGWMTTINGKELKVEGQITYYNRYKRQNVVKDLSVELDRLSEESVNNDISSWTKGRSGEALSLLKKRFSHRPVQEKFVCLNCGFETHADEQAALNIARSWLFLRSQEYKKYQTNKTTGNTDKRAFVETWQSFYRKKLKEVWKPAV

SEQ ID NO: 48810 - protein, 978 aa, synthetic construct
  REGION 1..978: note = engineered CasX variant
QEIKRINKIRRRLVKDSNTKKAGKTGPMKTLLVPVMTPDLRERLENLRKKPENIPQPISNTSRANLNKLLTDYTEMKKAILHVYWEEFQKDPVGLMSRVAQPASKKIDQNKLKPEMDEKGNLTTAGFACSQCGQPLFVYKLEQVSEKGKAYTNYFGRCNVAEHEKLILLAQLKPEKDSDEAVTYSLGKFGQRALDFYSIHVTKESTHPVKPLAQIAGNRYASGPVGKALRGACMGTIASFLSKYQDIIIEHQKVVKGNQKRLESLRELAGKENLEYPSVTLPPQPHTKEGVDAYNEVIARVRMWVNLNLWQKLKLSRDDAKPLLRLKGFPSFPLVERQANEVDWWDMVCNVKKLINEKKEDGKVFWQNLAGYKRQEALRPYLSSEEDRKKGKKFARYQLGDLLLHLEKKHGEDWGKVYDEAWERIDKKVEGLSKHIKLEEERRSEDAQSKAALTDWLRAKASFVIEGLKEADKDEFCRCELKLQKWYGDLRGKPFAIEAENSILDISGFSKQYNCAFIWQKDGVKKLNLYLIINYFKGGKLRFKKIKPEAFEANRFYTVINKKSGEIVPMEVNFNFDDPNLIILPLAFGKRQGREFIWNDLLSLETGSLKLANGRVIEKTLYNRRTRQDEPALFVALTFERREVLDSSNIKPMNLIGVDRGENIPAVIALTDPEGCPLSRFKDSLGNPTHILRIGESYKEKQRTIQAKKEVEQRRAGGYSRKYASKAKNLADDMVRNTARDLLYYAVTQDAMLIFENLSRGFGRQGKRTFMAERQYTRMEDWLTAKLAYEGLPSKTYLSKTLAQYTSKTCSNCGFTITSADYDRVLEKLKKTATGWMTTINGKELKVEGQITYYNRYKRQNVVKDLSVELDRLSEESVNNDISSWTKGRSGEALSLLKKRFSHRPVQEKFVCLNCGFETHADEQAALNIARSWLFLRSQEYKKYQTNKTTGNTDKRAFVETWQSFYRKKLKEVWKPAV

SEQ ID NO: 48811 - protein, 978 aa, synthetic construct
  REGION 1..978: note = engineered CasX variant
QEIKRINKIRRRLVKDSNTKKAGKTGPMKTLLVPVMTPDLRERLENLRKKPENIPQPISNTSRANLNKLLTDYTEMKKAILHVYWEEFQKDPVGLMSRVAQPASKKIDQNKLKPEMDEKGNLTTAGFACSQCGQPLFVYKLEQVSEKGKAYTNYFGRCNVAEHEKLILLAQLKPEKDSDEAVTYSLGKFGQRALDFYSIHVTKESTHPVKPLAQIAGNRYASGPVGKALRDACMGTIASFLSKYQDIIIEHQKVVKGNQKRLESLRELAGKENLEYPSVTLPPQPHTKEGVDAYNEVIARVRMWVNLNLWQKLKLSRDDAKPLLRLKNFPSFPLVERQANEVDWWDMVCNVKKLINEKKEDGKVFWQNLAGYKRQEALRPYLSSEEDRKKGKKFARYQLGDLLLHLEKKHGEDWGKVYDEAWERIDKKVEGLSKHIKLEEERRSEDAQSKAALTDWLRAKASFVIEGLKEADKDEFCRCELKLQKWYGDLRGKPFAIEAENSILDISGFSKQYNCAFIWQKDGVKKLNLYLIINYFKGGKLRFKKIKPEAFEANRFYTVINKKSGEIVPMEVNFNFDDPNLIILPLAFGKRQGREFIWNDLLSLETGSLKLANGRVIEKTLYNRRTRQDEPALFVALTFERREVLDSSNIKPMNLIGVDRGENIPAVIALTDPEGCPLSRFKDSLGNPTHILRIGESYKEKQRTIQAKKEVEQRRAGGYSRKYASKAKNLADDMVRNTARDLLYYAVTQDAMLIFENLSRGFGRQGKRTFMAERQYTRMEDWLTAKLAYEGLPSKTYLSKTLAQYTSKTCSNCGFTITSADYDRVLEKLKKTATGWMTTINGKELKVEGQITYYNRYKRQNVVKDLSVELDRLSEESVNNDISSWTKGRSGEALSLLKKRFSHRPVQEKFVCLNCGFETHADEQAALNIARSWLFLRSQEYKKYQTNKTTGNTDKRAFVETWQSFYRKKLKEVWKPAV

SEQ ID NO: 48812 - protein, 978 aa, synthetic construct
  REGION 1..978: note = engineered CasX variant
QEIKRINKIRRRLVKDSNTKKAGKTGPMKTLLVPVMTPDLRERLENLRKKPENIPQPISNTSRANLNKLLTDYTEMKKAILHVYWEEFQKDPVGLMSRVAQPASKKIDQNKLKPEMDEKGNLTTAGFACSQCGQPLFVYKLEQVSEKGKAYTNYFGRCNVAEHEKLILLAQLKPEKDSDEAVTYSLGKFGQRALDFYSIHVTKESTHPVKPLAQIAGNRYASGPVGKALRDACMGTIASFLSKYQDIIIEHQKVVKGNQKRLESLRELAGKENLEYPSVTLPPQPHTKEGVDAYNEVIARVRMWVNLNLWQKLKLSRDDAKPLLRLKGFPSFPLVERQANEVDWWDMVCNVKKLINEKKEDGKVFWQNLAGYKRQEALRPYLSSEEDRKKGKKFARYQLGDLLNHLEKKHGEDWGKVYDEAWERIDKKVEGLSKHIKLEEERRSEDAQSKAALTDWLRAKASFVIEGLKEADKDEFCRCELKLQKWYGDLRGKPFAIEAENSILDISGFSKQYNCAFIWQKDGVKKLNLYLIINYFKGGKLRFKKIKPEAFEANRFYTVINKKSGEIVPMEVNFNFDDPNLIILPLAFGKRQGREFIWNDLLSLETGSLKLANGRVIEKTLYNRRTRQDEPALFVALTFERREVLDSSNIKPMNLIGVDRGENIPAVIALTDPEGCPLSRFKDSLGNPTHILRIGESYKEKQRTIQAKKEVEQRRAGGYSRKYASKAKNLADDMVRNTARDLLYYAVTQDAMLIFENLSRGFGRQGKRTFMAERQYTRMEDWLTAKLAYEGLPSKTYLSKTLAQYTSKTCSNCGFTITSADYDRVLEKLKKTATGWMTTINGKELKVEGQITYYNRYKRQNVVKDLSVELDRLSEESVNNDISSWTKGRSGEALSLLKKRFSHRPVQEKFVCLNCGFETHADEQAALNIARSWLFLRSQEYKKYQTNKTTGNTDKRAFVETWQSFYRKKLKEVWKPAV

SEQ ID NO: 48813 - protein, 978 aa, synthetic construct
  REGION 1..978: note = engineered CasX variant
QEIKRINKIRRRLVKDSNTKKAGKTGPMKTLLVPVMTPDLRERLENLRKKPENIPQPISNTSRANLNKLLTDYTEMKKAILHVYWEEFQKDPVGLMSRVAQPASKKIDQNKLKPEMDEKGNLTTAGFACSQCGQPLFVYKLEQVSEKGKAYTNYFGRCNVAEHEKLILLAQLKPEKDSDEAVTYSLGKFGQRALDFYSIHVTKESTHPVKPLAQIAGNRYASGPVGKALRDACMGTIASFLSKYQDIIIEHQKVVKGNQKRLESLRELAGKENLEYPSVTLPPQPHTKEGVDAYNEVIARVRMWVNLNLWQKLKLSRDDAKPLLRLKGFPSFPLVERQANEVDWWDMVCNVKKLINEKKEDGKVFWQNLAGYKRQEALRPYLSSEEDRKKGKKFARYQLGDLLWHLEKKHGEDWGKVYDEAWERIDKKVEGLSKHIKLEEERRSEDAQSKAALTDWLRAKASFVIEGLKEADKDEFCRCELKLQKWYGDLRGKPFAIEAENSILDISGFSKQYNCAFIWQKDGVKKLNLYLIINYFKGGKLRFKKIKPEAFEANRFYTVINKKSGEIVPMEVNFNFDDPNLIILPLAFGKRQGREFIWNDLLSLETGSLKLANGRVIEKTLYNRRTRQDEPALFVALTFERREVLDSSNIKPMNLIGVDRGENIPAVIALTDPEGCPLSRFKDSLGNPTHILRIGESYKEKQRTIQAKKEVEQRRAGGYSRKYASKAKNLADDMVRNTARDLLYYAVTQDAMLIFENLSRGFGRQGKRTFMAERQYTRMEDWLTAKLAYEGLPSKTYLSKTLAQYTSKTCSNCGFTITSADYDRVLEKLKKTATGWMTTINGKELKVEGQITYYNRYKRQNVVKDLSVELDRLSEESVNNDISSWTKGRSGEALSLLKKRFSHRPVQEKFVCLNCGFETHADEQAALNIARSWLFLRSQEYKKYQTNKTTGNTDKRAFVETWQSFYRKKLKEVWKPAV

SEQ ID NO: 48814 - protein, 978 aa, synthetic construct
  REGION 1..978: note = engineered CasX variant
QEIKRINKIRRRLVKDSNTKKAGKTGPMKTLLVPVMTPDLRERLENLRKKPENIPQPISNTSRANLNKLLTDYTEMKKAILHVYWEEFQKDPVGLMSRVAQPASKKIDQNKLKPEMDEKGNLTTAGFACSQCGQPLFVYKLEQVSEKGKAYTNYFGRCNVAEHEKLILLAQLKPEKDSDEAVTYSLGKFGQRALDFYSIHVTKESTHPVKPLAQIAGNRYASGPVGKALRDACMGTIASFLSKYQDIIIEHQKVVKGNQKRLESLRELAGKENLEYPSVTLPPQPHTKEGVDAYNEVIARVRMWVNLNLWQKLKLSRDDAKPLLRLKGFPSFPLVERQANEVDWWDMVCNVKKLINEKKEDGKVFWQNLAGYKRQEALRPYLSSEEDRKKGKKFARYQLGDLLLHLYKKHGEDWGKVYDEAWERIDKKVEGLSKHIKLEEERRSEDAQSKAALTDWLRAKASFVIEGLKEADKDEFCRCELKLQKWYGDLRGKPFAIEAENSILDISGFSKQYNCAFIWQKDGVKKLNLYLIINYFKGGKLRFKKIKPEAFEANRFYTVINKKSGEIVPMEVNFNFDDPNLIILPLAFGKRQGREFIWNDLLSLETGSLKLANGRVIEKTLYNRRTRQDEPALFVALTFERREVLDSSNIKPMNLIGVDRGENIPAVIALTDPEGCPLSRFKDSLGNPTHILRIGESYKEKQRTIQAKKEVEQRRAGGYSRKYASKAKNLADDMVRNTARDLLYYAVTQDAMLIFENLSRGFGRQGKRTFMAERQYTRMEDWLTAKLAYEGLPSKTYLSKTLAQYTSKTCSNCGFTITSADYDRVLEKLKKTATGWMTTINGKELKVEGQITYYNRYKRQNVVKDLSVELDRLSEESVNNDISSWTKGRSGEALSLLKKRFSHRPVQEKFVCLNCGFETHADEQAALNIARSWLFLRSQEYKKYQTNKTTGNTDKRAFVETWQSFYRKKLKEVWKPAV

SEQ ID NO: 48815 - protein, 978 aa, synthetic construct
  REGION 1..978: note = engineered CasX variant
QEIKRINKIRRRLVKDSNTKKAGKTGPMKTLLVPVMTPDLRERLENLRKKPENIPQPISNTSRANLNKLLTDYTEMKKAILHVYWEEFQKDPVGLMSRVAQPASKKIDQNKLKPEMDEKGNLTTAGFACSQCGQPLFVYKLEQVSEKGKAYTNYFGRCNVAEHEKLILLAQLKPEKDSDEAVTYSLGKFGQRALDFYSIHVTKESTHPVKPLAQIAGNRYASGPVGKALRDACMGTIASFLSKYQDIIIEHQKVVKGNQKRLESLRELAGKENLEYPSVTLPPQPHTKEGVDAYNEVIARVRMWVNLNLWQKLKLSRDDAKPLLRLKGFPSFPLVERQANEVDWWDMVCNVKKLINEKKEDGKVFWQNLAGYKRQEALRPYLSSEEDRKKGKKFARYQLGDLLLHLEKKHPEDWGKVYDEAWERIDKKVEGLSKHIKLEEERRSEDAQSKAALTDWLRAKASFVIEGLKEADKDEFCRCELKLQKWYGDLRGKPFAIEAENSILDISGFSKQYNCAFIWQKDGVKKLNLYLIINYFKGGKLRFKKIKPEAFEANRFYTVINKKSGEIVPMEVNFNFDDPNLIILPLAFGKRQGREFIWNDLLSLETGSLKLANGRVIEKTLYNRRTRQDEPALFVALTFERREVLDSSNIKPMNLIGVDRGENIPAVIALTDPEGCPLSRFKDSLGNPTHILRIGESYKEKQRTIQAKKEVEQRRAGGYSRKYASKAKNLADDMVRNTARDLLYYAVTQDAMLIFENLSRGFGRQGKRTFMAERQYTRMEDWLTAKLAYEGLPSKTYLSKTLAQYTSKTCSNCGFTITSADYDRVLEKLKKTATGWMTTINGKELKVEGQITYYNRYKRQNVVKDLSVELDRLSEESVNNDISSWTKGRSGEALSLLKKRFSHRPVQEKFVCLNCGFETHADEQAALNIARSWLFLRSQEYKKYQTNKTTGNTDKRAFVETWQSFYRKKLKEVWKPAV

SEQ ID NO: 48816 - protein, 979 aa, synthetic construct
  REGION 1..979: note = engineered CasX variant
QEIKRINKIRRRLVKDSNTKKAGKTGPMKTLLVPVMTPDLRERLENLRKKPENIPQPISNTSRANLNKLLTDYTEMKKAILHVYWEEFQKDPVGLMSRVAQPASKKIDQNKLKPEMDEKGNLTTAGFACSQCGQPLFVYKLEQVSEKGKAYTNYFGRCNVAEHEKLILLAQLKPEKDSDEAVTYSLGKFGQRALDFYSIHVTKESTHPVKPLAQIAGNRYASGPVGKALRDACMGTIASFLSKYQDIIIEHQKVVKGNQKRLESLRELAGKENLEYPSVTLPPQPHTKEGVDAYNEVIARVRMWVNLNLWQKLKLSRDDAKPLLRLKGFPSFPLVERQANEVDWWDMVCNVKKLINEKKEDGKVFWQNLAGYKRQEALRPYLSSEEDRKKGKKFARYQLGDLLLHLEKKHGERDWGKVYDEAWERIDKKVEGLSKHIKLEEERRSEDAQSKAALTDWLRAKASFVIEGLKEADKDEFCRCELKLQKWYGDLRGKPFAIEAENSILDISGFSKQYNCAFIWQKDGVKKLNLYLIINYFKGGKLRFKKIKPEAFEANRFYTVINKKSGEIVPMEVNFNFDDPNLIILPLAFGKRQGREFIWNDLLSLETGSLKLANGRVIEKTLYNRRTRQDEPALFVALTFERREVLDSSNIKPMNLIGVDRGENIPAVIALTDPEGCPLSRFKDSLGNPTHILRIGESYKEKQRTIQAKKEVEQRRAGGYSRKYASKAKNLADDMVRNTARDLLYYAVTQDAMLIFENLSRGFGRQGKRTFMAERQYTRMEDWLTAKLAYEGLPSKTYLSKTLAQYTSKTCSNCGFTITSADYDRVLEKLKKTATGWMTTINGKELKVEGQITYYNRYKRQNVVKDLSVELDRLSEESVNNDISSWTKGRSGEALSLLKKRFSHRPVQEKFVCLNCGFETHADEQAALNIARSWLFLRSQEYKKYQTNKTTGNTDKRAFVETWQSFYRKKLKEVWKPAV

SEQ ID NO: 48817 - protein, 979 aa, synthetic construct
  REGION 1..979: note = engineered CasX variant
QEIKRINKIRRRLVKDSNTKKAGKTGPMKTLLVPVMTPDLRERLENLRKKPENIPQPISNTSRANLNKLLTDYTEMKKAILHVYWEEFQKDPVGLMSRVAQPASKKIDQNKLKPEMDEKGNLTTAGFACSQCGQPLFVYKLEQVSEKGKAYTNYFGRCNVAEHEKLILLAQLKPEKDSDEAVTYSLGKFGQRALDFYSIHVTKESTHPVKPLAQIAGNRYASGPVGKALRDACMGTIASFLSKYQDIIIEHQKVVKGNQKRLESLRELAGKENLEYPSVTLPPQPHTKEGVDAYNEVIARVRMWVNLNLWQKLKLSRDDAKPLLRLKGFPSFPLVERQANEVDWWDMVCNVKKLINEKKEDGKVFWQNLAGYKRQEALRPYLSSEEDRKKGKKFARYQLGDLLLHLEKKHGEYDWGKVYDEAWERIDKKVEGLSKHIKLEEERRSEDAQSKAALTDWLRAKASFVIEGLKEADKDEFCRCELKLQKWYGDLRGKPFAIEAENSILDISGFSKQYNCAFIWQKDGVKKLNLYLIINYFKGGKLRFKKIKPEAFEANRFYTVINKKSGEIVPMEVNFNFDDPNLIILPLAFGKRQGREFIWNDLLSLETGSLKLANGRVIEKTLYNRRTRQDEPALFVALTFERREVLDSSNIKPMNLIGVDRGENIPAVIALTDPEGCPLSRFKDSLGNPTHILRIGESYKEKQRTIQAKKEVEQRRAGGYSRKYASKAKNLADDMVRNTARDLLYYAVTQDAMLIFENLSRGFGRQGKRTFMAERQYTRMEDWLTAKLAYEGLPSKTYLSKTLAQYTSKTCSNCGFTITSADYDRVLEKLKKTATGWMTTINGKELKVEGQITYYNRYKRQNVVKDLSVELDRLSEESVNNDISSWTKGRSGEALSLLKKRFSHRPVQEKFVCLNCGFETHADEQAALNIARSWLFLRSQEYKKYQTNKTTGNTDKRAFVETWQSFYRKKLKEVWKPAV

SEQ ID NO: 48818 - protein, 978 aa, synthetic construct
  REGION 1..978: note = engineered CasX variant
QEIKRINKIRRRLVKDSNTKKAGKTGPMKTLLVPVMTPDLRERLENLRKKPENIPQPISNTSRANLNKLLTDYTEMKKAILHVYWEEFQKDPVGLMSRVAQPASKKIDQNKLKPEMDEKGNLTTAGFACSQCGQPLFVYKLEQVSEKGKAYTNYFGRCNVAEHEKLILLAQLKPEKDSDEAVTYSLGKFGQRALDFYSIHVTKESTHPVKPLAQIAGNRYASGPVGKALRDACMGTIASFLSKYQDIIIEHQKVVKGNQKRLESLRELAGKENLEYPSVTLPPQPHTKEGVDAYNEVIARVRMWVNLNLWQKLKLSRDDAKPLLRLKGFPSFPLVERQANEVDWWDMVCNVKKLINEKKEDGKVFWQNLAGYKRQEALRPYLSSEEDRKKGKKFARYQLGDLLLHLEKKHGEDWGDVYDEAWERIDKKVEGLSKHIKLEEERRSEDAQSKAALTDWLRAKASFVIEGLKEADKDEFCRCELKLQKWYGDLRGKPFAIEAENSILDISGFSKQYNCAFIWQKDGVKKLNLYLIINYFKGGKLRFKKIKPEAFEANRFYTVINKKSGEIVPMEVNFNFDDPNLIILPLAFGKRQGREFIWNDLLSLETGSLKLANGRVIEKTLYNRRTRQDEPALFVALTFERREVLDSSNIKPMNLIGVDRGENIPAVIALTDPEGCPLSRFKDSLGNPTHILRIGESYKEKQRTIQAKKEVEQRRAGGYSRKYASKAKNLADDMVRNTARDLLYYAVTQDAMLIFENLSRGFGRQGKRTFMAERQYTRMEDWLTAKLAYEGLPSKTYLSKTLAQYTSKTCSNCGFTITSADYDRVLEKLKKTATGWMTTINGKELKVEGQITYYNRYKRQNVVKDLSVELDRLSEESVNNDISSWTKGRSGEALSLLKKRFSHRPVQEKFVCLNCGFETHADEQAALNIARSWLFLRSQEYKKYQTNKTTGNTDKRAFVETWQSFYRKKLKEVWKPAV

SEQ ID NO: 48819 - protein, 978 aa, synthetic construct
  REGION 1..978: note = engineered CasX variant
QEIKRINKIRRRLVKDSNTKKAGKTGPMKTLLVPVMTPDLRERLENLRKKPENIPQPISNTSRANLNKLLTDYTEMKKAILHVYWEEFQKDPVGLMSRVAQPASKKIDQNKLKPEMDEKGNLTTAGFACSQCGQPLFVYKLEQVSEKGKAYTNYFGRCNVAEHEKLILLAQLKPEKDSDEAVTYSLGKFGQRALDFYSIHVTKESTHPVKPLAQIAGNRYASGPVGKALRDACMGTIASFLSKYQDIIIEHQKVVKGNQKRLESLRELAGKENLEYPSVTLPPQPHTKEGVDAYNEVIARVRMWVNLNLWQKLKLSRDDAKPLLRLKGFPSFPLVERQANEVDWWDMVCNVKKLINEKKEDGKVFWQNLAGYKRQEALRPYLSSEEDRKKGKKFARYQLGDLLLHLEKKHGEDWGKVYGEAWERIDKKVEGLSKHIKLEEERRSEDAQSKAALTDWLRAKASFVIEGLKEADKDEFCRCELKLQKWYGDLRGKPFAIEAENSILDISGFSKQYNCAFIWQKDGVKKLNLYLIINYFKGGKLRFKKIKPEAFEANRFYTVINKKSGEIVPMEVNFNFDDPNLIILPLAFGKRQGREFIWNDLLSLETGSLKLANGRVIEKTLYNRRTRQDEPALFVALTFERREVLDSSNIKPMNLIGVDRGENIPAVIALTDPEGCPLSRFKDSLGNPTHILRIGESYKEKQRTIQAKKEVEQRRAGGYSRKYASKAKNLADDMVRNTARDLLYYAVTQDAMLIFENLSRGFGRQGKRTFMAERQYTRMEDWLTAKLAYEGLPSKTYLSKTLAQYTSKTCSNCGFTITSADYDRVLEKLKKTATGWMTTINGKELKVEGQITYYNRYKRQNVVKDLSVELDRLSEESVNNDISSWTKGRSGEALSLLKKRFSHRPVQEKFVCLNCGFETHADEQAALNIARSWLFLRSQEYKKYQTNKTTGNTDKRAFVETWQSFYRKKLKEVWKPAV

SEQ ID NO: 48820 - protein, 978 aa, synthetic construct
  REGION 1..978: note = engineered CasX variant
QEIKRINKIRRRLVKDSNTKKAGKTGPMKTLLVPVMTPDLRERLENLRKKPENIPQPISNTSRANLNKLLTDYTEMKKAILHVYWEEFQKDPVGLMSRVAQPASKKIDQNKLKPEMDEKGNLTTAGFACSQCGQPLFVYKLEQVSEKGKAYTNYFGRCNVAEHEKLILLAQLKPEKDSDEAVTYSLGKFGQRALDFYSIHVTKESTHPVKPLAQIAGNRYASGPVGKALRDACMGTIASFLSKYQDIIIEHQKVVKGNQKRLESLRELAGKENLEYPSVTLPPQPHTKEGVDAYNEVIARVRMWVNLNLWQKLKLSRDDAKPLLRLKGFPSFPLVERQANEVDWWDMVCNVKKLINEKKEDGKVFWQNLAGYKRQEALRPYLSSEEDRKKGKKFARYQLGDLLLHLEKKHGEDWGKVYDEAWERIDKKVEGLSKHIKLEEERRSEDAQSKAALTDWLRAKASFVIEGKKEADKDEFCRCELKLQKWYGDLRGKPFAIEAENSILDISGFSKQYNCAFIWQKDGVKKLNLYLIINYFKGGKLRFKKIKPEAFEANRFYTVINKKSGEIVPMEVNFNFDDPNLIILPLAFGKRQGREFIWNDLLSLETGSLKLANGRVIEKTLYNRRTRQDEPALFVALTFERREVLDSSNIKPMNLIGVDRGENIPAVIALTDPEGCPLSRFKDSLGNPTHILRIGESYKEKQRTIQAKKEVEQRRAGGYSRKYASKAKNLADDMVRNTARDLLYYAVTQDAMLIFENLSRGFGRQGKRTFMAERQYTRMEDWLTAKLAYEGLPSKTYLSKTLAQYTSKTCSNCGFTITSADYDRVLEKLKKTATGWMTTINGKELKVEGQITYYNRYKRQNVVKDLSVELDRLSEESVNNDISSWTKGRSGEALSLLKKRFSHRPVQEKFVCLNCGFETHADEQAALNIARSWLFLRSQEYKKYQTNKTTGNTDKRAFVETWQSFYRKKLKEVWKPAV

SEQ ID NO: 48821 - protein, 978 aa, synthetic construct
  REGION 1..978: note = engineered CasX variant
QEIKRINKIRRRLVKDSNTKKAGKTGPMKTLLVPVMTPDLRERLENLRKKPENIPQPISNTSRANLNKLLTDYTEMKKAILHVYWEEFQKDPVGLMSRVAQPASKKIDQNKLKPEMDEKGNLTTAGFACSQCGQPLFVYKLEQVSEKGKAYTNYFGRCNVAEHEKLILLAQLKPEKDSDEAVTYSLGKFGQRALDFYSIHVTKESTHPVKPLAQIAGNRYASGPVGKALRDACMGTIASFLSKYQDIIIEHQKVVKGNQKRLESLRELAGKENLEYPSVTLPPQPHTKEGVDAYNEVIARVRMWVNLNLWQKLKLSRDDAKPLLRLKGFPSFPLVERQANEVDWWDMVCNVKKLINEKKEDGKVFWQNLAGYKRQEALRPYLSSEEDRKKGKKFARYQLGDLLLHLEKKHGEDWGKVYDEAWERIDKKVEGLSKHIKLEEERRSEDAQSKAALTDWLRAKASFVIEGSKEADKDEFCRCELKLQKWYGDLRGKPFAIEAENSILDISGFSKQYNCAFIWQKDGVKKLNLYLIINYFKGGKLRFKKIKPEAFEANRFYTVINKKSGEIVPMEVNFNFDDPNLIILPLAFGKRQGREFIWNDLLSLETGSLKLANGRVIEKTLYNRRTRQDEPALFVALTFERREVLDSSNIKPMNLIGVDRGENIPAVIALTDPEGCPLSRFKDSLGNPTHILRIGESYKEKQRTIQAKKEVEQRRAGGYSRKYASKAKNLADDMVRNTARDLLYYAVTQDAMLIFENLSRGFGRQGKRTFMAERQYTRMEDWLTAKLAYEGLPSKTYLSKTLAQYTSKTCSNCGFTITSADYDRVLEKLKKTATGWMTTINGKELKVEGQITYYNRYKRQNVVKDLSVELDRLSEESVNNDISSWTKGRSGEALSLLKKRFSHRPVQEKFVCLNCGFETHADEQAALNIARSWLFLRSQEYKKYQTNKTTGNTDKRAFVETWQSFYRKKLKEVWKPAV

SEQ ID NO: 48822 - protein, 979 aa, synthetic construct
  REGION 1..979: note = engineered CasX variant
QEIKRINKIRRRLVKDSNTKKAGKTGPMKTLLVPVMTPDLRERLENLRKKPENIPQPISNTSRANLNKLLTDYTEMKKAILHVYWEEFQKDPVGLMSRVAQPASKKIDQNKLKPEMDEKGNLTTAGFACSQCGQPLFVYKLEQVSEKGKAYTNYFGRCNVAEHEKLILLAQLKPEKDSDEAVTYSLGKFGQRALDFYSIHVTKESTHPVKPLAQIAGNRYASGPVGKALRDACMGTIASFLSKYQDIIIEHQKVVKGNQKRLESLRELAGKENLEYPSVTLPPQPHTKEGVDAYNEVIARVRMWVNLNLWQKLKLSRDDAKPLLRLKGFPSFPLVERQANEVDWWDMVCNVKKLINEKKEDGKVFWQNLAGYKRQEALRPYLSSEEDRKKGKKFARYQLGDLLLHLEKKHGEDWGKVYDEAWERIDKKVEGLSKHIKLEEERRSEDAQSKAALTDWLRAKASFVIEGLKEADDKDEFCRCELKLQKWYGDLRGKPFAIEAENSILDISGFSKQYNCAFIWQKDGVKKLNLYLIINYFKGGKLRFKKIKPEAFEANRFYTVINKKSGEIVPMEVNFNFDDPNLIILPLAFGKRQGREFIWNDLLSLETGSLKLANGRVIEKTLYNRRTRQDEPALFVALTFERREVLDSSNIKPMNLIGVDRGENIPAVIALTDPEGCPLSRFKDSLGNPTHILRIGESYKEKQRTIQAKKEVEQRRAGGYSRKYASKAKNLADDMVRNTARDLLYYAVTQDAMLIFENLSRGFGRQGKRTFMAERQYTRMEDWLTAKLAYEGLPSKTYLSKTLAQYTSKTCSNCGFTITSADYDRVLEKLKKTATGWMTTINGKELKVEGQITYYNRYKRQNVVKDLSVELDRLSEESVNNDISSWTKGRSGEALSLLKKRFSHRPVQEKFVCLNCGFETHADEQAALNIARSWLFLRSQEYKKYQTNKTTGNTDKRAFVETWQSFYRKKLKEVWKPAV

SEQ ID NO: 48823 - protein, 979 aa, synthetic construct
  REGION 1..979: note = engineered CasX variant
QEIKRINKIRRRLVKDSNTKKAGKTGPMKTLLVPVMTPDLRERLENLRKKPENIPQPISNTSRANLNKLLTDYTEMKKAILHVYWEEFQKDPVGLMSRVAQPASKKIDQNKLKPEMDEKGNLTTAGFACSQCGQPLFVYKLEQVSEKGKAYTNYFGRCNVAEHEKLILLAQLKPEKDSDEAVTYSLGKFGQRALDFYSIHVTKESTHPVKPLAQIAGNRYASGPVGKALRDACMGTIASFLSKYQDIIIEHQKVVKGNQKRLESLRELAGKENLEYPSVTLPPQPHTKEGVDAYNEVIARVRMWVNLNLWQKLKLSRDDAKPLLRLKGFPSFPLVERQANEVDWWDMVCNVKKLINEKKEDGKVFWQNLAGYKRQEALRPYLSSEEDRKKGKKFARYQLGDLLLHLEKKHGEDWGKVYDEAWERIDKKVEGLSKHIKLEEERRSEDAQSKAALTDWLRAKASFVIEGLKEADKDEFCRCELKLQKWYGDLRGKPFAIEAENSILDISGFSKQYNCAFIWQKDGVKKLNLYLIINYFKGGKLRFKKIKPEAFEANRFYTVINKKSGEIVPMEVNFNFDDPNLIILPLAFGKRQGREFIWNDLLSLETGSLKLANGRVIEKTLYNRRTRQDEPALFVALTFERREVLDSSNIKPMNLIGVDRGENIPAVIALTDPEGCPLSRFKDSLGNPTHILRIGESYKEKQRTIQAKKEVEQRRAGGYSRKYASKAKNLADDMVRNTARDLLYYAVTQDAMLIFENLSRGFGRQGKRTFMAERQYTRMEDWLTAKLAYEGLPSKTYLSKTLAQYTSKTCSNCGFTITSADYDRVLEKLKKTATGWMTTINGKELKVEGQITYYNRYKRQNVVKDLSVELDRLSEESVNNDISSWTKGRSGNEALSLLKKRFSHRPVQEKFVCLNCGFETHADEQAALNIARSWLFLRSQEYKKYQTNKTTGNTDKRAFVETWQSFYRKKLKEVWKPAV

SEQ ID NO: 48824 - protein, 978 aa, synthetic construct
  REGION 1..978: note = engineered CasX variant
QEIKRINKIRRRLVKDSNTKKAGKTGPMKTLLVPVMTPDLRERLENLRKKPENIPQPISNTSRANLNKLLTDYTEMKKAILHVYWEEFQKDPVGLMSRVAQPASKKIDQNKLKPEMDEKGNLTTAGFACSQCGQPLFVYKLEQVSEKGKAYTNYFGRCNVAEHEKLILLAQLKPEKDSDEAVTYSLGKFGQRALDFYSIHVTKESTHPVKPLAQIAGNRYASGPVGKALRDACMGTIASFLSKYQDIIIEHQKVVKGNQKRLESLRELAGKENLEYPSVTLPPQPHTKEGVDAYNEVIARVRMWVNLNLWQKLKLSRDDAKPLLRLKGFPSFPLVERQANEVDWWDMVCNVKKLINEKKEDGKVFWQNLAGYKRQEALRPYLSSEEDRQKGKKFARYQLGDLLLHLEKKHGEDWGKVYDEAWERIDKKVEGLSKHIKLEEERRSEDAQSKAALTDWLRAKASFVIEGLKEADKDEFCRCELKLQKWYGDLRGKPFAIEAENSILDISGFSKQYNCAFIWQKDGVKKLNLYLIINYFKGGKLRFKKIKPEAFEANRFYTVINKKSGEIVPMEVNFNFDDPNLIILPLAFGKRQGREFIWNDLLSLETGSLKLANGRVIEKTLYNRRTRQDEPALFVALTFERREVLDSSNIKPMNLIGVDRGENIPAVIALTDPEGCPLSRFKDSLGNPTHILRIGESYKEKQRTIQAKKEVEQRRAGGYSRKYASKAKNLADDMVRNTARDLLYYAVTQDAMLIFENLSRGFGRQGKRTFMAERQYTRMEDWLTAKLAYEGLPSKTYLSKTLAQYTSKTCSNCGFTITSADYDRVLEKLKKTATGWMTTINGKELKVEGQITYYNRYKRQNVVKDLSVELDRLSEESVNNDISSWTKGRSGEALSLLKKRFSHRPVQEKFVCLNCGFETHADEQAALNIARSWLFLRSQEYKKYQTNKTTGNTDKRAFVETWQSFYRKKLKEVWKPAV

SEQ ID NO: 48825 - protein, 978 aa, synthetic construct
  REGION 1..978: note = engineered CasX variant
QEIKRINKIRRRLVKDSNTKKAGKTGPMKTLLVPVMTPDLRERLENLRKKPENIPQPISNTSRANLNKLLTDYTEMKKAILHVYWEEFQKDPVGLMSRVAQPASKKIDQNKLKPEMDEKGNLTTAGFACSQCGQPLFVYKLEQVSEKGKAYTNYFGRCNVAEHEKLILLAQLKPEKDSDEAVTYSLGKFGQRALDFYSIHVTKESTHPVKPLAQIAGNRYASGPVGKALRDACMGTIASFLSKYQDIIIEHQKVVKGNQKRLESLRELAGKENLEYPSVTLPPQPHTKEGVDAYNEVIARVRMWVNLNLWQKLKLSRDDAKPLLRLKGFPSFPLVERQANEVDWWDMVCNVKKLINEKKEDGKVFWQNLAGYKRQEALRPYLSSEEDRKKGKKFARYQLGDLLLHLEKKHGEDWGKVYDEAWERIDKKVEGLSKHIKLEEERRSEDAQSKAALTDWLRAKASFVIEGLKEADKDEFCRCELKLQKWYGDLRGKPFAIEAENSILDISGFSKQYNCAFIWQKDGVKKLNLYLIINYFKGGKLRFKKIKPEAFEANRFYTVINKKSGEIVPMEVNFNFDDPNLIILPLAFGKRQGREFIWNDLLSLETGSLKLANGRVIEKTLYNRRTRQDEPALFVALTFERREVLDSSNIKPMNLIGVDRGENIPAVIALTDPEGCPLSRFKDSLGNPTHILRIGESYKEKQRTIQAKKEVEQRRAGGYSRKYASKAKNLADDMVRNTARDLLYYAVTQDAMLIFENLSRGFGRQGKRTFMAERQYTRMEDWLTAKLAYEGLPSQTYLSKTLAQYTSKTCSNCGFTITSADYDRVLEKLKKTATGWMTTINGKELKVEGQITYYNRYKRQNVVKDLSVELDRLSEESVNNDISSWTKGRSGEALSLLKKRFSHRPVQEKFVCLNCGFETHADEQAALNIARSWLFLRSQEYKKYQTNKTTGNTDKRAFVETWQSFYRKKLKEVWKPAV

SEQ ID NO: 48826 - protein, 978 aa, synthetic construct
  REGION 1..978: note = engineered CasX variant
QEIKRINKIRRRLVKDSNTKKAGKTGPMKTLLVPVMTPDLRERLENLRKKPENIPQPISNTSRANLNKLLTDYTEMKKAILHVYWEEFQKDPVGLMSRVAQPASKKIDQNKLKPEMDEKGNLTTAGFACSQCGQPLFVYKLEQVSEKGKAYTNYFGRCNVAEHEKLILLAQLKPEKDSDEAVTYSLGKFGQRALDFYSIHVTKESTHPVKPLAQIAGNRYASGPVGKALRDACMGTIASFLSKYQDIIIEHQKVVKGNQKRLESLRELAGKENLEYPSVTLPPQPHTKEGVDAYNEVIARVRMWVNLNLWQKLKLSRDDAKPLLRLKGFPSFPLVERQANEVDWWDMVCNVKKLINEKKEDGKVFWQNLAGYKRQEALRPYLSSEEDRKKGKKFARYQLGDLLLHLEKKHGEDWGKVYDEAWERIDKKVEGLSKHIKLEEERRSEDAQSKAALTDWLRAKASFVIEGLKEADKDEFCRCELKLQKWYGDLRGKPFAIEAENSILDISGFSKQYNCAFIWQKDGVKKLNLYLIINYFKGGKLRFKKIKPEAFEANRFYTVINKKSGEIVPMEVNFNFDDPNLIILPLAFGKRQGREFIWNDLLSLETGSLKLANGRVIEKTLYNRRTRQDEPALFVALTFERREVLDSSNIKPMNLIGVDRGENIPAVIALTDPEGCPLSRFKDSLGNPTHILRIGESYKEKQRTIQAKKEVEQRRAGGYSRKYASKAKNLADDMVRNTARDLLYYAVTQDAMLIFENLSRGFGRQGKRTFMAERQYTRMEDWLTAKLAYNGLPSKTYLSKTLAQYTSKTCSNCGFTITSADYDRVLEKLKKTATGWMTTINGKELKVEGQITYYNRYKRQNVVKDLSVELDRLSEESVNNDISSWTKGRSGEALSLLKKRFSHRPVQEKFVCLNCGFETHADEQAALNIARSWLFLRSQEYKKYQTNKTTGNTDKRAFVETWQSFYRKKLKEVWKPAV

SEQ ID NO: 48827 - protein, 978 aa, synthetic construct
  REGION 1..978: note = engineered CasX variant
QEIKRINKIRRRLVKDSNTKKAGKTGPMKTLLVPVMTPDLRERLENLRKKPENIPQPISNTSRANLNKLLTDYTEMKKAILHVYWEEFQKDPVGLMSRVAQPASKKIDQNKLKPEMDEKGNLTTAGFACSQCGQPLFVYKLEQVSEKGKAYTNYFGRCNVAEHEKLIQLAQLKPEKDSDEAVTYSLGKFGQRALDFYSIHVTKESTHPVKPLAQIAGNRYASGPVGKALRDACMGTIASFLSKYQDIIIEHQKVVKGNQKRLESLRELAGKENLEYPSVTLPPQPHTKEGVDAYNEVIARVRMWVNLNLWQKLKLSRDDAKPLLRLKGFPSFPLVERQANEVDWWDMVCNVKKLINEKKEDGKVFWQNLAGYKRQEALRPYLSSEEDRKKGKKFARYQLGDLLLHLEKKHGEDWGKVYDEAWERIDKKVEGLSKHIKLEEERRSEDAQSKAALTDWLRAKASFVIEGLKEADKDEFCRCELKLQKWYGDLRGKPFAIEAENSILDISGFSKQYNCAFIWQKDGVKKLNLYLIINYFKGGKLRFKKIKPEAFEANRFYTVINKKSGEIVPMEVNFNFDDPNLIILPLAFGKRQGREFIWNDLLSLETGSLKLANGRVIEKTLYNRRTRQDEPALFVALTFERREVLDSSNIKPMNLIGVDRGENIPAVIALTDPEGCPLSRFKDSLGNPTHILRIGESYKEKQRTIQAKKEVEQRRAGGYSRKYASKAKNLADDMVRNTARDLLYYAVTQDAMLIFENLSRGFGRQGKRTFMAERQYTRMEDWLTAKLAYEGLPSKTYLSKTLAQYTSKTCSNCGFTITSADYDRVLEKLKKTATGWMTTINGKELKVEGQITYYNRYKRQNVVKDLSVELDRLSEESVNNDISSWTKGRSGEALSLLKKRFSHRPVQEKFVCLNCGFETHADEQAALNIARSWLFLRSQEYKKYQTNKTTGNTDKRAFVETWQSFYRKKLKEVWKPAV

SEQ ID NO: 48828 - protein, 978 aa, synthetic construct
  REGION 1..978: note = engineered CasX variant
QEIKRINKIRRRLVKDSNTKKAGKTGPMKTLLVPVMTPDLRERLENLRKKPENIPQPISNTSRANLNKLLTDYTEMKKAILHVYWEEFQKDPVGLMSRVAQPASKKIDQNKLKPEMDEKGNLTTAGFACSQCGQPLFVYKLEQVSEKGKAYTNYFGRCNVAEHEKLILLAQLKPEKDSDEAVTYSLGKFGQRALDFYSIHVTKESTHPVKPLAQIAGNRYASGPVGKALRDACMGTIASFLSKYQDIIIEHQKVVKGNQKRLESLRELAGKENLEYPSVTLPPQPHTKEGVDAYNEVIARVRMWVNLNLWQKLKLSRDDAKPLLRLKGFPSFPLVERQANEVDWWDMVCNVKKLINEKKEDGKVFWQNLAIYKRQEALRPYLSSEEDRKKGKKFARYQLGDLLLHLEKKHGEDWGKVYDEAWERIDKKVEGLSKHIKLEEERRSEDAQSKAALTDWLRAKASFVIEGLKEADKDEFCRCELKLQKWYGDLRGKPFAIEAENSILDISGFSKQYNCAFIWQKDGVKKLNLYLIINYFKGGKLRFKKIKPEAFEANRFYTVINKKSGEIVPMEVNFNFDDPNLIILPLAFGKRQGREFIWNDLLSLETGSLKLANGRVIEKTLYNRRTRQDEPALFVALTFERREVLDSSNIKPMNLIGVDRGENIPAVIALTDPEGCPLSRFKDSLGNPTHILRIGESYKEKQRTIQAKKEVEQRRAGGYSRKYASKAKNLADDMVRNTARDLLYYAVTQDAMLIFENLSRGFGRQGKRTFMAERQYTRMEDWLTAKLAYEGLPSKTYLSKTLAQYTSKTCSNCGFTITSADYDRVLEKLKKTATGWMTTINGKELKVEGQITYYNRYKRQNVVKDLSVELDRLSEESVNNDISSWTKGRSGEALSLLKKRFSHRPVQEKFVCLNCGFETHADEQAALNIARSWLFLRSQEYKKYQTNKTTGNTDKRAFVETWQSFYRKKLKEVWKPAV

SEQ ID NO: 48829 - protein, 978 aa, synthetic construct
  REGION 1..978: note = engineered CasX variant
QEIKRINKIRRRLVKDSNTKKAGKTGPMKTLLVPVMTPDLRERLENLRKKPENIPQPISNTSRANLNKLLTDYTEMKKAILHVYWEEFQKDPVGLMSRVAQPASKKIDQNKLKPEMDEKGNLTTAGFACSQCGQPLFVYKLEQVSEKGKAYTNYFGRCNVAEHEKLILLAQLKPEKDSDEAVTYSLGKFGQRALDFYSIHVTKESTHPVKPLAQIAGNRYASGPVGKALRDACMGTIASFLSKYQDIIIEHQKVVKGNQKRLESLRELAGKENLEYPSVTLPPQPHTKEGVDAYNEVIARVRMWVNLNLWQKLKLSRDDAKPLLRLKGFPSFPLVERQANEVDWWDMVCNVKKLINEKKEDGKVFWQNLAGYKRQEALRPYLSSEEDREKGKKFARYQLGDLLLHLEKKHGEDWGKVYDEAWERIDKKVEGLSKHIKLEEERRSEDAQSKAALTDWLRAKASFVIEGLKEADKDEFCRCELKLQKWYGDLRGKPFAIEAENSILDISGFSKQYNCAFIWQKDGVKKLNLYLIINYFKGGKLRFKKIKPEAFEANRFYTVINKKSGEIVPMEVNFNFDDPNLIILPLAFGKRQGREFIWNDLLSLETGSLKLANGRVIEKTLYNRRTRQDEPALFVALTFERREVLDSSNIKPMNLIGVDRGENIPAVIALTDPEGCPLSRFKDSLGNPTHILRIGESYKEKQRTIQAKKEVEQRRAGGYSRKYASKAKNLADDMVRNTARDLLYYAVTQDAMLIFENLSRGFGRQGKRTFMAERQYTRMEDWLTAKLAYEGLPSKTYLSKTLAQYTSKTCSNCGFTITSADYDRVLEKLKKTATGWMTTINGKELKVEGQITYYNRYKRQNVVKDLSVELDRLSEESVNNDISSWTKGRSGEALSLLKKRFSHRPVQEKFVCLNCGFETHADEQAALNIARSWLFLRSQEYKKYQTNKTTGNTDKRAFVETWQSFYRKKLKEVWKPAV

SEQ ID NO: 48830 - protein, 978 aa, synthetic construct
  REGION 1..978: note = engineered CasX variant
QEIKRINKIRRRLVKDSNTKKAGKTGPMKTLLVPVMTPDLRERLENLRKKPENIPQPISNTSRANLNKLLTDYTEMKKAILHVYWEEFQKDPVGLMSRVAQPASKKIDQNKLKPEMDEKGNLTTAGFACSQCGQPLFVYKLEQVSEKGKAYTNYFGRCNVAEHEKLILLAQLKPEKDSDEAVTYSLGKFGQRALDFYSIHVTKESTHPVKPLAQIAGNRYASGPVGKALRDACMGTIASFLSKYQDIIIEHQKVVKGNQKRLESLRELAGKENLEYPSVTLPPQPHTKEGVDAYNEVIARVRMWVNLNLWQKLKLSRDDAKPLLRLKGFPSFPLVERQANEVDWWDMVCNVKKLINEKKEDGKVFWQNLAGYKRQEALRPYLSSEEDRKKGKKFARYQLGDLLLHLEKKHGEDWGKVYDEAWERIDKKVEGLSKHIKLEEERRSEDAQSKAALTDWLRAKASFVIEGLKEADKDEFCRCELKLQKWYGDLRGKPFAIEAENSILDISGFSKQYNCAFIWQKDGVKKLNLYLIINYFKGGKLRFKKIKPEAFEANRFYTVINKKSGEIVIMEVNFNFDDPNLIILPLAFGKRQGREFIWNDLLSLETGSLKLANGRVIEKTLYNRRTRQDEPALFVALTFERREVLDSSNIKPMNLIGVDRGENIPAVIALTDPEGCPLSRFKDSLGNPTHILRIGESYKEKQRTIQAKKEVEQRRAGGYSRKYASKAKNLADDMVRNTARDLLYYAVTQDAMLIFENLSRGFGRQGKRTFMAERQYTRMEDWLTAKLAYEGLPSKTYLSKTLAQYTSKTCSNCGFTITSADYDRVLEKLKKTATGWMTTINGKELKVEGQITYYNRYKRQNVVKDLSVELDRLSEESVNNDISSWTKGRSGEALSLLKKRFSHRPVQEKFVCLNCGFETHADEQAALNIARSWLFLRSQEYKKYQTNKTTGNTDKRAFVETWQSFYRKKLKEVWKPAV

SEQ ID NO: 48831 - protein, 978 aa, synthetic construct
  REGION 1..978: note = engineered CasX variant
QEIKRINKIRRRLVKDSNTKKAGKTGPMKTLLVRVMTPDLRERLENLRKKPPNIPQPISNTSRANLNKLLTDYTEMKKAILHVYWEEFQKDPVGLMSRVAQPASKKIDQNKLKPEMDEKGNLTTAGFACSQCGQPLFVYKLEQVSEKGKAYTNYFGRCNVAEHEKLILLAQLKPEKDSDEAVTYSLGKFGQRALDFYSIHVTKESTHPVKPLAQIAGNRYASGPVGKALRGACMGTIASFLSKYQDIIIEHQKVVKGNQKRLESLRELAGKENLEYPSVTLPPQPHTKEGVDAYNEVIARVRMWVNLNLWQKLKLSRDDAKPLLRLKGFPSFPLVERQANEVDWWDMVCNVKKLINEKKEDGKVFWQNLAGYKRQEALRPYLSSEEDRKKGKKFARYQLGDLLLHLEKKHGEDWGKVYDEAWERIDKKVEGLSKHIKLEEERRSEDAQSKAALTDWLRAKASFVIEGLKEADKDEFCRCELKLQKWYGDLRGKPFAIEAENSILDISGFSKQYNCAFIWQKDGVKKLNLYLIINYFKGGKLRFKKIKPEAFEANRFYTVINKKSGEIVPMEVNFNFDDPNLIILPLAFGKRQGREFIWNDLLSLETGSLKLANGRVIEKTLYNRRTRQDEPALFVALTFERREVLDSSNIKPMNLIGVDRGENIPAVIALTDPEGCPLSRFKDSLGNPTHILRIGESYKEKQRTIQAKKEVEQRRAGGYSRKYASKAKNLADDMVRNTARDLLYYAVTQDAMLIFENLSRGFGRQGKRTFMAERQYTRMEDWLTAKLAYEGLPSKTYLSKTLAQYTSKTCSNCGFTITSADYDRVLEKLKKTATGWMTTINGKELKVEGQITYYNRYKRQNVVKDLSVELDRLSEESVNNDISSWTKGRSGEALSLLKKRFSHRPVQEKFVCLNCGFETHADEQAALNIARSWLFLRSQEYKKYQTNKTTGNTDKRAFVETWQSFYRKKLKEVWKPAV

SEQ ID NO: 48832 - protein, 978 aa, synthetic construct
  REGION 1..978: note = engineered CasX variant
QEIKRINKIRRRLVKDSNTKKAGKTGPMKTLLVRVMTPDLRERLENLRKKPPNIPQPISNTSRANLNKLLTDYTEMKKAILHVYWEEFQKDPVGLMSRVAQPASKKIDQNKLKPEMDEKGNLTTAGFACSQCGQPLFVYKLEQVSEKGKAYTNYFGRCNVAEHEKLILLAQLKPEKDSDEAVTYSLGKFGQRALDFYSIHVTKESTHPVKPLAQIAGNRYASGPVGKALRDACMGTIASFLSKYQDIIIEHQKVVKGNQKRLESLRELAGKENLEYPSVTLPPQPHTKEGVDAYNEVIARVRMWVNLNLWQKLKLSRDDAKPLLRLKNFPSFPLVERQANEVDWWDMVCNVKKLINEKKEDGKVFWQNLAGYKRQEALRPYLSSEEDRKKGKKFARYQLGDLLLHLEKKHGEDWGKVYDEAWERIDKKVEGLSKHIKLEEERRSEDAQSKAALTDWLRAKASFVIEGLKEADKDEFCRCELKLQKWYGDLRGKPFAIEAENSILDISGFSKQYNCAFIWQKDGVKKLNLYLIINYFKGGKLRFKKIKPEAFEANRFYTVINKKSGEIVPMEVNFNFDDPNLIILPLAFGKRQGREFIWNDLLSLETGSLKLANGRVIEKTLYNRRTRQDEPALFVALTFERREVLDSSNIKPMNLIGVDRGENIPAVIALTDPEGCPLSRFKDSLGNPTHILRIGESYKEKQRTIQAKKEVEQRRAGGYSRKYASKAKNLADDMVRNTARDLLYYAVTQDAMLIFENLSRGFGRQGKRTFMAERQYTRMEDWLTAKLAYEGLPSKTYLSKTLAQYTSKTCSNCGFTITSADYDRVLEKLKKTATGWMTTINGKELKVEGQITYYNRYKRQNVVKDLSVELDRLSEESVNNDISSWTKGRSGEALSLLKKRFSHRPVQEKFVCLNCGFETHADEQAALNIARSWLFLRSQEYKKYQTNKTTGNTDKRAFVETWQSFYRKKLKEVWKPAV

SEQ ID NO: 48833 - protein, 978 aa, synthetic construct
  REGION 1..978: note = engineered CasX variant
QEIKRINKIRRRLVKDSNTKKAGKTGPMKTLLVRVMTPDLRERLENLRKKPPNIPQPISNTSRANLNKLLTDYTEMKKAILHVYWEEFQKDPVGLMSRVAQPASKKIDQNKLKPEMDEKGNLTTAGFACSQCGQPLFVYKLEQVSEKGKAYTNYFGRCNVAEHEKLILLAQLKPEKDSDEAVTYSLGKFGQRALDFYSIHVTKESTHPVKPLAQIAGNRYASGPVGKALRDACMGTIASFLSKYQDIIIEHQKVVKGNQKRLESLRELAGKENLEYPSVTLPPQPHTKEGVDAYNEVIARVRMWVNLNLWQKLKLSRDDAKPLLRLKGFPSFPLVERQANEVDWWDMVCNVKKLINEKKEDGKVFWQNLAGYKRQEALRPYLSSEEDRKKGKKFARYQLGDLLNHLEKKHGEDWGKVYDEAWERIDKKVEGLSKHIKLEEERRSEDAQSKAALTDWLRAKASFVIEGLKEADKDEFCRCELKLQKWYGDLRGKPFAIEAENSILDISGFSKQYNCAFIWQKDGVKKLNLYLIINYFKGGKLRFKKIKPEAFEANRFYTVINKKSGEIVPMEVNFNFDDPNLIILPLAFGKRQGREFIWNDLLSLETGSLKLANGRVIEKTLYNRRTRQDEPALFVALTFERREVLDSSNIKPMNLIGVDRGENIPAVIALTDPEGCPLSRFKDSLGNPTHILRIGESYKEKQRTIQAKKEVEQRRAGGYSRKYASKAKNLADDMVRNTARDLLYYAVTQDAMLIFENLSRGFGRQGKRTFMAERQYTRMEDWLTAKLAYEGLPSKTYLSKTLAQYTSKTCSNCGFTITSADYDRVLEKLKKTATGWMTTINGKELKVEGQITYYNRYKRQNVVKDLSVELDRLSEESVNNDISSWTKGRSGEALSLLKKRFSHRPVQEKFVCLNCGFETHADEQAALNIARSWLFLRSQEYKKYQTNKTTGNTDKRAFVETWQSFYRKKLKEVWKPAV

SEQ ID NO: 48834 - protein, 978 aa, synthetic construct
  REGION 1..978: note = engineered CasX variant
QEIKRINKIRRRLVKDSNTKKAGKTGPMKTLLVRVMTPDLRERLENLRKKPPNIPQPISNTSRANLNKLLTDYTEMKKAILHVYWEEFQKDPVGLMSRVAQPASKKIDQNKLKPEMDEKGNLTTAGFACSQCGQPLFVYKLEQVSEKGKAYTNYFGRCNVAEHEKLILLAQLKPEKDSDEAVTYSLGKFGQRALDFYSIHVTKESTHPVKPLAQIAGNRYASGPVGKALRDACMGTIASFLSKYQDIIIEHQKVVKGNQKRLESLRELAGKENLEYPSVTLPPQPHTKEGVDAYNEVIARVRMWVNLNLWQKLKLSRDDAKPLLRLKGFPSFPLVERQANEVDWWDMVCNVKKLINEKKEDGKVFWQNLAGYKRQEALRPYLSSEEDRKKGKKFARYQLGDLLWHLEKKHGEDWGKVYDEAWERIDKKVEGLSKHIKLEEERRSEDAQSKAALTDWLRAKASFVIEGLKEADKDEFCRCELKLQKWYGDLRGKPFAIEAENSILDISGFSKQYNCAFIWQKDGVKKLNLYLIINYFKGGKLRFKKIKPEAFEANRFYTVINKKSGEIVPMEVNFNFDDPNLIILPLAFGKRQGREFIWNDLLSLETGSLKLANGRVIEKTLYNRRTRQDEPALFVALTFERREVLDSSNIKPMNLIGVDRGENIPAVIALTDPEGCPLSRFKDSLGNPTHILRIGESYKEKQRTIQAKKEVEQRRAGGYSRKYASKAKNLADDMVRNTARDLLYYAVTQDAMLIFENLSRGFGRQGKRTFMAERQYTRMEDWLTAKLAYEGLPSKTYLSKTLAQYTSKTCSNCGFTITSADYDRVLEKLKKTATGWMTTINGKELKVEGQITYYNRYKRQNVVKDLSVELDRLSEESVNNDISSWTKGRSGEALSLLKKRFSHRPVQEKFVCLNCGFETHADEQAALNIARSWLFLRSQEYKKYQTNKTTGNTDKRAFVETWQSFYRKKLKEVWKPAV

SEQ ID NO: 48835 - protein, 978 aa, synthetic construct
  REGION 1..978: note = engineered CasX variant
QEIKRINKIRRRLVKDSNTKKAGKTGPMKTLLVRVMTPDLRERLENLRKKPPNIPQPISNTSRANLNKLLTDYTEMKKAILHVYWEEFQKDPVGLMSRVAQPASKKIDQNKLKPEMDEKGNLTTAGFACSQCGQPLFVYKLEQVSEKGKAYTNYFGRCNVAEHEKLILLAQLKPEKDSDEAVTYSLGKFGQRALDFYSIHVTKESTHPVKPLAQIAGNRYASGPVGKALRDACMGTIASFLSKYQDIIIEHQKVVKGNQKRLESLRELAGKENLEYPSVTLPPQPHTKEGVDAYNEVIARVRMWVNLNLWQKLKLSRDDAKPLLRLKGFPSFPLVERQANEVDWWDMVCNVKKLINEKKEDGKVFWQNLAGYKRQEALRPYLSSEEDRKKGKKFARYQLGDLLLHLYKKHGEDWGKVYDEAWERIDKKVEGLSKHIKLEEERRSEDAQSKAALTDWLRAKASFVIEGLKEADKDEFCRCELKLQKWYGDLRGKPFAIEAENSILDISGFSKQYNCAFIWQKDGVKKLNLYLIINYFKGGKLRFKKIKPEAFEANRFYTVINKKSGEIVPMEVNFNFDDPNLIILPLAFGKRQGREFIWNDLLSLETGSLKLANGRVIEKTLYNRRTRQDEPALFVALTFERREVLDSSNIKPMNLIGVDRGENIPAVIALTDPEGCPLSRFKDSLGNPTHILRIGESYKEKQRTIQAKKEVEQRRAGGYSRKYASKAKNLADDMVRNTARDLLYYAVTQDAMLIFENLSRGFGRQGKRTFMAERQYTRMEDWLTAKLAYEGLPSKTYLSKTLAQYTSKTCSNCGFTITSADYDRVLEKLKKTATGWMTTINGKELKVEGQITYYNRYKRQNVVKDLSVELDRLSEESVNNDISSWTKGRSGEALSLLKKRFSHRPVQEKFVCLNCGFETHADEQAALNIARSWLFLRSQEYKKYQTNKTTGNTDKRAFVETWQSFYRKKLKEVWKPAV

SEQ ID NO: 48836 - protein, 978 aa, synthetic construct
  REGION 1..978: note = engineered CasX variant
QEIKRINKIRRRLVKDSNTKKAGKTGPMKTLLVRVMTPDLRERLENLRKKPPNIPQPISNTSRANLNKLLTDYTEMKKAILHVYWEEFQKDPVGLMSRVAQPASKKIDQNKLKPEMDEKGNLTTAGFACSQCGQPLFVYKLEQVSEKGKAYTNYFGRCNVAEHEKLILLAQLKPEKDSDEAVTYSLGKFGQRALDFYSIHVTKESTHPVKPLAQIAGNRYASGPVGKALRDACMGTIASFLSKYQDIIIEHQKVVKGNQKRLESLRELAGKENLEYPSVTLPPQPHTKEGVDAYNEVIARVRMWVNLNLWQKLKLSRDDAKPLLRLKGFPSFPLVERQANEVDWWDMVCNVKKLINEKKEDGKVFWQNLAGYKRQEALRPYLSSEEDRKKGKKFARYQLGDLLLHLEKKHPEDWGKVYDEAWERIDKKVEGLSKHIKLEEERRSEDAQSKAALTDWLRAKASFVIEGLKEADKDEFCRCELKLQKWYGDLRGKPFAIEAENSILDISGFSKQYNCAFIWQKDGVKKLNLYLIINYFKGGKLRFKKIKPEAFEANRFYTVINKKSGEIVPMEVNFNFDDPNLIILPLAFGKRQGREFIWNDLLSLETGSLKLANGRVIEKTLYNRRTRQDEPALFVALTFERREVLDSSNIKPMNLIGVDRGENIPAVIALTDPEGCPLSRFKDSLGNPTHILRIGESYKEKQRTIQAKKEVEQRRAGGYSRKYASKAKNLADDMVRNTARDLLYYAVTQDAMLIFENLSRGFGRQGKRTFMAERQYTRMEDWLTAKLAYEGLPSKTYLSKTLAQYTSKTCSNCGFTITSADYDRVLEKLKKTATGWMTTINGKELKVEGQITYYNRYKRQNVVKDLSVELDRLSEESVNNDISSWTKGRSGEALSLLKKRFSHRPVQEKFVCLNCGFETHADEQAALNIARSWLFLRSQEYKKYQTNKTTGNTDKRAFVETWQSFYRKKLKEVWKPAV

SEQ ID NO: 48837 - protein, 979 aa, synthetic construct
  REGION 1..979: note = engineered CasX variant
QEIKRINKIRRRLVKDSNTKKAGKTGPMKTLLVRVMTPDLRERLENLRKKPPNIPQPISNTSRANLNKLLTDYTEMKKAILHVYWEEFQKDPVGLMSRVAQPASKKIDQNKLKPEMDEKGNLTTAGFACSQCGQPLFVYKLEQVSEKGKAYTNYFGRCNVAEHEKLILLAQLKPEKDSDEAVTYSLGKFGQRALDFYSIHVTKESTHPVKPLAQIAGNRYASGPVGKALRDACMGTIASFLSKYQDIIIEHQKVVKGNQKRLESLRELAGKENLEYPSVTLPPQPHTKEGVDAYNEVIARVRMWVNLNLWQKLKLSRDDAKPLLRLKGFPSFPLVERQANEVDWWDMVCNVKKLINEKKEDGKVFWQNLAGYKRQEALRPYLSSEEDRKKGKKFARYQLGDLLLHLEKKHGERDWGKVYDEAWERIDKKVEGLSKHIKLEEERRSEDAQSKAALTDWLRAKASFVIEGLKEADKDEFCRCELKLQKWYGDLRGKPFAIEAENSILDISGFSKQYNCAFIWQKDGVKKLNLYLIINYFKGGKLRFKKIKPEAFEANRFYTVINKKSGEIVPMEVNFNFDDPNLIILPLAFGKRQGREFIWNDLLSLETGSLKLANGRVIEKTLYNRRTRQDEPALFVALTFERREVLDSSNIKPMNLIGVDRGENIPAVIALTDPEGCPLSRFKDSLGNPTHILRIGESYKEKQRTIQAKKEVEQRRAGGYSRKYASKAKNLADDMVRNTARDLLYYAVTQDAMLIFENLSRGFGRQGKRTFMAERQYTRMEDWLTAKLAYEGLPSKTYLSKTLAQYTSKTCSNCGFTITSADYDRVLEKLKKTATGWMTTINGKELKVEGQITYYNRYKRQNVVKDLSVELDRLSEESVNNDISSWTKGRSGEALSLLKKRFSHRPVQEKFVCLNCGFETHADEQAALNIARSWLFLRSQEYKKYQTNKTTGNTDKRAFVETWQSFYRKKLKEVWKPAV

SEQ ID NO: 48838 - protein, 979 aa, synthetic construct
  REGION 1..979: note = engineered CasX variant
QEIKRINKIRRRLVKDSNTKKAGKTGPMKTLLVRVMTPDLRERLENLRKKPPNIPQPISNTSRANLNKLLTDYTEMKKAILHVYWEEFQKDPVGLMSRVAQPASKKIDQNKLKPEMDEKGNLTTAGFACSQCGQPLFVYKLEQVSEKGKAYTNYFGRCNVAEHEKLILLAQLKPEKDSDEAVTYSLGKFGQRALDFYSIHVTKESTHPVKPLAQIAGNRYASGPVGKALRDACMGTIASFLSKYQDIIIEHQKVVKGNQKRLESLRELAGKENLEYPSVTLPPQPHTKEGVDAYNEVIARVRMWVNLNLWQKLKLSRDDAKPLLRLKGFPSFPLVERQANEVDWWDMVCNVKKLINEKKEDGKVFWQNLAGYKRQEALRPYLSSEEDRKKGKKFARYQLGDLLLHLEKKHGEYDWGKVYDEAWERIDKKVEGLSKHIKLEEERRSEDAQSKAALTDWLRAKASFVIEGLKEADKDEFCRCELKLQKWYGDLRGKPFAIEAENSILDISGFSKQYNCAFIWQKDGVKKLNLYLIINYFKGGKLRFKKIKPEAFEANRFYTVINKKSGEIVPMEVNFNFDDPNLIILPLAFGKRQGREFIWNDLLSLETGSLKLANGRVIEKTLYNRRTRQDEPALFVALTFERREVLDSSNIKPMNLIGVDRGENIPAVIALTDPEGCPLSRFKDSLGNPTHILRIGESYKEKQRTIQAKKEVEQRRAGGYSRKYASKAKNLADDMVRNTARDLLYYAVTQDAMLIFENLSRGFGRQGKRTFMAERQYTRMEDWLTAKLAYEGLPSKTYLSKTLAQYTSKTCSNCGFTITSADYDRVLEKLKKTATGWMTTINGKELKVEGQITYYNRYKRQNVVKDLSVELDRLSEESVNNDISSWTKGRSGEALSLLKKRFSHRPVQEKFVCLNCGFETHADEQAALNIARSWLFLRSQEYKKYQTNKTTGNTDKRAFVETWQSFYRKKLKEVWKPAV

SEQ ID NO: 48839 - protein, 978 aa, synthetic construct
  REGION 1..978: note = engineered CasX variant
QEIKRINKIRRRLVKDSNTKKAGKTGPMKTLLVRVMTPDLRERLENLRKKPPNIPQPISNTSRANLNKLLTDYTEMKKAILHVYWEEFQKDPVGLMSRVAQPASKKIDQNKLKPEMDEKGNLTTAGFACSQCGQPLFVYKLEQVSEKGKAYTNYFGRCNVAEHEKLILLAQLKPEKDSDEAVTYSLGKFGQRALDFYSIHVTKESTHPVKPLAQIAGNRYASGPVGKALRDACMGTIASFLSKYQDIIIEHQKVVKGNQKRLESLRELAGKENLEYPSVTLPPQPHTKEGVDAYNEVIARVRMWVNLNLWQKLKLSRDDAKPLLRLKGFPSFPLVERQANEVDWWDMVCNVKKLINEKKEDGKVFWQNLAGYKRQEALRPYLSSEEDRKKGKKFARYQLGDLLLHLEKKHGEDWGDVYDEAWERIDKKVEGLSKHIKLEEERRSEDAQSKAALTDWLRAKASFVIEGLKEADKDEFCRCELKLQKWYGDLRGKPFAIEAENSILDISGFSKQYNCAFIWQKDGVKKLNLYLIINYFKGGKLRFKKIKPEAFEANRFYTVINKKSGEIVPMEVNFNFDDPNLIILPLAFGKRQGREFIWNDLLSLETGSLKLANGRVIEKTLYNRRTRQDEPALFVALTFERREVLDSSNIKPMNLIGVDRGENIPAVIALTDPEGCPLSRFKDSLGNPTHILRIGESYKEKQRTIQAKKEVEQRRAGGYSRKYASKAKNLADDMVRNTARDLLYYAVTQDAMLIFENLSRGFGRQGKRTFMAERQYTRMEDWLTAKLAYEGLPSKTYLSKTLAQYTSKTCSNCGFTITSADYDRVLEKLKKTATGWMTTINGKELKVEGQITYYNRYKRQNVVKDLSVELDRLSEESVNNDISSWTKGRSGEALSLLKKRFSHRPVQEKFVCLNCGFETHADEQAALNIARSWLFLRSQEYKKYQTNKTTGNTDKRAFVETWQSFYRKKLKEVWKPAV

SEQ ID NO: 48840 - protein, 978 aa, synthetic construct
  REGION 1..978: note = engineered CasX variant
QEIKRINKIRRRLVKDSNTKKAGKTGPMKTLLVRVMTPDLRERLENLRKKPPNIPQPISNTSRANLNKLLTDYTEMKKAILHVYWEEFQKDPVGLMSRVAQPASKKIDQNKLKPEMDEKGNLTTAGFACSQCGQPLFVYKLEQVSEKGKAYTNYFGRCNVAEHEKLILLAQLKPEKDSDEAVTYSLGKFGQRALDFYSIHVTKESTHPVKPLAQIAGNRYASGPVGKALRDACMGTIASFLSKYQDIIIEHQKVVKGNQKRLESLRELAGKENLEYPSVTLPPQPHTKEGVDAYNEVIARVRMWVNLNLWQKLKLSRDDAKPLLRLKGFPSFPLVERQANEVDWWDMVCNVKKLINEKKEDGKVFWQNLAGYKRQEALRPYLSSEEDRKKGKKFARYQLGDLLLHLEKKHGEDWGKVYGEAWERIDKKVEGLSKHIKLEEERRSEDAQSKAALTDWLRAKASFVIEGLKEADKDEFCRCELKLQKWYGDLRGKPFAIEAENSILDISGFSKQYNCAFIWQKDGVKKLNLYLIINYFKGGKLRFKKIKPEAFEANRFYTVINKKSGEIVPMEVNFNFDDPNLIILPLAFGKRQGREFIWNDLLSLETGSLKLANGRVIEKTLYNRRTRQDEPALFVALTFERREVLDSSNIKPMNLIGVDRGENIPAVIALTDPEGCPLSRFKDSLGNPTHILRIGESYKEKQRTIQAKKEVEQRRAGGYSRKYASKAKNLADDMVRNTARDLLYYAVTQDAMLIFENLSRGFGRQGKRTFMAERQYTRMEDWLTAKLAYEGLPSKTYLSKTLAQYTSKTCSNCGFTITSADYDRVLEKLKKTATGWMTTINGKELKVEGQITYYNRYKRQNVVKDLSVELDRLSEESVNNDISSWTKGRSGEALSLLKKRFSHRPVQEKFVCLNCGFETHADEQAALNIARSWLFLRSQEYKKYQTNKTTGNTDKRAFVETWQSFYRKKLKEVWKPAV

SEQ ID NO: 48841 - protein, 978 aa, synthetic construct
  REGION 1..978: note = engineered CasX variant
QEIKRINKIRRRLVKDSNTKKAGKTGPMKTLLVRVMTPDLRERLENLRKKPPNIPQPISNTSRANLNKLLTDYTEMKKAILHVYWEEFQKDPVGLMSRVAQPASKKIDQNKLKPEMDEKGNLTTAGFACSQCGQPLFVYKLEQVSEKGKAYTNYFGRCNVAEHEKLILLAQLKPEKDSDEAVTYSLGKFGQRALDFYSIHVTKESTHPVKPLAQIAGNRYASGPVGKALRDACMGTIASFLSKYQDIIIEHQKVVKGNQKRLESLRELAGKENLEYPSVTLPPQPHTKEGVDAYNEVIARVRMWVNLNLWQKLKLSRDDAKPLLRLKGFPSFPLVERQANEVDWWDMVCNVKKLINEKKEDGKVFWQNLAGYKRQEALRPYLSSEEDRKKGKKFARYQLGDLLLHLEKKHGEDWGKVYDEAWERIDKKVEGLSKHIKLEEERRSEDAQSKAALTDWLRAKASFVIEGKKEADKDEFCRCELKLQKWYGDLRGKPFAIEAENSILDISGFSKQYNCAFIWQKDGVKKLNLYLIINYFKGGKLRFKKIKPEAFEANRFYTVINKKSGEIVPMEVNFNFDDPNLIILPLAFGKRQGREFIWNDLLSLETGSLKLANGRVIEKTLYNRRTRQDEPALFVALTFERREVLDSSNIKPMNLIGVDRGENIPAVIALTDPEGCPLSRFKDSLGNPTHILRIGESYKEKQRTIQAKKEVEQRRAGGYSRKYASKAKNLADDMVRNTARDLLYYAVTQDAMLIFENLSRGFGRQGKRTFMAERQYTRMEDWLTAKLAYEGLPSKTYLSKTLAQYTSKTCSNCGFTITSADYDRVLEKLKKTATGWMTTINGKELKVEGQITYYNRYKRQNVVKDLSVELDRLSEESVNNDISSWTKGRSGEALSLLKKRFSHRPVQEKFVCLNCGFETHADEQAALNIARSWLFLRSQEYKKYQTNKTTGNTDKRAFVETWQSFYRKKLKEVWKPAV

SEQ ID NO: 48842 - protein, 978 aa, synthetic construct
  REGION 1..978: note = engineered CasX variant
QEIKRINKIRRRLVKDSNTKKAGKTGPMKTLLVRVMTPDLRERLENLRKKPPNIPQPISNTSRANLNKLLTDYTEMKKAILHVYWEEFQKDPVGLMSRVAQPASKKIDQNKLKPEMDEKGNLTTAGFACSQCGQPLFVYKLEQVSEKGKAYTNYFGRCNVAEHEKLILLAQLKPEKDSDEAVTYSLGKFGQRALDFYSIHVTKESTHPVKPLAQIAGNRYASGPVGKALRDACMGTIASFLSKYQDIIIEHQKVVKGNQKRLESLRELAGKENLEYPSVTLPPQPHTKEGVDAYNEVIARVRMWVNLNLWQKLKLSRDDAKPLLRLKGFPSFPLVERQANEVDWWDMVCNVKKLINEKKEDGKVFWQNLAGYKRQEALRPYLSSEEDRKKGKKFARYQLGDLLLHLEKKHGEDWGKVYDEAWERIDKKVEGLSKHIKLEEERRSEDAQSKAALTDWLRAKASFVIEGSKEADKDEFCRCELKLQKWYGDLRGKPFAIEAENSILDISGFSKQYNCAFIWQKDGVKKLNLYLIINYFKGGKLRFKKIKPEAFEANRFYTVINKKSGEIVPMEVNFNFDDPNLIILPLAFGKRQGREFIWNDLLSLETGSLKLANGRVIEKTLYNRRTRQDEPALFVALTFERREVLDSSNIKPMNLIGVDRGENIPAVIALTDPEGCPLSRFKDSLGNPTHILRIGESYKEKQRTIQAKKEVEQRRAGGYSRKYASKAKNLADDMVRNTARDLLYYAVTQDAMLIFENLSRGFGRQGKRTFMAERQYTRMEDWLTAKLAYEGLPSKTYLSKTLAQYTSKTCSNCGFTITSADYDRVLEKLKKTATGWMTTINGKELKVEGQITYYNRYKRQNVVKDLSVELDRLSEESVNNDISSWTKGRSGEALSLLKKRFSHRPVQEKFVCLNCGFETHADEQAALNIARSWLFLRSQEYKKYQTNKTTGNTDKRAFVETWQSFYRKKLKEVWKPAV

SEQ ID NO: 48843 - protein, 979 aa, synthetic construct
  REGION 1..979: note = engineered CasX variant
QEIKRINKIRRRLVKDSNTKKAGKTGPMKTLLVRVMTPDLRERLENLRKKPPNIPQPISNTSRANLNKLLTDYTEMKKAILHVYWEEFQKDPVGLMSRVAQPASKKIDQNKLKPEMDEKGNLTTAGFACSQCGQPLFVYKLEQVSEKGKAYTNYFGRCNVAEHEKLILLAQLKPEKDSDEAVTYSLGKFGQRALDFYSIHVTKESTHPVKPLAQIAGNRYASGPVGKALRDACMGTIASFLSKYQDIIIEHQKVVKGNQKRLESLRELAGKENLEYPSVTLPPQPHTKEGVDAYNEVIARVRMWVNLNLWQKLKLSRDDAKPLLRLKGFPSFPLVERQANEVDWWDMVCNVKKLINEKKEDGKVFWQNLAGYKRQEALRPYLSSEEDRKKGKKFARYQLGDLLLHLEKKHGEDWGKVYDEAWERIDKKVEGLSKHIKLEEERRSEDAQSKAALTDWLRAKASFVIEGLKEADDKDEFCRCELKLQKWYGDLRGKPFAIEAENSILDISGFSKQYNCAFIWQKDGVKKLNLYLIINYFKGGKLRFKKIKPEAFEANRFYTVINKKSGEIVPMEVNFNFDDPNLIILPLAFGKRQGREFIWNDLLSLETGSLKLANGRVIEKTLYNRRTRQDEPALFVALTFERREVLDSSNIKPMNLIGVDRGENIPAVIALTDPEGCPLSRFKDSLGNPTHILRIGESYKEKQRTIQAKKEVEQRRAGGYSRKYASKAKNLADDMVRNTARDLLYYAVTQDAMLIFENLSRGFGRQGKRTFMAERQYTRMEDWLTAKLAYEGLPSKTYLSKTLAQYTSKTCSNCGFTITSADYDRVLEKLKKTATGWMTTINGKELKVEGQITYYNRYKRQNVVKDLSVELDRLSEESVNNDISSWTKGRSGEALSLLKKRFSHRPVQEKFVCLNCGFETHADEQAALNIARSWLFLRSQEYKKYQTNKTTGNTDKRAFVETWQSFYRKKLKEVWKPAV

SEQ ID NO: 48844 - protein, 979 aa, synthetic construct
  REGION 1..979: note = engineered CasX variant
QEIKRINKIRRRLVKDSNTKKAGKTGPMKTLLVRVMTPDLRERLENLRKKPPNIPQPISNTSRANLNKLLTDYTEMKKAILHVYWEEFQKDPVGLMSRVAQPASKKIDQNKLKPEMDEKGNLTTAGFACSQCGQPLFVYKLEQVSEKGKAYTNYFGRCNVAEHEKLILLAQLKPEKDSDEAVTYSLGKFGQRALDFYSIHVTKESTHPVKPLAQIAGNRYASGPVGKALRDACMGTIASFLSKYQDIIIEHQKVVKGNQKRLESLRELAGKENLEYPSVTLPPQPHTKEGVDAYNEVIARVRMWVNLNLWQKLKLSRDDAKPLLRLKGFPSFPLVERQANEVDWWDMVCNVKKLINEKKEDGKVFWQNLAGYKRQEALRPYLSSEEDRKKGKKFARYQLGDLLLHLEKKHGEDWGKVYDEAWERIDKKVEGLSKHIKLEEERRSEDAQSKAALTDWLRAKASFVIEGLKEADKDEFCRCELKLQKWYGDLRGKPFAIEAENSILDISGFSKQYNCAFIWQKDGVKKLNLYLIINYFKGGKLRFKKIKPEAFEANRFYTVINKKSGEIVPMEVNFNFDDPNLIILPLAFGKRQGREFIWNDLLSLETGSLKLANGRVIEKTLYNRRTRQDEPALFVALTFERREVLDSSNIKPMNLIGVDRGENIPAVIALTDPEGCPLSRFKDSLGNPTHILRIGESYKEKQRTIQAKKEVEQRRAGGYSRKYASKAKNLADDMVRNTARDLLYYAVTQDAMLIFENLSRGFGRQGKRTFMAERQYTRMEDWLTAKLAYEGLPSKTYLSKTLAQYTSKTCSNCGFTITSADYDRVLEKLKKTATGWMTTINGKELKVEGQITYYNRYKRQNVVKDLSVELDRLSEESVNNDISSWTKGRSGNEALSLLKKRFSHRPVQEKFVCLNCGFETHADEQAALNIARSWLFLRSQEYKKYQTNKTTGNTDKRAFVETWQSFYRKKLKEVWKPAV

SEQ ID NO: 48845 - protein, 978 aa, synthetic construct
  REGION 1..978: note = engineered CasX variant
QEIKRINKIRRRLVKDSNTKKAGKTGPMKTLLVRVMTPDLRERLENLRKKPPNIPQPISNTSRANLNKLLTDYTEMKKAILHVYWEEFQKDPVGLMSRVAQPASKKIDQNKLKPEMDEKGNLTTAGFACSQCGQPLFVYKLEQVSEKGKAYTNYFGRCNVAEHEKLILLAQLKPEKDSDEAVTYSLGKFGQRALDFYSIHVTKESTHPVKPLAQIAGNRYASGPVGKALRDACMGTIASFLSKYQDIIIEHQKVVKGNQKRLESLRELAGKENLEYPSVTLPPQPHTKEGVDAYNEVIARVRMWVNLNLWQKLKLSRDDAKPLLRLKGFPSFPLVERQANEVDWWDMVCNVKKLINEKKEDGKVFWQNLAGYKRQEALRPYLSSEEDRQKGKKFARYQLGDLLLHLEKKHGEDWGKVYDEAWERIDKKVEGLSKHIKLEEERRSEDAQSKAALTDWLRAKASFVIEGLKEADKDEFCRCELKLQKWYGDLRGKPFAIEAENSILDISGFSKQYNCAFIWQKDGVKKLNLYLIINYFKGGKLRFKKIKPEAFEANRFYTVINKKSGEIVPMEVNFNFDDPNLIILPLAFGKRQGREFIWNDLLSLETGSLKLANGRVIEKTLYNRRTRQDEPALFVALTFERREVLDSSNIKPMNLIGVDRGENIPAVIALTDPEGCPLSRFKDSLGNPTHILRIGESYKEKQRTIQAKKEVEQRRAGGYSRKYASKAKNLADDMVRNTARDLLYYAVTQDAMLIFENLSRGFGRQGKRTFMAERQYTRMEDWLTAKLAYEGLPSKTYLSKTLAQYTSKTCSNCGFTITSADYDRVLEKLKKTATGWMTTINGKELKVEGQITYYNRYKRQNVVKDLSVELDRLSEESVNNDISSWTKGRSGEALSLLKKRFSHRPVQEKFVCLNCGFETHADEQAALNIARSWLFLRSQEYKKYQTNKTTGNTDKRAFVETWQSFYRKKLKEVWKPAV

SEQ ID NO: 48846 - protein, 978 aa, synthetic construct
  REGION 1..978: note = engineered CasX variant
QEIKRINKIRRRLVKDSNTKKAGKTGPMKTLLVRVMTPDLRERLENLRKKPPNIPQPISNTSRANLNKLLTDYTEMKKAILHVYWEEFQKDPVGLMSRVAQPASKKIDQNKLKPEMDEKGNLTTAGFACSQCGQPLFVYKLEQVSEKGKAYTNYFGRCNVAEHEKLILLAQLKPEKDSDEAVTYSLGKFGQRALDFYSIHVTKESTHPVKPLAQIAGNRYASGPVGKALRDACMGTIASFLSKYQDIIIEHQKVVKGNQKRLESLRELAGKENLEYPSVTLPPQPHTKEGVDAYNEVIARVRMWVNLNLWQKLKLSRDDAKPLLRLKGFPSFPLVERQANEVDWWDMVCNVKKLINEKKEDGKVFWQNLAGYKRQEALRPYLSSEEDRKKGKKFARYQLGDLLLHLEKKHGEDWGKVYDEAWERIDKKVEGLSKHIKLEEERRSEDAQSKAALTDWLRAKASFVIEGLKEADKDEFCRCELKLQKWYGDLRGKPFAIEAENSILDISGFSKQYNCAFIWQKDGVKKLNLYLIINYFKGGKLRFKKIKPEAFEANRFYTVINKKSGEIVPMEVNFNFDDPNLIILPLAFGKRQGREFIWNDLLSLETGSLKLANGRVIEKTLYNRRTRQDEPALFVALTFERREVLDSSNIKPMNLIGVDRGENIPAVIALTDPEGCPLSRFKDSLGNPTHILRIGESYKEKQRTIQAKKEVEQRRAGGYSRKYASKAKNLADDMVRNTARDLLYYAVTQDAMLIFENLSRGFGRQGKRTFMAERQYTRMEDWLTAKLAYEGLPSQTYLSKTLAQYTSKTCSNCGFTITSADYDRVLEKLKKTATGWMTTINGKELKVEGQITYYNRYKRQNVVKDLSVELDRLSEESVNNDISSWTKGRSGEALSLLKKRFSHRPVQEKFVCLNCGFETHADEQAALNIARSWLFLRSQEYKKYQTNKTTGNTDKRAFVETWQSFYRKKLKEVWKPAV

SEQ ID NO: 48847 - protein, 978 aa, synthetic construct
  REGION 1..978: note = engineered CasX variant
QEIKRINKIRRRLVKDSNTKKAGKTGPMKTLLVRVMTPDLRERLENLRKKPPNIPQPISNTSRANLNKLLTDYTEMKKAILHVYWEEFQKDPVGLMSRVAQPASKKIDQNKLKPEMDEKGNLTTAGFACSQCGQPLFVYKLEQVSEKGKAYTNYFGRCNVAEHEKLILLAQLKPEKDSDEAVTYSLGKFGQRALDFYSIHVTKESTHPVKPLAQIAGNRYASGPVGKALRDACMGTIASFLSKYQDIIIEHQKVVKGNQKRLESLRELAGKENLEYPSVTLPPQPHTKEGVDAYNEVIARVRMWVNLNLWQKLKLSRDDAKPLLRLKGFPSFPLVERQANEVDWWDMVCNVKKLINEKKEDGKVFWQNLAGYKRQEALRPYLSSEEDRKKGKKFARYQLGDLLLHLEKKHGEDWGKVYDEAWERIDKKVEGLSKHIKLEEERRSEDAQSKAALTDWLRAKASFVIEGLKEADKDEFCRCELKLQKWYGDLRGKPFAIEAENSILDISGFSKQYNCAFIWQKDGVKKLNLYLIINYFKGGKLRFKKIKPEAFEANRFYTVINKKSGEIVPMEVNFNFDDPNLIILPLAFGKRQGREFIWNDLLSLETGSLKLANGRVIEKTLYNRRTRQDEPALFVALTFERREVLDSSNIKPMNLIGVDRGENIPAVIALTDPEGCPLSRFKDSLGNPTHILRIGESYKEKQRTIQAKKEVEQRRAGGYSRKYASKAKNLADDMVRNTARDLLYYAVTQDAMLIFENLSRGFGRQGKRTFMAERQYTRMEDWLTAKLAYNGLPSKTYLSKTLAQYTSKTCSNCGFTITSADYDRVLEKLKKTATGWMTTINGKELKVEGQITYYNRYKRQNVVKDLSVELDRLSEESVNNDISSWTKGRSGEALSLLKKRFSHRPVQEKFVCLNCGFETHADEQAALNIARSWLFLRSQEYKKYQTNKTTGNTDKRAFVETWQSFYRKKLKEVWKPAV

SEQ ID NO: 48848 - protein, 978 aa, synthetic construct
  REGION 1..978: note = engineered CasX variant
QEIKRINKIRRRLVKDSNTKKAGKTGPMKTLLVRVMTPDLRERLENLRKKPPNIPQPISNTSRANLNKLLTDYTEMKKAILHVYWEEFQKDPVGLMSRVAQPASKKIDQNKLKPEMDEKGNLTTAGFACSQCGQPLFVYKLEQVSEKGKAYTNYFGRCNVAEHEKLIQLAQLKPEKDSDEAVTYSLGKFGQRALDFYSIHVTKESTHPVKPLAQIAGNRYASGPVGKALRDACMGTIASFLSKYQDIIIEHQKVVKGNQKRLESLRELAGKENLEYPSVTLPPQPHTKEGVDAYNEVIARVRMWVNLNLWQKLKLSRDDAKPLLRLKGFPSFPLVERQANEVDWWDMVCNVKKLINEKKEDGKVFWQNLAGYKRQEALRPYLSSEEDRKKGKKFARYQLGDLLLHLEKKHGEDWGKVYDEAWERIDKKVEGLSKHIKLEEERRSEDAQSKAALTDWLRAKASFVIEGLKEADKDEFCRCELKLQKWYGDLRGKPFAIEAENSILDISGFSKQYNCAFIWQKDGVKKLNLYLIINYFKGGKLRFKKIKPEAFEANRFYTVINKKSGEIVPMEVNFNFDDPNLIILPLAFGKRQGREFIWNDLLSLETGSLKLANGRVIEKTLYNRRTRQDEPALFVALTFERREVLDSSNIKPMNLIGVDRGENIPAVIALTDPEGCPLSRFKDSLGNPTHILRIGESYKEKQRTIQAKKEVEQRRAGGYSRKYASKAKNLADDMVRNTARDLLYYAVTQDAMLIFENLSRGFGRQGKRTFMAERQYTRMEDWLTAKLAYEGLPSKTYLSKTLAQYTSKTCSNCGFTITSADYDRVLEKLKKTATGWMTTINGKELKVEGQITYYNRYKRQNVVKDLSVELDRLSEESVNNDISSWTKGRSGEALSLLKKRFSHRPVQEKFVCLNCGFETHADEQAALNIARSWLFLRSQEYKKYQTNKTTGNTDKRAFVETWQSFYRKKLKEVWKPAV

SEQ ID NO: 48849 - protein, 978 aa, synthetic construct
  REGION 1..978: note = engineered CasX variant
QEIKRINKIRRRLVKDSNTKKAGKTGPMKTLLVRVMTPDLRERLENLRKKPPNIPQPISNTSRANLNKLLTDYTEMKKAILHVYWEEFQKDPVGLMSRVAQPASKKIDQNKLKPEMDEKGNLTTAGFACSQCGQPLFVYKLEQVSEKGKAYTNYFGRCNVAEHEKLILLAQLKPEKDSDEAVTYSLGKFGQRALDFYSIHVTKESTHPVKPLAQIAGNRYASGPVGKALRDACMGTIASFLSKYQDIIIEHQKVVKGNQKRLESLRELAGKENLEYPSVTLPPQPHTKEGVDAYNEVIARVRMWVNLNLWQKLKLSRDDAKPLLRLKGFPSFPLVERQANEVDWWDMVCNVKKLINEKKEDGKVFWQNLAIYKRQEALRPYLSSEEDRKKGKKFARYQLGDLLLHLEKKHGEDWGKVYDEAWERIDKKVEGLSKHIKLEEERRSEDAQSKAALTDWLRAKASFVIEGLKEADKDEFCRCELKLQKWYGDLRGKPFAIEAENSILDISGFSKQYNCAFIWQKDGVKKLNLYLIINYFKGGKLRFKKIKPEAFEANRFYTVINKKSGEIVPMEVNFNFDDPNLIILPLAFGKRQGREFIWNDLLSLETGSLKLANGRVIEKTLYNRRTRQDEPALFVALTFERREVLDSSNIKPMNLIGVDRGENIPAVIALTDPEGCPLSRFKDSLGNPTHILRIGESYKEKQRTIQAKKEVEQRRAGGYSRKYASKAKNLADDMVRNTARDLLYYAVTQDAMLIFENLSRGFGRQGKRTFMAERQYTRMEDWLTAKLAYEGLPSKTYLSKTLAQYTSKTCSNCGFTITSADYDRVLEKLKKTATGWMTTINGKELKVEGQITYYNRYKRQNVVKDLSVELDRLSEESVNNDISSWTKGRSGEALSLLKKRFSHRPVQEKFVCLNCGFETHADEQAALNIARSWLFLRSQEYKKYQTNKTTGNTDKRAFVETWQSFYRKKLKEVWKPAV

SEQ ID NO: 48850 - protein, 978 aa, synthetic construct
  REGION 1..978: note = engineered CasX variant
QEIKRINKIRRRLVKDSNTKKAGKTGPMKTLLVRVMTPDLRERLENLRKKPPNIPQPISNTSRANLNKLLTDYTEMKKAILHVYWEEFQKDPVGLMSRVAQPASKKIDQNKLKPEMDEKGNLTTAGFACSQCGQPLFVYKLEQVSEKGKAYTNYFGRCNVAEHEKLILLAQLKPEKDSDEAVTYSLGKFGQRALDFYSIHVTKESTHPVKPLAQIAGNRYASGPVGKALRDACMGTIASFLSKYQDIIIEHQKVVKGNQKRLESLRELAGKENLEYPSVTLPPQPHTKEGVDAYNEVIARVRMWVNLNLWQKLKLSRDDAKPLLRLKGFPSFPLVERQANEVDWWDMVCNVKKLINEKKEDGKVFWQNLAGYKRQEALRPYLSSEEDREKGKKFARYQLGDLLLHLEKKHGEDWGKVYDEAWERIDKKVEGLSKHIKLEEERRSEDAQSKAALTDWLRAKASFVIEGLKEADKDEFCRCELKLQKWYGDLRGKPFAIEAENSILDISGFSKQYNCAFIWQKDGVKKLNLYLIINYFKGGKLRFKKIKPEAFEANRFYTVINKKSGEIVPMEVNFNFDDPNLIILPLAFGKRQGREFIWNDLLSLETGSLKLANGRVIEKTLYNRRTRQDEPALFVALTFERREVLDSSNIKPMNLIGVDRGENIPAVIALTDPEGCPLSRFKDSLGNPTHILRIGESYKEKQRTIQAKKEVEQRRAGGYSRKYASKAKNLADDMVRNTARDLLYYAVTQDAMLIFENLSRGFGRQGKRTFMAERQYTRMEDWLTAKLAYEGLPSKTYLSKTLAQYTSKTCSNCGFTITSADYDRVLEKLKKTATGWMTTINGKELKVEGQITYYNRYKRQNVVKDLSVELDRLSEESVNNDISSWTKGRSGEALSLLKKRFSHRPVQEKFVCLNCGFETHADEQAALNIARSWLFLRSQEYKKYQTNKTTGNTDKRAFVETWQSFYRKKLKEVWKPAV

SEQ ID NO: 48851 - protein, 978 aa, synthetic construct
  REGION 1..978: note = engineered CasX variant
QEIKRINKIRRRLVKDSNTKKAGKTGPMKTLLVRVMTPDLRERLENLRKKPPNIPQPISNTSRANLNKLLTDYTEMKKAILHVYWEEFQKDPVGLMSRVAQPASKKIDQNKLKPEMDEKGNLTTAGFACSQCGQPLFVYKLEQVSEKGKAYTNYFGRCNVAEHEKLILLAQLKPEKDSDEAVTYSLGKFGQRALDFYSIHVTKESTHPVKPLAQIAGNRYASGPVGKALRDACMGTIASFLSKYQDIIIEHQKVVKGNQKRLESLRELAGKENLEYPSVTLPPQPHTKEGVDAYNEVIARVRMWVNLNLWQKLKLSRDDAKPLLRLKGFPSFPLVERQANEVDWWDMVCNVKKLINEKKEDGKVFWQNLAGYKRQEALRPYLSSEEDRKKGKKFARYQLGDLLLHLEKKHGEDWGKVYDEAWERIDKKVEGLSKHIKLEEERRSEDAQSKAALTDWLRAKASFVIEGLKEADKDEFCRCELKLQKWYGDLRGKPFAIEAENSILDISGFSKQYNCAFIWQKDGVKKLNLYLIINYFKGGKLRFKKIKPEAFEANRFYTVINKKSGEIVIMEVNFNFDDPNLIILPLAFGKRQGREFIWNDLLSLETGSLKLANGRVIEKTLYNRRTRQDEPALFVALTFERREVLDSSNIKPMNLIGVDRGENIPAVIALTDPEGCPLSRFKDSLGNPTHILRIGESYKEKQRTIQAKKEVEQRRAGGYSRKYASKAKNLADDMVRNTARDLLYYAVTQDAMLIFENLSRGFGRQGKRTFMAERQYTRMEDWLTAKLAYEGLPSKTYLSKTLAQYTSKTCSNCGFTITSADYDRVLEKLKKTATGWMTTINGKELKVEGQITYYNRYKRQNVVKDLSVELDRLSEESVNNDISSWTKGRSGEALSLLKKRFSHRPVQEKFVCLNCGFETHADEQAALNIARSWLFLRSQEYKKYQTNKTTGNTDKRAFVETWQSFYRKKLKEVWKPAV

SEQ ID NO: 48852 - protein, 978 aa, synthetic construct
  REGION 1..978: note = engineered CasX variant
QEIKRINKIRRRLVKDSNTKKAGKTGPMKTLLVRVMTPDLRERLENLRKKPENIPQPISNTSQANLNKLLTDYTEMKKAILHVYWEEFQKDPVGLMSRVAQPASKKIDQNKLKPEMDEKGNLTTAGFACSQCGQPLFVYKLEQVSEKGKAYTNYFGRCNVAEHEKLILLAQLKPEKDSDEAVTYSLGKFGQRALDFYSIHVTKESTHPVKPLAQIAGNRYASGPVGKALRGACMGTIASFLSKYQDIIIEHQKVVKGNQKRLESLRELAGKENLEYPSVTLPPQPHTKEGVDAYNEVIARVRMWVNLNLWQKLKLSRDDAKPLLRLKGFPSFPLVERQANEVDWWDMVCNVKKLINEKKEDGKVFWQNLAGYKRQEALRPYLSSEEDRKKGKKFARYQLGDLLLHLEKKHGEDWGKVYDEAWERIDKKVEGLSKHIKLEEERRSEDAQSKAALTDWLRAKASFVIEGLKEADKDEFCRCELKLQKWYGDLRGKPFAIEAENSILDISGFSKQYNCAFIWQKDGVKKLNLYLIINYFKGGKLRFKKIKPEAFEANRFYTVINKKSGEIVPMEVNFNFDDPNLIILPLAFGKRQGREFIWNDLLSLETGSLKLANGRVIEKTLYNRRTRQDEPALFVALTFERREVLDSSNIKPMNLIGVDRGENIPAVIALTDPEGCPLSRFKDSLGNPTHILRIGESYKEKQRTIQAKKEVEQRRAGGYSRKYASKAKNLADDMVRNTARDLLYYAVTQDAMLIFENLSRGFGRQGKRTFMAERQYTRMEDWLTAKLAYEGLPSKTYLSKTLAQYTSKTCSNCGFTITSADYDRVLEKLKKTATGWMTTINGKELKVEGQITYYNRYKRQNVVKDLSVELDRLSEESVNNDISSWTKGRSGEALSLLKKRFSHRPVQEKFVCLNCGFETHADEQAALNIARSWLFLRSQEYKKYQTNKTTGNTDKRAFVETWQSFYRKKLKEVWKPAV

SEQ ID NO: 48853 - protein, 978 aa, synthetic construct
  REGION 1..978: note = engineered CasX variant
QEIKRINKIRRRLVKDSNTKKAGKTGPMKTLLVRVMTPDLRERLENLRKKPENIPQPISNTSQANLNKLLTDYTEMKKAILHVYWEEFQKDPVGLMSRVAQPASKKIDQNKLKPEMDEKGNLTTAGFACSQCGQPLFVYKLEQVSEKGKAYTNYFGRCNVAEHEKLILLAQLKPEKDSDEAVTYSLGKFGQRALDFYSIHVTKESTHPVKPLAQIAGNRYASGPVGKALRDACMGTIASFLSKYQDIIIEHQKVVKGNQKRLESLRELAGKENLEYPSVTLPPQPHTKEGVDAYNEVIARVRMWVNLNLWQKLKLSRDDAKPLLRLKNFPSFPLVERQANEVDWWDMVCNVKKLINEKKEDGKVFWQNLAGYKRQEALRPYLSSEEDRKKGKKFARYQLGDLLLHLEKKHGEDWGKVYDEAWERIDKKVEGLSKHIKLEEERRSEDAQSKAALTDWLRAKASFVIEGLKEADKDEFCRCELKLQKWYGDLRGKPFAIEAENSILDISGFSKQYNCAFIWQKDGVKKLNLYLIINYFKGGKLRFKKIKPEAFEANRFYTVINKKSGEIVPMEVNFNFDDPNLIILPLAFGKRQGREFIWNDLLSLETGSLKLANGRVIEKTLYNRRTRQDEPALFVALTFERREVLDSSNIKPMNLIGVDRGENIPAVIALTDPEGCPLSRFKDSLGNPTHILRIGESYKEKQRTIQAKKEVEQRRAGGYSRKYASKAKNLADDMVRNTARDLLYYAVTQDAMLIFENLSRGFGRQGKRTFMAERQYTRMEDWLTAKLAYEGLPSKTYLSKTLAQYTSKTCSNCGFTITSADYDRVLEKLKKTATGWMTTINGKELKVEGQITYYNRYKRQNVVKDLSVELDRLSEESVNNDISSWTKGRSGEALSLLKKRFSHRPVQEKFVCLNCGFETHADEQAALNIARSWLFLRSQEYKKYQTNKTTGNTDKRAFVETWQSFYRKKLKEVWKPAV

SEQ ID NO: 48854 - protein, 978 aa, synthetic construct
  REGION 1..978: note = engineered CasX variant
QEIKRINKIRRRLVKDSNTKKAGKTGPMKTLLVRVMTPDLRERLENLRKKPENIPQPISNTSQANLNKLLTDYTEMKKAILHVYWEEFQKDPVGLMSRVAQPASKKIDQNKLKPEMDEKGNLTTAGFACSQCGQPLFVYKLEQVSEKGKAYTNYFGRCNVAEHEKLILLAQLKPEKDSDEAVTYSLGKFGQRALDFYSIHVTKESTHPVKPLAQIAGNRYASGPVGKALRDACMGTIASFLSKYQDIIIEHQKVVKGNQKRLESLRELAGKENLEYPSVTLPPQPHTKEGVDAYNEVIARVRMWVNLNLWQKLKLSRDDAKPLLRLKGFPSFPLVERQANEVDWWDMVCNVKKLINEKKEDGKVFWQNLAGYKRQEALRPYLSSEEDRKKGKKFARYQLGDLLNHLEKKHGEDWGKVYDEAWERIDKKVEGLSKHIKLEEERRSEDAQSKAALTDWLRAKASFVIEGLKEADKDEFCRCELKLQKWYGDLRGKPFAIEAENSILDISGFSKQYNCAFIWQKDGVKKLNLYLIINYFKGGKLRFKKIKPEAFEANRFYTVINKKSGEIVPMEVNFNFDDPNLIILPLAFGKRQGREFIWNDLLSLETGSLKLANGRVIEKTLYNRRTRQDEPALFVALTFERREVLDSSNIKPMNLIGVDRGENIPAVIALTDPEGCPLSRFKDSLGNPTHILRIGESYKEKQRTIQAKKEVEQRRAGGYSRKYASKAKNLADDMVRNTARDLLYYAVTQDAMLIFENLSRGFGRQGKRTFMAERQYTRMEDWLTAKLAYEGLPSKTYLSKTLAQYTSKTCSNCGFTITSADYDRVLEKLKKTATGWMTTINGKELKVEGQITYYNRYKRQNVVKDLSVELDRLSEESVNNDISSWTKGRSGEALSLLKKRFSHRPVQEKFVCLNCGFETHADEQAALNIARSWLFLRSQEYKKYQTNKTTGNTDKRAFVETWQSFYRKKLKEVWKPAV

SEQ ID NO: 48855 - protein, 978 aa, synthetic construct
  REGION 1..978: note = engineered CasX variant
QEIKRINKIRRRLVKDSNTKKAGKTGPMKTLLVRVMTPDLRERLENLRKKPENIPQPISNTSQANLNKLLTDYTEMKKAILHVYWEEFQKDPVGLMSRVAQPASKKIDQNKLKPEMDEKGNLTTAGFACSQCGQPLFVYKLEQVSEKGKAYTNYFGRCNVAEHEKLILLAQLKPEKDSDEAVTYSLGKFGQRALDFYSIHVTKESTHPVKPLAQIAGNRYASGPVGKALRDACMGTIASFLSKYQDIIIEHQKVVKGNQKRLESLRELAGKENLEYPSVTLPPQPHTKEGVDAYNEVIARVRMWVNLNLWQKLKLSRDDAKPLLRLKGFPSFPLVERQANEVDWWDMVCNVKKLINEKKEDGKVFWQNLAGYKRQEALRPYLSSEEDRKKGKKFARYQLGDLLWHLEKKHGEDWGKVYDEAWERIDKKVEGLSKHIKLEEERRSEDAQSKAALTDWLRAKASFVIEGLKEADKDEFCRCELKLQKWYGDLRGKPFAIEAENSILDISGFSKQYNCAFIWQKDGVKKLNLYLIINYFKGGKLRFKKIKPEAFEANRFYTVINKKSGEIVPMEVNFNFDDPNLIILPLAFGKRQGREFIWNDLLSLETGSLKLANGRVIEKTLYNRRTRQDEPALFVALTFERREVLDSSNIKPMNLIGVDRGENIPAVIALTDPEGCPLSRFKDSLGNPTHILRIGESYKEKQRTIQAKKEVEQRRAGGYSRKYASKAKNLADDMVRNTARDLLYYAVTQDAMLIFENLSRGFGRQGKRTFMAERQYTRMEDWLTAKLAYEGLPSKTYLSKTLAQYTSKTCSNCGFTITSADYDRVLEKLKKTATGWMTTINGKELKVEGQITYYNRYKRQNVVKDLSVELDRLSEESVNNDISSWTKGRSGEALSLLKKRFSHRPVQEKFVCLNCGFETHADEQAALNIARSWLFLRSQEYKKYQTNKTTGNTDKRAFVETWQSFYRKKLKEVWKPAV

SEQ ID NO: 48856 - protein, 978 aa, synthetic construct
  REGION 1..978: note = engineered CasX variant
QEIKRINKIRRRLVKDSNTKKAGKTGPMKTLLVRVMTPDLRERLENLRKKPENIPQPISNTSQANLNKLLTDYTEMKKAILHVYWEEFQKDPVGLMSRVAQPASKKIDQNKLKPEMDEKGNLTTAGFACSQCGQPLFVYKLEQVSEKGKAYTNYFGRCNVAEHEKLILLAQLKPEKDSDEAVTYSLGKFGQRALDFYSIHVTKESTHPVKPLAQIAGNRYASGPVGKALRDACMGTIASFLSKYQDIIIEHQKVVKGNQKRLESLRELAGKENLEYPSVTLPPQPHTKEGVDAYNEVIARVRMWVNLNLWQKLKLSRDDAKPLLRLKGFPSFPLVERQANEVDWWDMVCNVKKLINEKKEDGKVFWQNLAGYKRQEALRPYLSSEEDRKKGKKFARYQLGDLLLHLYKKHGEDWGKVYDEAWERIDKKVEGLSKHIKLEEERRSEDAQSKAALTDWLRAKASFVIEGLKEADKDEFCRCELKLQKWYGDLRGKPFAIEAENSILDISGFSKQYNCAFIWQKDGVKKLNLYLIINYFKGGKLRFKKIKPEAFEANRFYTVINKKSGEIVPMEVNFNFDDPNLIILPLAFGKRQGREFIWNDLLSLETGSLKLANGRVIEKTLYNRRTRQDEPALFVALTFERREVLDSSNIKPMNLIGVDRGENIPAVIALTDPEGCPLSRFKDSLGNPTHILRIGESYKEKQRTIQAKKEVEQRRAGGYSRKYASKAKNLADDMVRNTARDLLYYAVTQDAMLIFENLSRGFGRQGKRTFMAERQYTRMEDWLTAKLAYEGLPSKTYLSKTLAQYTSKTCSNCGFTITSADYDRVLEKLKKTATGWMTTINGKELKVEGQITYYNRYKRQNVVKDLSVELDRLSEESVNNDISSWTKGRSGEALSLLKKRFSHRPVQEKFVCLNCGFETHADEQAALNIARSWLFLRSQEYKKYQTNKTTGNTDKRAFVETWQSFYRKKLKEVWKPAV

SEQ ID NO: 48857 - protein, 978 aa, synthetic construct
  REGION 1..978: note = engineered CasX variant
QEIKRINKIRRRLVKDSNTKKAGKTGPMKTLLVRVMTPDLRERLENLRKKPENIPQPISNTSQANLNKLLTDYTEMKKAILHVYWEEFQKDPVGLMSRVAQPASKKIDQNKLKPEMDEKGNLTTAGFACSQCGQPLFVYKLEQVSEKGKAYTNYFGRCNVAEHEKLILLAQLKPEKDSDEAVTYSLGKFGQRALDFYSIHVTKESTHPVKPLAQIAGNRYASGPVGKALRDACMGTIASFLSKYQDIIIEHQKVVKGNQKRLESLRELAGKENLEYPSVTLPPQPHTKEGVDAYNEVIARVRMWVNLNLWQKLKLSRDDAKPLLRLKGFPSFPLVERQANEVDWWDMVCNVKKLINEKKEDGKVFWQNLAGYKRQEALRPYLSSEEDRKKGKKFARYQLGDLLLHLEKKHPEDWGKVYDEAWERIDKKVEGLSKHIKLEEERRSEDAQSKAALTDWLRAKASFVIEGLKEADKDEFCRCELKLQKWYGDLRGKPFAIEAENSILDISGFSKQYNCAFIWQKDGVKKLNLYLIINYFKGGKLRFKKIKPEAFEANRFYTVINKKSGEIVPMEVNFNFDDPNLIILPLAFGKRQGREFIWNDLLSLETGSLKLANGRVIEKTLYNRRTRQDEPALFVALTFERREVLDSSNIKPMNLIGVDRGENIPAVIALTDPEGCPLSRFKDSLGNPTHILRIGESYKEKQRTIQAKKEVEQRRAGGYSRKYASKAKNLADDMVRNTARDLLYYAVTQDAMLIFENLSRGFGRQGKRTFMAERQYTRMEDWLTAKLAYEGLPSKTYLSKTLAQYTSKTCSNCGFTITSADYDRVLEKLKKTATGWMTTINGKELKVEGQITYYNRYKRQNVVKDLSVELDRLSEESVNNDISSWTKGRSGEALSLLKKRFSHRPVQEKFVCLNCGFETHADEQAALNIARSWLFLRSQEYKKYQTNKTTGNTDKRAFVETWQSFYRKKLKEVWKPAV

SEQ ID NO: 48858 - protein, 979 aa, synthetic construct
  REGION 1..979: note = engineered CasX variant
QEIKRINKIRRRLVKDSNTKKAGKTGPMKTLLVRVMTPDLRERLENLRKKPENIPQPISNTSQANLNKLLTDYTEMKKAILHVYWEEFQKDPVGLMSRVAQPASKKIDQNKLKPEMDEKGNLTTAGFACSQCGQPLFVYKLEQVSEKGKAYTNYFGRCNVAEHEKLILLAQLKPEKDSDEAVTYSLGKFGQRALDFYSIHVTKESTHPVKPLAQIAGNRYASGPVGKALRDACMGTIASFLSKYQDIIIEHQKVVKGNQKRLESLRELAGKENLEYPSVTLPPQPHTKEGVDAYNEVIARVRMWVNLNLWQKLKLSRDDAKPLLRLKGFPSFPLVERQANEVDWWDMVCNVKKLINEKKEDGKVFWQNLAGYKRQEALRPYLSSEEDRKKGKKFARYQLGDLLLHLEKKHGERDWGKVYDEAWERIDKKVEGLSKHIKLEEERRSEDAQSKAALTDWLRAKASFVIEGLKEADKDEFCRCELKLQKWYGDLRGKPFAIEAENSILDISGFSKQYNCAFIWQKDGVKKLNLYLIINYFKGGKLRFKKIKPEAFEANRFYTVINKKSGEIVPMEVNFNFDDPNLIILPLAFGKRQGREFIWNDLLSLETGSLKLANGRVIEKTLYNRRTRQDEPALFVALTFERREVLDSSNIKPMNLIGVDRGENIPAVIALTDPEGCPLSRFKDSLGNPTHILRIGESYKEKQRTIQAKKEVEQRRAGGYSRKYASKAKNLADDMVRNTARDLLYYAVTQDAMLIFENLSRGFGRQGKRTFMAERQYTRMEDWLTAKLAYEGLPSKTYLSKTLAQYTSKTCSNCGFTITSADYDRVLEKLKKTATGWMTTINGKELKVEGQITYYNRYKRQNVVKDLSVELDRLSEESVNNDISSWTKGRSGEALSLLKKRFSHRPVQEKFVCLNCGFETHADEQAALNIARSWLFLRSQEYKKYQTNKTTGNTDKRAFVETWQSFYRKKLKEVWKPAV

SEQ ID NO: 48859 - protein, 979 aa, synthetic construct
  REGION 1..979: note = engineered CasX variant
QEIKRINKIRRRLVKDSNTKKAGKTGPMKTLLVRVMTPDLRERLENLRKKPENIPQPISNTSQANLNKLLTDYTEMKKAILHVYWEEFQKDPVGLMSRVAQPASKKIDQNKLKPEMDEKGNLTTAGFACSQCGQPLFVYKLEQVSEKGKAYTNYFGRCNVAEHEKLILLAQLKPEKDSDEAVTYSLGKFGQRALDFYSIHVTKESTHPVKPLAQIAGNRYASGPVGKALRDACMGTIASFLSKYQDIIIEHQKVVKGNQKRLESLRELAGKENLEYPSVTLPPQPHTKEGVDAYNEVIARVRMWVNLNLWQKLKLSRDDAKPLLRLKGFPSFPLVERQANEVDWWDMVCNVKKLINEKKEDGKVFWQNLAGYKRQEALRPYLSSEEDRKKGKKFARYQLGDLLLHLEKKHGEYDWGKVYDEAWERIDKKVEGLSKHIKLEEERRSEDAQSKAALTDWLRAKASFVIEGLKEADKDEFCRCELKLQKWYGDLRGKPFAIEAENSILDISGFSKQYNCAFIWQKDGVKKLNLYLIINYFKGGKLRFKKIKPEAFEANRFYTVINKKSGEIVPMEVNFNFDDPNLIILPLAFGKRQGREFIWNDLLSLETGSLKLANGRVIEKTLYNRRTRQDEPALFVALTFERREVLDSSNIKPMNLIGVDRGENIPAVIALTDPEGCPLSRFKDSLGNPTHILRIGESYKEKQRTIQAKKEVEQRRAGGYSRKYASKAKNLADDMVRNTARDLLYYAVTQDAMLIFENLSRGFGRQGKRTFMAERQYTRMEDWLTAKLAYEGLPSKTYLSKTLAQYTSKTCSNCGFTITSADYDRVLEKLKKTATGWMTTINGKELKVEGQITYYNRYKRQNVVKDLSVELDRLSEESVNNDISSWTKGRSGEALSLLKKRFSHRPVQEKFVCLNCGFETHADEQAALNIARSWLFLRSQEYKKYQTNKTTGNTDKRAFVETWQSFYRKKLKEVWKPAV

SEQ ID NO: 48860 - protein, 978 aa, synthetic construct
  REGION 1..978: note = engineered CasX variant
QEIKRINKIRRRLVKDSNTKKAGKTGPMKTLLVRVMTPDLRERLENLRKKPENIPQPISNTSQANLNKLLTDYTEMKKAILHVYWEEFQKDPVGLMSRVAQPASKKIDQNKLKPEMDEKGNLTTAGFACSQCGQPLFVYKLEQVSEKGKAYTNYFGRCNVAEHEKLILLAQLKPEKDSDEAVTYSLGKFGQRALDFYSIHVTKESTHPVKPLAQIAGNRYASGPVGKALRDACMGTIASFLSKYQDIIIEHQKVVKGNQKRLESLRELAGKENLEYPSVTLPPQPHTKEGVDAYNEVIARVRMWVNLNLWQKLKLSRDDAKPLLRLKGFPSFPLVERQANEVDWWDMVCNVKKLINEKKEDGKVFWQNLAGYKRQEALRPYLSSEEDRKKGKKFARYQLGDLLLHLEKKHGEDWGDVYDEAWERIDKKVEGLSKHIKLEEERRSEDAQSKAALTDWLRAKASFVIEGLKEADKDEFCRCELKLQKWYGDLRGKPFAIEAENSILDISGFSKQYNCAFIWQKDGVKKLNLYLIINYFKGGKLRFKKIKPEAFEANRFYTVINKKSGEIVPMEVNFNFDDPNLIILPLAFGKRQGREFIWNDLLSLETGSLKLANGRVIEKTLYNRRTRQDEPALFVALTFERREVLDSSNIKPMNLIGVDRGENIPAVIALTDPEGCPLSRFKDSLGNPTHILRIGESYKEKQRTIQAKKEVEQRRAGGYSRKYASKAKNLADDMVRNTARDLLYYAVTQDAMLIFENLSRGFGRQGKRTFMAERQYTRMEDWLTAKLAYEGLPSKTYLSKTLAQYTSKTCSNCGFTITSADYDRVLEKLKKTATGWMTTINGKELKVEGQITYYNRYKRQNVVKDLSVELDRLSEESVNNDISSWTKGRSGEALSLLKKRFSHRPVQEKFVCLNCGFETHADEQAALNIARSWLFLRSQEYKKYQTNKTTGNTDKRAFVETWQSFYRKKLKEVWKPAV

SEQ ID NO: 48861 - protein, 978 aa, synthetic construct
  REGION 1..978: note = engineered CasX variant
QEIKRINKIRRRLVKDSNTKKAGKTGPMKTLLVRVMTPDLRERLENLRKKPENIPQPISNTSQANLNKLLTDYTEMKKAILHVYWEEFQKDPVGLMSRVAQPASKKIDQNKLKPEMDEKGNLTTAGFACSQCGQPLFVYKLEQVSEKGKAYTNYFGRCNVAEHEKLILLAQLKPEKDSDEAVTYSLGKFGQRALDFYSIHVTKESTHPVKPLAQIAGNRYASGPVGKALRDACMGTIASFLSKYQDIIIEHQKVVKGNQKRLESLRELAGKENLEYPSVTLPPQPHTKEGVDAYNEVIARVRMWVNLNLWQKLKLSRDDAKPLLRLKGFPSFPLVERQANEVDWWDMVCNVKKLINEKKEDGKVFWQNLAGYKRQEALRPYLSSEEDRKKGKKFARYQLGDLLLHLEKKHGEDWGKVYGEAWERIDKKVEGLSKHIKLEEERRSEDAQSKAALTDWLRAKASFVIEGLKEADKDEFCRCELKLQKWYGDLRGKPFAIEAENSILDISGFSKQYNCAFIWQKDGVKKLNLYLIINYFKGGKLRFKKIKPEAFEANRFYTVINKKSGEIVPMEVNFNFDDPNLIILPLAFGKRQGREFIWNDLLSLETGSLKLANGRVIEKTLYNRRTRQDEPALFVALTFERREVLDSSNIKPMNLIGVDRGENIPAVIALTDPEGCPLSRFKDSLGNPTHILRIGESYKEKQRTIQAKKEVEQRRAGGYSRKYASKAKNLADDMVRNTARDLLYYAVTQDAMLIFENLSRGFGRQGKRTFMAERQYTRMEDWLTAKLAYEGLPSKTYLSKTLAQYTSKTCSNCGFTITSADYDRVLEKLKKTATGWMTTINGKELKVEGQITYYNRYKRQNVVKDLSVELDRLSEESVNNDISSWTKGRSGEALSLLKKRFSHRPVQEKFVCLNCGFETHADEQAALNIARSWLFLRSQEYKKYQTNKTTGNTDKRAFVETWQSFYRKKLKEVWKPAV

SEQ ID NO: 48862 - protein, 978 aa, synthetic construct
  REGION 1..978: note = engineered CasX variant
QEIKRINKIRRRLVKDSNTKKAGKTGPMKTLLVRVMTPDLRERLENLRKKPENIPQPISNTSQANLNKLLTDYTEMKKAILHVYWEEFQKDPVGLMSRVAQPASKKIDQNKLKPEMDEKGNLTTAGFACSQCGQPLFVYKLEQVSEKGKAYTNYFGRCNVAEHEKLILLAQLKPEKDSDEAVTYSLGKFGQRALDFYSIHVTKESTHPVKPLAQIAGNRYASGPVGKALRDACMGTIASFLSKYQDIIIEHQKVVKGNQKRLESLRELAGKENLEYPSVTLPPQPHTKEGVDAYNEVIARVRMWVNLNLWQKLKLSRDDAKPLLRLKGFPSFPLVERQANEVDWWDMVCNVKKLINEKKEDGKVFWQNLAGYKRQEALRPYLSSEEDRKKGKKFARYQLGDLLLHLEKKHGEDWGKVYDEAWERIDKKVEGLSKHIKLEEERRSEDAQSKAALTDWLRAKASFVIEGKKEADKDEFCRCELKLQKWYGDLRGKPFAIEAENSILDISGFSKQYNCAFIWQKDGVKKLNLYLIINYFKGGKLRFKKIKPEAFEANRFYTVINKKSGEIVPMEVNFNFDDPNLIILPLAFGKRQGREFIWNDLLSLETGSLKLANGRVIEKTLYNRRTRQDEPALFVALTFERREVLDSSNIKPMNLIGVDRGENIPAVIALTDPEGCPLSRFKDSLGNPTHILRIGESYKEKQRTIQAKKEVEQRRAGGYSRKYASKAKNLADDMVRNTARDLLYYAVTQDAMLIFENLSRGFGRQGKRTFMAERQYTRMEDWLTAKLAYEGLPSKTYLSKTLAQYTSKTCSNCGFTITSADYDRVLEKLKKTATGWMTTINGKELKVEGQITYYNRYKRQNVVKDLSVELDRLSEESVNNDISSWTKGRSGEALSLLKKRFSHRPVQEKFVCLNCGFETHADEQAALNIARSWLFLRSQEYKKYQTNKTTGNTDKRAFVETWQSFYRKKLKEVWKPAV

SEQ ID NO: 48863 - protein, 978 aa, synthetic construct
  REGION 1..978: note = engineered CasX variant
QEIKRINKIRRRLVKDSNTKKAGKTGPMKTLLVRVMTPDLRERLENLRKKPENIPQPISNTSQANLNKLLTDYTEMKKAILHVYWEEFQKDPVGLMSRVAQPASKKIDQNKLKPEMDEKGNLTTAGFACSQCGQPLFVYKLEQVSEKGKAYTNYFGRCNVAEHEKLILLAQLKPEKDSDEAVTYSLGKFGQRALDFYSIHVTKESTHPVKPLAQIAGNRYASGPVGKALRDACMGTIASFLSKYQDIIIEHQKVVKGNQKRLESLRELAGKENLEYPSVTLPPQPHTKEGVDAYNEVIARVRMWVNLNLWQKLKLSRDDAKPLLRLKGFPSFPLVERQANEVDWWDMVCNVKKLINEKKEDGKVFWQNLAGYKRQEALRPYLSSEEDRKKGKKFARYQLGDLLLHLEKKHGEDWGKVYDEAWERIDKKVEGLSKHIKLEEERRSEDAQSKAALTDWLRAKASFVIEGSKEADKDEFCRCELKLQKWYGDLRGKPFAIEAENSILDISGFSKQYNCAFIWQKDGVKKLNLYLIINYFKGGKLRFKKIKPEAFEANRFYTVINKKSGEIVPMEVNFNFDDPNLIILPLAFGKRQGREFIWNDLLSLETGSLKLANGRVIEKTLYNRRTRQDEPALFVALTFERREVLDSSNIKPMNLIGVDRGENIPAVIALTDPEGCPLSRFKDSLGNPTHILRIGESYKEKQRTIQAKKEVEQRRAGGYSRKYASKAKNLADDMVRNTARDLLYYAVTQDAMLIFENLSRGFGRQGKRTFMAERQYTRMEDWLTAKLAYEGLPSKTYLSKTLAQYTSKTCSNCGFTITSADYDRVLEKLKKTATGWMTTINGKELKVEGQITYYNRYKRQNVVKDLSVELDRLSEESVNNDISSWTKGRSGEALSLLKKRFSHRPVQEKFVCLNCGFETHADEQAALNIARSWLFLRSQEYKKYQTNKTTGNTDKRAFVETWQSFYRKKLKEVWKPAV

SEQ ID NO: 48864 - protein, 979 aa, synthetic construct
  REGION 1..979: note = engineered CasX variant
QEIKRINKIRRRLVKDSNTKKAGKTGPMKTLLVRVMTPDLRERLENLRKKPENIPQPISNTSQANLNKLLTDYTEMKKAILHVYWEEFQKDPVGLMSRVAQPASKKIDQNKLKPEMDEKGNLTTAGFACSQCGQPLFVYKLEQVSEKGKAYTNYFGRCNVAEHEKLILLAQLKPEKDSDEAVTYSLGKFGQRALDFYSIHVTKESTHPVKPLAQIAGNRYASGPVGKALRDACMGTIASFLSKYQDIIIEHQKVVKGNQKRLESLRELAGKENLEYPSVTLPPQPHTKEGVDAYNEVIARVRMWVNLNLWQKLKLSRDDAKPLLRLKGFPSFPLVERQANEVDWWDMVCNVKKLINEKKEDGKVFWQNLAGYKRQEALRPYLSSEEDRKKGKKFARYQLGDLLLHLEKKHGEDWGKVYDEAWERIDKKVEGLSKHIKLEEERRSEDAQSKAALTDWLRAKASFVIEGLKEADDKDEFCRCELKLQKWYGDLRGKPFAIEAENSILDISGFSKQYNCAFIWQKDGVKKLNLYLIINYFKGGKLRFKKIKPEAFEANRFYTVINKKSGEIVPMEVNFNFDDPNLIILPLAFGKRQGREFIWNDLLSLETGSLKLANGRVIEKTLYNRRTRQDEPALFVALTFERREVLDSSNIKPMNLIGVDRGENIPAVIALTDPEGCPLSRFKDSLGNPTHILRIGESYKEKQRTIQAKKEVEQRRAGGYSRKYASKAKNLADDMVRNTARDLLYYAVTQDAMLIFENLSRGFGRQGKRTFMAERQYTRMEDWLTAKLAYEGLPSKTYLSKTLAQYTSKTCSNCGFTITSADYDRVLEKLKKTATGWMTTINGKELKVEGQITYYNRYKRQNVVKDLSVELDRLSEESVNNDISSWTKGRSGEALSLLKKRFSHRPVQEKFVCLNCGFETHADEQAALNIARSWLFLRSQEYKKYQTNKTTGNTDKRAFVETWQSFYRKKLKEVWKPAV

SEQ ID NO: 48865 - protein, 979 aa, synthetic construct
  REGION 1..979: note = engineered CasX variant
QEIKRINKIRRRLVKDSNTKKAGKTGPMKTLLVRVMTPDLRERLENLRKKPENIPQPISNTSQANLNKLLTDYTEMKKAILHVYWEEFQKDPVGLMSRVAQPASKKIDQNKLKPEMDEKGNLTTAGFACSQCGQPLFVYKLEQVSEKGKAYTNYFGRCNVAEHEKLILLAQLKPEKDSDEAVTYSLGKFGQRALDFYSIHVTKESTHPVKPLAQIAGNRYASGPVGKALRDACMGTIASFLSKYQDIIIEHQKVVKGNQKRLESLRELAGKENLEYPSVTLPPQPHTKEGVDAYNEVIARVRMWVNLNLWQKLKLSRDDAKPLLRLKGFPSFPLVERQANEVDWWDMVCNVKKLINEKKEDGKVFWQNLAGYKRQEALRPYLSSEEDRKKGKKFARYQLGDLLLHLEKKHGEDWGKVYDEAWERIDKKVEGLSKHIKLEEERRSEDAQSKAALTDWLRAKASFVIEGLKEADKDEFCRCELKLQKWYGDLRGKPFAIEAENSILDISGFSKQYNCAFIWQKDGVKKLNLYLIINYFKGGKLRFKKIKPEAFEANRFYTVINKKSGEIVPMEVNFNFDDPNLIILPLAFGKRQGREFIWNDLLSLETGSLKLANGRVIEKTLYNRRTRQDEPALFVALTFERREVLDSSNIKPMNLIGVDRGENIPAVIALTDPEGCPLSRFKDSLGNPTHILRIGESYKEKQRTIQAKKEVEQRRAGGYSRKYASKAKNLADDMVRNTARDLLYYAVTQDAMLIFENLSRGFGRQGKRTFMAERQYTRMEDWLTAKLAYEGLPSKTYLSKTLAQYTSKTCSNCGFTITSADYDRVLEKLKKTATGWMTTINGKELKVEGQITYYNRYKRQNVVKDLSVELDRLSEESVNNDISSWTKGRSGNEALSLLKKRFSHRPVQEKFVCLNCGFETHADEQAALNIARSWLFLRSQEYKKYQTNKTTGNTDKRAFVETWQSFYRKKLKEVWKPAV

SEQ ID NO: 48866 - protein, 978 aa, synthetic construct
  REGION 1..978: note = engineered CasX variant
QEIKRINKIRRRLVKDSNTKKAGKTGPMKTLLVRVMTPDLRERLENLRKKPENIPQPISNTSQANLNKLLTDYTEMKKAILHVYWEEFQKDPVGLMSRVAQPASKKIDQNKLKPEMDEKGNLTTAGFACSQCGQPLFVYKLEQVSEKGKAYTNYFGRCNVAEHEKLILLAQLKPEKDSDEAVTYSLGKFGQRALDFYSIHVTKESTHPVKPLAQIAGNRYASGPVGKALRDACMGTIASFLSKYQDIIIEHQKVVKGNQKRLESLRELAGKENLEYPSVTLPPQPHTKEGVDAYNEVIARVRMWVNLNLWQKLKLSRDDAKPLLRLKGFPSFPLVERQANEVDWWDMVCNVKKLINEKKEDGKVFWQNLAGYKRQEALRPYLSSEEDRQKGKKFARYQLGDLLLHLEKKHGEDWGKVYDEAWERIDKKVEGLSKHIKLEEERRSEDAQSKAALTDWLRAKASFVIEGLKEADKDEFCRCELKLQKWYGDLRGKPFAIEAENSILDISGFSKQYNCAFIWQKDGVKKLNLYLIINYFKGGKLRFKKIKPEAFEANRFYTVINKKSGEIVPMEVNFNFDDPNLIILPLAFGKRQGREFIWNDLLSLETGSLKLANGRVIEKTLYNRRTRQDEPALFVALTFERREVLDSSNIKPMNLIGVDRGENIPAVIALTDPEGCPLSRFKDSLGNPTHILRIGESYKEKQRTIQAKKEVEQRRAGGYSRKYASKAKNLADDMVRNTARDLLYYAVTQDAMLIFENLSRGFGRQGKRTFMAERQYTRMEDWLTAKLAYEGLPSKTYLSKTLAQYTSKTCSNCGFTITSADYDRVLEKLKKTATGWMTTINGKELKVEGQITYYNRYKRQNVVKDLSVELDRLSEESVNNDISSWTKGRSGEALSLLKKRFSHRPVQEKFVCLNCGFETHADEQAALNIARSWLFLRSQEYKKYQTNKTTGNTDKRAFVETWQSFYRKKLKEVWKPAV

SEQ ID NO: 48867 - protein, 978 aa, synthetic construct
  REGION 1..978: note = engineered CasX variant
QEIKRINKIRRRLVKDSNTKKAGKTGPMKTLLVRVMTPDLRERLENLRKKPENIPQPISNTSQANLNKLLTDYTEMKKAILHVYWEEFQKDPVGLMSRVAQPASKKIDQNKLKPEMDEKGNLTTAGFACSQCGQPLFVYKLEQVSEKGKAYTNYFGRCNVAEHEKLILLAQLKPEKDSDEAVTYSLGKFGQRALDFYSIHVTKESTHPVKPLAQIAGNRYASGPVGKALRDACMGTIASFLSKYQDIIIEHQKVVKGNQKRLESLRELAGKENLEYPSVTLPPQPHTKEGVDAYNEVIARVRMWVNLNLWQKLKLSRDDAKPLLRLKGFPSFPLVERQANEVDWWDMVCNVKKLINEKKEDGKVFWQNLAGYKRQEALRPYLSSEEDRKKGKKFARYQLGDLLLHLEKKHGEDWGKVYDEAWERIDKKVEGLSKHIKLEEERRSEDAQSKAALTDWLRAKASFVIEGLKEADKDEFCRCELKLQKWYGDLRGKPFAIEAENSILDISGFSKQYNCAFIWQKDGVKKLNLYLIINYFKGGKLRFKKIKPEAFEANRFYTVINKKSGEIVPMEVNFNFDDPNLIILPLAFGKRQGREFIWNDLLSLETGSLKLANGRVIEKTLYNRRTRQDEPALFVALTFERREVLDSSNIKPMNLIGVDRGENIPAVIALTDPEGCPLSRFKDSLGNPTHILRIGESYKEKQRTIQAKKEVEQRRAGGYSRKYASKAKNLADDMVRNTARDLLYYAVTQDAMLIFENLSRGFGRQGKRTFMAERQYTRMEDWLTAKLAYEGLPSQTYLSKTLAQYTSKTCSNCGFTITSADYDRVLEKLKKTATGWMTTINGKELKVEGQITYYNRYKRQNVVKDLSVELDRLSEESVNNDISSWTKGRSGEALSLLKKRFSHRPVQEKFVCLNCGFETHADEQAALNIARSWLFLRSQEYKKYQTNKTTGNTDKRAFVETWQSFYRKKLKEVWKPAV

SEQ ID NO: 48868 - protein, 978 aa, synthetic construct
  REGION 1..978: note = engineered CasX variant
QEIKRINKIRRRLVKDSNTKKAGKTGPMKTLLVRVMTPDLRERLENLRKKPENIPQPISNTSQANLNKLLTDYTEMKKAILHVYWEEFQKDPVGLMSRVAQPASKKIDQNKLKPEMDEKGNLTTAGFACSQCGQPLFVYKLEQVSEKGKAYTNYFGRCNVAEHEKLILLAQLKPEKDSDEAVTYSLGKFGQRALDFYSIHVTKESTHPVKPLAQIAGNRYASGPVGKALRDACMGTIASFLSKYQDIIIEHQKVVKGNQKRLESLRELAGKENLEYPSVTLPPQPHTKEGVDAYNEVIARVRMWVNLNLWQKLKLSRDDAKPLLRLKGFPSFPLVERQANEVDWWDMVCNVKKLINEKKEDGKVFWQNLAGYKRQEALRPYLSSEEDRKKGKKFARYQLGDLLLHLEKKHGEDWGKVYDEAWERIDKKVEGLSKHIKLEEERRSEDAQSKAALTDWLRAKASFVIEGLKEADKDEFCRCELKLQKWYGDLRGKPFAIEAENSILDISGFSKQYNCAFIWQKDGVKKLNLYLIINYFKGGKLRFKKIKPEAFEANRFYTVINKKSGEIVPMEVNFNFDDPNLIILPLAFGKRQGREFIWNDLLSLETGSLKLANGRVIEKTLYNRRTRQDEPALFVALTFERREVLDSSNIKPMNLIGVDRGENIPAVIALTDPEGCPLSRFKDSLGNPTHILRIGESYKEKQRTIQAKKEVEQRRAGGYSRKYASKAKNLADDMVRNTARDLLYYAVTQDAMLIFENLSRGFGRQGKRTFMAERQYTRMEDWLTAKLAYNGLPSKTYLSKTLAQYTSKTCSNCGFTITSADYDRVLEKLKKTATGWMTTINGKELKVEGQITYYNRYKRQNVVKDLSVELDRLSEESVNNDISSWTKGRSGEALSLLKKRFSHRPVQEKFVCLNCGFETHADEQAALNIARSWLFLRSQEYKKYQTNKTTGNTDKRAFVETWQSFYRKKLKEVWKPAV

SEQ ID NO: 48869 - protein, 978 aa, synthetic construct
  REGION 1..978: note = engineered CasX variant
QEIKRINKIRRRLVKDSNTKKAGKTGPMKTLLVRVMTPDLRERLENLRKKPENIPQPISNTSQANLNKLLTDYTEMKKAILHVYWEEFQKDPVGLMSRVAQPASKKIDQNKLKPEMDEKGNLTTAGFACSQCGQPLFVYKLEQVSEKGKAYTNYFGRCNVAEHEKLIQLAQLKPEKDSDEAVTYSLGKFGQRALDFYSIHVTKESTHPVKPLAQIAGNRYASGPVGKALRDACMGTIASFLSKYQDIIIEHQKVVKGNQKRLESLRELAGKENLEYPSVTLPPQPHTKEGVDAYNEVIARVRMWVNLNLWQKLKLSRDDAKPLLRLKGFPSFPLVERQANEVDWWDMVCNVKKLINEKKEDGKVFWQNLAGYKRQEALRPYLSSEEDRKKGKKFARYQLGDLLLHLEKKHGEDWGKVYDEAWERIDKKVEGLSKHIKLEEERRSEDAQSKAALTDWLRAKASFVIEGLKEADKDEFCRCELKLQKWYGDLRGKPFAIEAENSILDISGFSKQYNCAFIWQKDGVKKLNLYLIINYFKGGKLRFKKIKPEAFEANRFYTVINKKSGEIVPMEVNFNFDDPNLIILPLAFGKRQGREFIWNDLLSLETGSLKLANGRVIEKTLYNRRTRQDEPALFVALTFERREVLDSSNIKPMNLIGVDRGENIPAVIALTDPEGCPLSRFKDSLGNPTHILRIGESYKEKQRTIQAKKEVEQRRAGGYSRKYASKAKNLADDMVRNTARDLLYYAVTQDAMLIFENLSRGFGRQGKRTFMAERQYTRMEDWLTAKLAYEGLPSKTYLSKTLAQYTSKTCSNCGFTITSADYDRVLEKLKKTATGWMTTINGKELKVEGQITYYNRYKRQNVVKDLSVELDRLSEESVNNDISSWTKGRSGEALSLLKKRFSHRPVQEKFVCLNCGFETHADEQAALNIARSWLFLRSQEYKKYQTNKTTGNTDKRAFVETWQSFYRKKLKEVWKPAV

SEQ ID NO: 48870 - protein, 978 aa, synthetic construct
  REGION 1..978: note = engineered CasX variant
QEIKRINKIRRRLVKDSNTKKAGKTGPMKTLLVRVMTPDLRERLENLRKKPENIPQPISNTSQANLNKLLTDYTEMKKAILHVYWEEFQKDPVGLMSRVAQPASKKIDQNKLKPEMDEKGNLTTAGFACSQCGQPLFVYKLEQVSEKGKAYTNYFGRCNVAEHEKLILLAQLKPEKDSDEAVTYSLGKFGQRALDFYSIHVTKESTHPVKPLAQIAGNRYASGPVGKALRDACMGTIASFLSKYQDIIIEHQKVVKGNQKRLESLRELAGKENLEYPSVTLPPQPHTKEGVDAYNEVIARVRMWVNLNLWQKLKLSRDDAKPLLRLKGFPSFPLVERQANEVDWWDMVCNVKKLINEKKEDGKVFWQNLAIYKRQEALRPYLSSEEDRKKGKKFARYQLGDLLLHLEKKHGEDWGKVYDEAWERIDKKVEGLSKHIKLEEERRSEDAQSKAALTDWLRAKASFVIEGLKEADKDEFCRCELKLQKWYGDLRGKPFAIEAENSILDISGFSKQYNCAFIWQKDGVKKLNLYLIINYFKGGKLRFKKIKPEAFEANRFYTVINKKSGEIVPMEVNFNFDDPNLIILPLAFGKRQGREFIWNDLLSLETGSLKLANGRVIEKTLYNRRTRQDEPALFVALTFERREVLDSSNIKPMNLIGVDRGENIPAVIALTDPEGCPLSRFKDSLGNPTHILRIGESYKEKQRTIQAKKEVEQRRAGGYSRKYASKAKNLADDMVRNTARDLLYYAVTQDAMLIFENLSRGFGRQGKRTFMAERQYTRMEDWLTAKLAYEGLPSKTYLSKTLAQYTSKTCSNCGFTITSADYDRVLEKLKKTATGWMTTINGKELKVEGQITYYNRYKRQNVVKDLSVELDRLSEESVNNDISSWTKGRSGEALSLLKKRFSHRPVQEKFVCLNCGFETHADEQAALNIARSWLFLRSQEYKKYQTNKTTGNTDKRAFVETWQSFYRKKLKEVWKPAV

SEQ ID NO: 48871 - protein, 978 aa, synthetic construct
  REGION 1..978: note = engineered CasX variant
QEIKRINKIRRRLVKDSNTKKAGKTGPMKTLLVRVMTPDLRERLENLRKKPENIPQPISNTSQANLNKLLTDYTEMKKAILHVYWEEFQKDPVGLMSRVAQPASKKIDQNKLKPEMDEKGNLTTAGFACSQCGQPLFVYKLEQVSEKGKAYTNYFGRCNVAEHEKLILLAQLKPEKDSDEAVTYSLGKFGQRALDFYSIHVTKESTHPVKPLAQIAGNRYASGPVGKALRDACMGTIASFLSKYQDIIIEHQKVVKGNQKRLESLRELAGKENLEYPSVTLPPQPHTKEGVDAYNEVIARVRMWVNLNLWQKLKLSRDDAKPLLRLKGFPSFPLVERQANEVDWWDMVCNVKKLINEKKEDGKVFWQNLAGYKRQEALRPYLSSEEDREKGKKFARYQLGDLLLHLEKKHGEDWGKVYDEAWERIDKKVEGLSKHIKLEEERRSEDAQSKAALTDWLRAKASFVIEGLKEADKDEFCRCELKLQKWYGDLRGKPFAIEAENSILDISGFSKQYNCAFIWQKDGVKKLNLYLIINYFKGGKLRFKKIKPEAFEANRFYTVINKKSGEIVPMEVNFNFDDPNLIILPLAFGKRQGREFIWNDLLSLETGSLKLANGRVIEKTLYNRRTRQDEPALFVALTFERREVLDSSNIKPMNLIGVDRGENIPAVIALTDPEGCPLSRFKDSLGNPTHILRIGESYKEKQRTIQAKKEVEQRRAGGYSRKYASKAKNLADDMVRNTARDLLYYAVTQDAMLIFENLSRGFGRQGKRTFMAERQYTRMEDWLTAKLAYEGLPSKTYLSKTLAQYTSKTCSNCGFTITSADYDRVLEKLKKTATGWMTTINGKELKVEGQITYYNRYKRQNVVKDLSVELDRLSEESVNNDISSWTKGRSGEALSLLKKRFSHRPVQEKFVCLNCGFETHADEQAALNIARSWLFLRSQEYKKYQTNKTTGNTDKRAFVETWQSFYRKKLKEVWKPAV

SEQ ID NO: 48872 - protein, 978 aa, synthetic construct
  REGION 1..978: note = engineered CasX variant
QEIKRINKIRRRLVKDSNTKKAGKTGPMKTLLVRVMTPDLRERLENLRKKPENIPQPISNTSQANLNKLLTDYTEMKKAILHVYWEEFQKDPVGLMSRVAQPASKKIDQNKLKPEMDEKGNLTTAGFACSQCGQPLFVYKLEQVSEKGKAYTNYFGRCNVAEHEKLILLAQLKPEKDSDEAVTYSLGKFGQRALDFYSIHVTKESTHPVKPLAQIAGNRYASGPVGKALRDACMGTIASFLSKYQDIIIEHQKVVKGNQKRLESLRELAGKENLEYPSVTLPPQPHTKEGVDAYNEVIARVRMWVNLNLWQKLKLSRDDAKPLLRLKGFPSFPLVERQANEVDWWDMVCNVKKLINEKKEDGKVFWQNLAGYKRQEALRPYLSSEEDRKKGKKFARYQLGDLLLHLEKKHGEDWGKVYDEAWERIDKKVEGLSKHIKLEEERRSEDAQSKAALTDWLRAKASFVIEGLKEADKDEFCRCELKLQKWYGDLRGKPFAIEAENSILDISGFSKQYNCAFIWQKDGVKKLNLYLIINYFKGGKLRFKKIKPEAFEANRFYTVINKKSGEIVIMEVNFNFDDPNLIILPLAFGKRQGREFIWNDLLSLETGSLKLANGRVIEKTLYNRRTRQDEPALFVALTFERREVLDSSNIKPMNLIGVDRGENIPAVIALTDPEGCPLSRFKDSLGNPTHILRIGESYKEKQRTIQAKKEVEQRRAGGYSRKYASKAKNLADDMVRNTARDLLYYAVTQDAMLIFENLSRGFGRQGKRTFMAERQYTRMEDWLTAKLAYEGLPSKTYLSKTLAQYTSKTCSNCGFTITSADYDRVLEKLKKTATGWMTTINGKELKVEGQITYYNRYKRQNVVKDLSVELDRLSEESVNNDISSWTKGRSGEALSLLKKRFSHRPVQEKFVCLNCGFETHADEQAALNIARSWLFLRSQEYKKYQTNKTTGNTDKRAFVETWQSFYRKKLKEVWKPAV

SEQ ID NO: 48873 - protein, 978 aa, synthetic construct
  REGION 1..978: note = engineered CasX variant
QEIKRINKIRRRLVKDSNTKKAGKTGPMKTLLVRVMTPDLRERLENLRKKPENIPQPISNTSRANLNKLLTDYTEMKKAILHVYDEEFQKDPVGLMSRVAQPASKKIDQNKLKPEMDEKGNLTTAGFACSQCGQPLFVYKLEQVSEKGKAYTNYFGRCNVAEHEKLILLAQLKPEKDSDEAVTYSLGKFGQRALDFYSIHVTKESTHPVKPLAQIAGNRYASGPVGKALRGACMGTIASFLSKYQDIIIEHQKVVKGNQKRLESLRELAGKENLEYPSVTLPPQPHTKEGVDAYNEVIARVRMWVNLNLWQKLKLSRDDAKPLLRLKGFPSFPLVERQANEVDWWDMVCNVKKLINEKKEDGKVFWQNLAGYKRQEALRPYLSSEEDRKKGKKFARYQLGDLLLHLEKKHGEDWGKVYDEAWERIDKKVEGLSKHIKLEEERRSEDAQSKAALTDWLRAKASFVIEGLKEADKDEFCRCELKLQKWYGDLRGKPFAIEAENSILDISGFSKQYNCAFIWQKDGVKKLNLYLIINYFKGGKLRFKKIKPEAFEANRFYTVINKKSGEIVPMEVNFNFDDPNLIILPLAFGKRQGREFIWNDLLSLETGSLKLANGRVIEKTLYNRRTRQDEPALFVALTFERREVLDSSNIKPMNLIGVDRGENIPAVIALTDPEGCPLSRFKDSLGNPTHILRIGESYKEKQRTIQAKKEVEQRRAGGYSRKYASKAKNLADDMVRNTARDLLYYAVTQDAMLIFENLSRGFGRQGKRTFMAERQYTRMEDWLTAKLAYEGLPSKTYLSKTLAQYTSKTCSNCGFTITSADYDRVLEKLKKTATGWMTTINGKELKVEGQITYYNRYKRQNVVKDLSVELDRLSEESVNNDISSWTKGRSGEALSLLKKRFSHRPVQEKFVCLNCGFETHADEQAALNIARSWLFLRSQEYKKYQTNKTTGNTDKRAFVETWQSFYRKKLKEVWKPAV

SEQ ID NO: 48874 - protein, 978 aa, synthetic construct
  REGION 1..978: note = engineered CasX variant
QEIKRINKIRRRLVKDSNTKKAGKTGPMKTLLVRVMTPDLRERLENLRKKPENIPQPISNTSRANLNKLLTDYTEMKKAILHVYDEEFQKDPVGLMSRVAQPASKKIDQNKLKPEMDEKGNLTTAGFACSQCGQPLFVYKLEQVSEKGKAYTNYFGRCNVAEHEKLILLAQLKPEKDSDEAVTYSLGKFGQRALDFYSIHVTKESTHPVKPLAQIAGNRYASGPVGKALRDACMGTIASFLSKYQDIIIEHQKVVKGNQKRLESLRELAGKENLEYPSVTLPPQPHTKEGVDAYNEVIARVRMWVNLNLWQKLKLSRDDAKPLLRLKNFPSFPLVERQANEVDWWDMVCNVKKLINEKKEDGKVFWQNLAGYKRQEALRPYLSSEEDRKKGKKFARYQLGDLLLHLEKKHGEDWGKVYDEAWERIDKKVEGLSKHIKLEEERRSEDAQSKAALTDWLRAKASFVIEGLKEADKDEFCRCELKLQKWYGDLRGKPFAIEAENSILDISGFSKQYNCAFIWQKDGVKKLNLYLIINYFKGGKLRFKKIKPEAFEANRFYTVINKKSGEIVPMEVNFNFDDPNLIILPLAFGKRQGREFIWNDLLSLETGSLKLANGRVIEKTLYNRRTRQDEPALFVALTFERREVLDSSNIKPMNLIGVDRGENIPAVIALTDPEGCPLSRFKDSLGNPTHILRIGESYKEKQRTIQAKKEVEQRRAGGYSRKYASKAKNLADDMVRNTARDLLYYAVTQDAMLIFENLSRGFGRQGKRTFMAERQYTRMEDWLTAKLAYEGLPSKTYLSKTLAQYTSKTCSNCGFTITSADYDRVLEKLKKTATGWMTTINGKELKVEGQITYYNRYKRQNVVKDLSVELDRLSEESVNNDISSWTKGRSGEALSLLKKRFSHRPVQEKFVCLNCGFETHADEQAALNIARSWLFLRSQEYKKYQTNKTTGNTDKRAFVETWQSFYRKKLKEVWKPAV

SEQ ID NO: 48875 - protein, 978 aa, synthetic construct
  REGION 1..978: note = engineered CasX variant
QEIKRINKIRRRLVKDSNTKKAGKTGPMKTLLVRVMTPDLRERLENLRKKPENIPQPISNTSRANLNKLLTDYTEMKKAILHVYDEEFQKDPVGLMSRVAQPASKKIDQNKLKPEMDEKGNLTTAGFACSQCGQPLFVYKLEQVSEKGKAYTNYFGRCNVAEHEKLILLAQLKPEKDSDEAVTYSLGKFGQRALDFYSIHVTKESTHPVKPLAQIAGNRYASGPVGKALRDACMGTIASFLSKYQDIIIEHQKVVKGNQKRLESLRELAGKENLEYPSVTLPPQPHTKEGVDAYNEVIARVRMWVNLNLWQKLKLSRDDAKPLLRLKGFPSFPLVERQANEVDWWDMVCNVKKLINEKKEDGKVFWQNLAGYKRQEALRPYLSSEEDRKKGKKFARYQLGDLLNHLEKKHGEDWGKVYDEAWERIDKKVEGLSKHIKLEEERRSEDAQSKAALTDWLRAKASFVIEGLKEADKDEFCRCELKLQKWYGDLRGKPFAIEAENSILDISGFSKQYNCAFIWQKDGVKKLNLYLIINYFKGGKLRFKKIKPEAFEANRFYTVINKKSGEIVPMEVNFNFDDPNLIILPLAFGKRQGREFIWNDLLSLETGSLKLANGRVIEKTLYNRRTRQDEPALFVALTFERREVLDSSNIKPMNLIGVDRGENIPAVIALTDPEGCPLSRFKDSLGNPTHILRIGESYKEKQRTIQAKKEVEQRRAGGYSRKYASKAKNLADDMVRNTARDLLYYAVTQDAMLIFENLSRGFGRQGKRTFMAERQYTRMEDWLTAKLAYEGLPSKTYLSKTLAQYTSKTCSNCGFTITSADYDRVLEKLKKTATGWMTTINGKELKVEGQITYYNRYKRQNVVKDLSVELDRLSEESVNNDISSWTKGRSGEALSLLKKRFSHRPVQEKFVCLNCGFETHADEQAALNIARSWLFLRSQEYKKYQTNKTTGNTDKRAFVETWQSFYRKKLKEVWKPAV

SEQ ID NO: 48876 - protein, 978 aa, synthetic construct
  REGION 1..978: note = engineered CasX variant
QEIKRINKIRRRLVKDSNTKKAGKTGPMKTLLVRVMTPDLRERLENLRKKPENIPQPISNTSRANLNKLLTDYTEMKKAILHVYDEEFQKDPVGLMSRVAQPASKKIDQNKLKPEMDEKGNLTTAGFACSQCGQPLFVYKLEQVSEKGKAYTNYFGRCNVAEHEKLILLAQLKPEKDSDEAVTYSLGKFGQRALDFYSIHVTKESTHPVKPLAQIAGNRYASGPVGKALRDACMGTIASFLSKYQDIIIEHQKVVKGNQKRLESLRELAGKENLEYPSVTLPPQPHTKEGVDAYNEVIARVRMWVNLNLWQKLKLSRDDAKPLLRLKGFPSFPLVERQANEVDWWDMVCNVKKLINEKKEDGKVFWQNLAGYKRQEALRPYLSSEEDRKKGKKFARYQLGDLLWHLEKKHGEDWGKVYDEAWERIDKKVEGLSKHIKLEEERRSEDAQSKAALTDWLRAKASFVIEGLKEADKDEFCRCELKLQKWYGDLRGKPFAIEAENSILDISGFSKQYNCAFIWQKDGVKKLNLYLIINYFKGGKLRFKKIKPEAFEANRFYTVINKKSGEIVPMEVNFNFDDPNLIILPLAFGKRQGREFIWNDLLSLETGSLKLANGRVIEKTLYNRRTRQDEPALFVALTFERREVLDSSNIKPMNLIGVDRGENIPAVIALTDPEGCPLSRFKDSLGNPTHILRIGESYKEKQRTIQAKKEVEQRRAGGYSRKYASKAKNLADDMVRNTARDLLYYAVTQDAMLIFENLSRGFGRQGKRTFMAERQYTRMEDWLTAKLAYEGLPSKTYLSKTLAQYTSKTCSNCGFTITSADYDRVLEKLKKTATGWMTTINGKELKVEGQITYYNRYKRQNVVKDLSVELDRLSEESVNNDISSWTKGRSGEALSLLKKRFSHRPVQEKFVCLNCGFETHADEQAALNIARSWLFLRSQEYKKYQTNKTTGNTDKRAFVETWQSFYRKKLKEVWKPAV

SEQ ID NO: 48877 - protein, 978 aa, synthetic construct
  REGION 1..978: note = engineered CasX variant
QEIKRINKIRRRLVKDSNTKKAGKTGPMKTLLVRVMTPDLRERLENLRKKPENIPQPISNTSRANLNKLLTDYTEMKKAILHVYDEEFQKDPVGLMSRVAQPASKKIDQNKLKPEMDEKGNLTTAGFACSQCGQPLFVYKLEQVSEKGKAYTNYFGRCNVAEHEKLILLAQLKPEKDSDEAVTYSLGKFGQRALDFYSIHVTKESTHPVKPLAQIAGNRYASGPVGKALRDACMGTIASFLSKYQDIIIEHQKVVKGNQKRLESLRELAGKENLEYPSVTLPPQPHTKEGVDAYNEVIARVRMWVNLNLWQKLKLSRDDAKPLLRLKGFPSFPLVERQANEVDWWDMVCNVKKLINEKKEDGKVFWQNLAGYKRQEALRPYLSSEEDRKKGKKFARYQLGDLLLHLYKKHGEDWGKVYDEAWERIDKKVEGLSKHIKLEEERRSEDAQSKAALTDWLRAKASFVIEGLKEADKDEFCRCELKLQKWYGDLRGKPFAIEAENSILDISGFSKQYNCAFIWQKDGVKKLNLYLIINYFKGGKLRFKKIKPEAFEANRFYTVINKKSGEIVPMEVNFNFDDPNLIILPLAFGKRQGREFIWNDLLSLETGSLKLANGRVIEKTLYNRRTRQDEPALFVALTFERREVLDSSNIKPMNLIGVDRGENIPAVIALTDPEGCPLSRFKDSLGNPTHILRIGESYKEKQRTIQAKKEVEQRRAGGYSRKYASKAKNLADDMVRNTARDLLYYAVTQDAMLIFENLSRGFGRQGKRTFMAERQYTRMEDWLTAKLAYEGLPSKTYLSKTLAQYTSKTCSNCGFTITSADYDRVLEKLKKTATGWMTTINGKELKVEGQITYYNRYKRQNVVKDLSVELDRLSEESVNNDISSWTKGRSGEALSLLKKRFSHRPVQEKFVCLNCGFETHADEQAALNIARSWLFLRSQEYKKYQTNKTTGNTDKRAFVETWQSFYRKKLKEVWKPAV

SEQ ID NO: 48878 - protein, 978 aa, synthetic construct
  REGION 1..978: note = engineered CasX variant
QEIKRINKIRRRLVKDSNTKKAGKTGPMKTLLVRVMTPDLRERLENLRKKPENIPQPISNTSRANLNKLLTDYTEMKKAILHVYDEEFQKDPVGLMSRVAQPASKKIDQNKLKPEMDEKGNLTTAGFACSQCGQPLFVYKLEQVSEKGKAYTNYFGRCNVAEHEKLILLAQLKPEKDSDEAVTYSLGKFGQRALDFYSIHVTKESTHPVKPLAQIAGNRYASGPVGKALRDACMGTIASFLSKYQDIIIEHQKVVKGNQKRLESLRELAGKENLEYPSVTLPPQPHTKEGVDAYNEVIARVRMWVNLNLWQKLKLSRDDAKPLLRLKGFPSFPLVERQANEVDWWDMVCNVKKLINEKKEDGKVFWQNLAGYKRQEALRPYLSSEEDRKKGKKFARYQLGDLLLHLEKKHPEDWGKVYDEAWERIDKKVEGLSKHIKLEEERRSEDAQSKAALTDWLRAKASFVIEGLKEADKDEFCRCELKLQKWYGDLRGKPFAIEAENSILDISGFSKQYNCAFIWQKDGVKKLNLYLIINYFKGGKLRFKKIKPEAFEANRFYTVINKKSGEIVPMEVNFNFDDPNLIILPLAFGKRQGREFIWNDLLSLETGSLKLANGRVIEKTLYNRRTRQDEPALFVALTFERREVLDSSNIKPMNLIGVDRGENIPAVIALTDPEGCPLSRFKDSLGNPTHILRIGESYKEKQRTIQAKKEVEQRRAGGYSRKYASKAKNLADDMVRNTARDLLYYAVTQDAMLIFENLSRGFGRQGKRTFMAERQYTRMEDWLTAKLAYEGLPSKTYLSKTLAQYTSKTCSNCGFTITSADYDRVLEKLKKTATGWMTTINGKELKVEGQITYYNRYKRQNVVKDLSVELDRLSEESVNNDISSWTKGRSGEALSLLKKRFSHRPVQEKFVCLNCGFETHADEQAALNIARSWLFLRSQEYKKYQTNKTTGNTDKRAFVETWQSFYRKKLKEVWKPAV

SEQ ID NO: 48879 - protein, 979 aa, synthetic construct
  REGION 1..979: note = engineered CasX variant
QEIKRINKIRRRLVKDSNTKKAGKTGPMKTLLVRVMTPDLRERLENLRKKPENIPQPISNTSRANLNKLLTDYTEMKKAILHVYDEEFQKDPVGLMSRVAQPASKKIDQNKLKPEMDEKGNLTTAGFACSQCGQPLFVYKLEQVSEKGKAYTNYFGRCNVAEHEKLILLAQLKPEKDSDEAVTYSLGKFGQRALDFYSIHVTKESTHPVKPLAQIAGNRYASGPVGKALRDACMGTIASFLSKYQDIIIEHQKVVKGNQKRLESLRELAGKENLEYPSVTLPPQPHTKEGVDAYNEVIARVRMWVNLNLWQKLKLSRDDAKPLLRLKGFPSFPLVERQANEVDWWDMVCNVKKLINEKKEDGKVFWQNLAGYKRQEALRPYLSSEEDRKKGKKFARYQLGDLLLHLEKKHGERDWGKVYDEAWERIDKKVEGLSKHIKLEEERRSEDAQSKAALTDWLRAKASFVIEGLKEADKDEFCRCELKLQKWYGDLRGKPFAIEAENSILDISGFSKQYNCAFIWQKDGVKKLNLYLIINYFKGGKLRFKKIKPEAFEANRFYTVINKKSGEIVPMEVNFNFDDPNLIILPLAFGKRQGREFIWNDLLSLETGSLKLANGRVIEKTLYNRRTRQDEPALFVALTFERREVLDSSNIKPMNLIGVDRGENIPAVIALTDPEGCPLSRFKDSLGNPTHILRIGESYKEKQRTIQAKKEVEQRRAGGYSRKYASKAKNLADDMVRNTARDLLYYAVTQDAMLIFENLSRGFGRQGKRTFMAERQYTRMEDWLTAKLAYEGLPSKTYLSKTLAQYTSKTCSNCGFTITSADYDRVLEKLKKTATGWMTTINGKELKVEGQITYYNRYKRQNVVKDLSVELDRLSEESVNNDISSWTKGRSGEALSLLKKRFSHRPVQEKFVCLNCGFETHADEQAALNIARSWLFLRSQEYKKYQTNKTTGNTDKRAFVETWQSFYRKKLKEVWKPAV

SEQ ID NO: 48880 - protein, 979 aa, synthetic construct
  REGION 1..979: note = engineered CasX variant
QEIKRINKIRRRLVKDSNTKKAGKTGPMKTLLVRVMTPDLRERLENLRKKPENIPQPISNTSRANLNKLLTDYTEMKKAILHVYDEEFQKDPVGLMSRVAQPASKKIDQNKLKPEMDEKGNLTTAGFACSQCGQPLFVYKLEQVSEKGKAYTNYFGRCNVAEHEKLILLAQLKPEKDSDEAVTYSLGKFGQRALDFYSIHVTKESTHPVKPLAQIAGNRYASGPVGKALRDACMGTIASFLSKYQDIIIEHQKVVKGNQKRLESLRELAGKENLEYPSVTLPPQPHTKEGVDAYNEVIARVRMWVNLNLWQKLKLSRDDAKPLLRLKGFPSFPLVERQANEVDWWDMVCNVKKLINEKKEDGKVFWQNLAGYKRQEALRPYLSSEEDRKKGKKFARYQLGDLLLHLEKKHGEYDWGKVYDEAWERIDKKVEGLSKHIKLEEERRSEDAQSKAALTDWLRAKASFVIEGLKEADKDEFCRCELKLQKWYGDLRGKPFAIEAENSILDISGFSKQYNCAFIWQKDGVKKLNLYLIINYFKGGKLRFKKIKPEAFEANRFYTVINKKSGEIVPMEVNFNFDDPNLIILPLAFGKRQGREFIWNDLLSLETGSLKLANGRVIEKTLYNRRTRQDEPALFVALTFERREVLDSSNIKPMNLIGVDRGENIPAVIALTDPEGCPLSRFKDSLGNPTHILRIGESYKEKQRTIQAKKEVEQRRAGGYSRKYASKAKNLADDMVRNTARDLLYYAVTQDAMLIFENLSRGFGRQGKRTFMAERQYTRMEDWLTAKLAYEGLPSKTYLSKTLAQYTSKTCSNCGFTITSADYDRVLEKLKKTATGWMTTINGKELKVEGQITYYNRYKRQNVVKDLSVELDRLSEESVNNDISSWTKGRSGEALSLLKKRFSHRPVQEKFVCLNCGFETHADEQAALNIARSWLFLRSQEYKKYQTNKTTGNTDKRAFVETWQSFYRKKLKEVWKPAV

SEQ ID NO: 48881 - protein, 978 aa, synthetic construct
  REGION 1..978: note = engineered CasX variant
QEIKRINKIRRRLVKDSNTKKAGKTGPMKTLLVRVMTPDLRERLENLRKKPENIPQPISNTSRANLNKLLTDYTEMKKAILHVYDEEFQKDPVGLMSRVAQPASKKIDQNKLKPEMDEKGNLTTAGFACSQCGQPLFVYKLEQVSEKGKAYTNYFGRCNVAEHEKLILLAQLKPEKDSDEAVTYSLGKFGQRALDFYSIHVTKESTHPVKPLAQIAGNRYASGPVGKALRDACMGTIASFLSKYQDIIIEHQKVVKGNQKRLESLRELAGKENLEYPSVTLPPQPHTKEGVDAYNEVIARVRMWVNLNLWQKLKLSRDDAKPLLRLKGFPSFPLVERQANEVDWWDMVCNVKKLINEKKEDGKVFWQNLAGYKRQEALRPYLSSEEDRKKGKKFARYQLGDLLLHLEKKHGEDWGDVYDEAWERIDKKVEGLSKHIKLEEERRSEDAQSKAALTDWLRAKASFVIEGLKEADKDEFCRCELKLQKWYGDLRGKPFAIEAENSILDISGFSKQYNCAFIWQKDGVKKLNLYLIINYFKGGKLRFKKIKPEAFEANRFYTVINKKSGEIVPMEVNFNFDDPNLIILPLAFGKRQGREFIWNDLLSLETGSLKLANGRVIEKTLYNRRTRQDEPALFVALTFERREVLDSSNIKPMNLIGVDRGENIPAVIALTDPEGCPLSRFKDSLGNPTHILRIGESYKEKQRTIQAKKEVEQRRAGGYSRKYASKAKNLADDMVRNTARDLLYYAVTQDAMLIFENLSRGFGRQGKRTFMAERQYTRMEDWLTAKLAYEGLPSKTYLSKTLAQYTSKTCSNCGFTITSADYDRVLEKLKKTATGWMTTINGKELKVEGQITYYNRYKRQNVVKDLSVELDRLSEESVNNDISSWTKGRSGEALSLLKKRFSHRPVQEKFVCLNCGFETHADEQAALNIARSWLFLRSQEYKKYQTNKTTGNTDKRAFVETWQSFYRKKLKEVWKPAV

SEQ ID NO: 48882 - protein, 978 aa, synthetic construct
  REGION 1..978: note = engineered CasX variant
QEIKRINKIRRRLVKDSNTKKAGKTGPMKTLLVRVMTPDLRERLENLRKKPENIPQPISNTSRANLNKLLTDYTEMKKAILHVYDEEFQKDPVGLMSRVAQPASKKIDQNKLKPEMDEKGNLTTAGFACSQCGQPLFVYKLEQVSEKGKAYTNYFGRCNVAEHEKLILLAQLKPEKDSDEAVTYSLGKFGQRALDFYSIHVTKESTHPVKPLAQIAGNRYASGPVGKALRDACMGTIASFLSKYQDIIIEHQKVVKGNQKRLESLRELAGKENLEYPSVTLPPQPHTKEGVDAYNEVIARVRMWVNLNLWQKLKLSRDDAKPLLRLKGFPSFPLVERQANEVDWWDMVCNVKKLINEKKEDGKVFWQNLAGYKRQEALRPYLSSEEDRKKGKKFARYQLGDLLLHLEKKHGEDWGKVYGEAWERIDKKVEGLSKHIKLEEERRSEDAQSKAALTDWLRAKASFVIEGLKEADKDEFCRCELKLQKWYGDLRGKPFAIEAENSILDISGFSKQYNCAFIWQKDGVKKLNLYLIINYFKGGKLRFKKIKPEAFEANRFYTVINKKSGEIVPMEVNFNFDDPNLIILPLAFGKRQGREFIWNDLLSLETGSLKLANGRVIEKTLYNRRTRQDEPALFVALTFERREVLDSSNIKPMNLIGVDRGENIPAVIALTDPEGCPLSRFKDSLGNPTHILRIGESYKEKQRTIQAKKEVEQRRAGGYSRKYASKAKNLADDMVRNTARDLLYYAVTQDAMLIFENLSRGFGRQGKRTFMAERQYTRMEDWLTAKLAYEGLPSKTYLSKTLAQYTSKTCSNCGFTITSADYDRVLEKLKKTATGWMTTINGKELKVEGQITYYNRYKRQNVVKDLSVELDRLSEESVNNDISSWTKGRSGEALSLLKKRFSHRPVQEKFVCLNCGFETHADEQAALNIARSWLFLRSQEYKKYQTNKTTGNTDKRAFVETWQSFYRKKLKEVWKPAV

SEQ ID NO: 48883 - protein, 978 aa, synthetic construct
  REGION 1..978: note = engineered CasX variant
QEIKRINKIRRRLVKDSNTKKAGKTGPMKTLLVRVMTPDLRERLENLRKKPENIPQPISNTSRANLNKLLTDYTEMKKAILHVYDEEFQKDPVGLMSRVAQPASKKIDQNKLKPEMDEKGNLTTAGFACSQCGQPLFVYKLEQVSEKGKAYTNYFGRCNVAEHEKLILLAQLKPEKDSDEAVTYSLGKFGQRALDFYSIHVTKESTHPVKPLAQIAGNRYASGPVGKALRDACMGTIASFLSKYQDIIIEHQKVVKGNQKRLESLRELAGKENLEYPSVTLPPQPHTKEGVDAYNEVIARVRMWVNLNLWQKLKLSRDDAKPLLRLKGFPSFPLVERQANEVDWWDMVCNVKKLINEKKEDGKVFWQNLAGYKRQEALRPYLSSEEDRKKGKKFARYQLGDLLLHLEKKHGEDWGKVYDEAWERIDKKVEGLSKHIKLEEERRSEDAQSKAALTDWLRAKASFVIEGKKEADKDEFCRCELKLQKWYGDLRGKPFAIEAENSILDISGFSKQYNCAFIWQKDGVKKLNLYLIINYFKGGKLRFKKIKPEAFEANRFYTVINKKSGEIVPMEVNFNFDDPNLIILPLAFGKRQGREFIWNDLLSLETGSLKLANGRVIEKTLYNRRTRQDEPALFVALTFERREVLDSSNIKPMNLIGVDRGENIPAVIALTDPEGCPLSRFKDSLGNPTHILRIGESYKEKQRTIQAKKEVEQRRAGGYSRKYASKAKNLADDMVRNTARDLLYYAVTQDAMLIFENLSRGFGRQGKRTFMAERQYTRMEDWLTAKLAYEGLPSKTYLSKTLAQYTSKTCSNCGFTITSADYDRVLEKLKKTATGWMTTINGKELKVEGQITYYNRYKRQNVVKDLSVELDRLSEESVNNDISSWTKGRSGEALSLLKKRFSHRPVQEKFVCLNCGFETHADEQAALNIARSWLFLRSQEYKKYQTNKTTGNTDKRAFVETWQSFYRKKLKEVWKPAV

SEQ ID NO: 48884 - protein, 978 aa, synthetic construct
  REGION 1..978: note = engineered CasX variant
QEIKRINKIRRRLVKDSNTKKAGKTGPMKTLLVRVMTPDLRERLENLRKKPENIPQPISNTSRANLNKLLTDYTEMKKAILHVYDEEFQKDPVGLMSRVAQPASKKIDQNKLKPEMDEKGNLTTAGFACSQCGQPLFVYKLEQVSEKGKAYTNYFGRCNVAEHEKLILLAQLKPEKDSDEAVTYSLGKFGQRALDFYSIHVTKESTHPVKPLAQIAGNRYASGPVGKALRDACMGTIASFLSKYQDIIIEHQKVVKGNQKRLESLRELAGKENLEYPSVTLPPQPHTKEGVDAYNEVIARVRMWVNLNLWQKLKLSRDDAKPLLRLKGFPSFPLVERQANEVDWWDMVCNVKKLINEKKEDGKVFWQNLAGYKRQEALRPYLSSEEDRKKGKKFARYQLGDLLLHLEKKHGEDWGKVYDEAWERIDKKVEGLSKHIKLEEERRSEDAQSKAALTDWLRAKASFVIEGSKEADKDEFCRCELKLQKWYGDLRGKPFAIEAENSILDISGFSKQYNCAFIWQKDGVKKLNLYLIINYFKGGKLRFKKIKPEAFEANRFYTVINKKSGEIVPMEVNFNFDDPNLIILPLAFGKRQGREFIWNDLLSLETGSLKLANGRVIEKTLYNRRTRQDEPALFVALTFERREVLDSSNIKPMNLIGVDRGENIPAVIALTDPEGCPLSRFKDSLGNPTHILRIGESYKEKQRTIQAKKEVEQRRAGGYSRKYASKAKNLADDMVRNTARDLLYYAVTQDAMLIFENLSRGFGRQGKRTFMAERQYTRMEDWLTAKLAYEGLPSKTYLSKTLAQYTSKTCSNCGFTITSADYDRVLEKLKKTATGWMTTINGKELKVEGQITYYNRYKRQNVVKDLSVELDRLSEESVNNDISSWTKGRSGEALSLLKKRFSHRPVQEKFVCLNCGFETHADEQAALNIARSWLFLRSQEYKKYQTNKTTGNTDKRAFVETWQSFYRKKLKEVWKPAV

SEQ ID NO: 48885 - protein, 979 aa, synthetic construct
  REGION 1..979: note = engineered CasX variant
QEIKRINKIRRRLVKDSNTKKAGKTGPMKTLLVRVMTPDLRERLENLRKKPENIPQPISNTSRANLNKLLTDYTEMKKAILHVYDEEFQKDPVGLMSRVAQPASKKIDQNKLKPEMDEKGNLTTAGFACSQCGQPLFVYKLEQVSEKGKAYTNYFGRCNVAEHEKLILLAQLKPEKDSDEAVTYSLGKFGQRALDFYSIHVTKESTHPVKPLAQIAGNRYASGPVGKALRDACMGTIASFLSKYQDIIIEHQKVVKGNQKRLESLRELAGKENLEYPSVTLPPQPHTKEGVDAYNEVIARVRMWVNLNLWQKLKLSRDDAKPLLRLKGFPSFPLVERQANEVDWWDMVCNVKKLINEKKEDGKVFWQNLAGYKRQEALRPYLSSEEDRKKGKKFARYQLGDLLLHLEKKHGEDWGKVYDEAWERIDKKVEGLSKHIKLEEERRSEDAQSKAALTDWLRAKASFVIEGLKEADDKDEFCRCELKLQKWYGDLRGKPFAIEAENSILDISGFSKQYNCAFIWQKDGVKKLNLYLIINYFKGGKLRFKKIKPEAFEANRFYTVINKKSGEIVPMEVNFNFDDPNLIILPLAFGKRQGREFIWNDLLSLETGSLKLANGRVIEKTLYNRRTRQDEPALFVALTFERREVLDSSNIKPMNLIGVDRGENIPAVIALTDPEGCPLSRFKDSLGNPTHILRIGESYKEKQRTIQAKKEVEQRRAGGYSRKYASKAKNLADDMVRNTARDLLYYAVTQDAMLIFENLSRGFGRQGKRTFMAERQYTRMEDWLTAKLAYEGLPSKTYLSKTLAQYTSKTCSNCGFTITSADYDRVLEKLKKTATGWMTTINGKELKVEGQITYYNRYKRQNVVKDLSVELDRLSEESVNNDISSWTKGRSGEALSLLKKRFSHRPVQEKFVCLNCGFETHADEQAALNIARSWLFLRSQEYKKYQTNKTTGNTDKRAFVETWQSFYRKKLKEVWKPAV

SEQ ID NO: 48886 - protein, 979 aa, synthetic construct
  REGION 1..979: note = engineered CasX variant
QEIKRINKIRRRLVKDSNTKKAGKTGPMKTLLVRVMTPDLRERLENLRKKPENIPQPISNTSRANLNKLLTDYTEMKKAILHVYDEEFQKDPVGLMSRVAQPASKKIDQNKLKPEMDEKGNLTTAGFACSQCGQPLFVYKLEQVSEKGKAYTNYFGRCNVAEHEKLILLAQLKPEKDSDEAVTYSLGKFGQRALDFYSIHVTKESTHPVKPLAQIAGNRYASGPVGKALRDACMGTIASFLSKYQDIIIEHQKVVKGNQKRLESLRELAGKENLEYPSVTLPPQPHTKEGVDAYNEVIARVRMWVNLNLWQKLKLSRDDAKPLLRLKGFPSFPLVERQANEVDWWDMVCNVKKLINEKKEDGKVFWQNLAGYKRQEALRPYLSSEEDRKKGKKFARYQLGDLLLHLEKKHGEDWGKVYDEAWERIDKKVEGLSKHIKLEEERRSEDAQSKAALTDWLRAKASFVIEGLKEADKDEFCRCELKLQKWYGDLRGKPFAIEAENSILDISGFSKQYNCAFIWQKDGVKKLNLYLIINYFKGGKLRFKKIKPEAFEANRFYTVINKKSGEIVPMEVNFNFDDPNLIILPLAFGKRQGREFIWNDLLSLETGSLKLANGRVIEKTLYNRRTRQDEPALFVALTFERREVLDSSNIKPMNLIGVDRGENIPAVIALTDPEGCPLSRFKDSLGNPTHILRIGESYKEKQRTIQAKKEVEQRRAGGYSRKYASKAKNLADDMVRNTARDLLYYAVTQDAMLIFENLSRGFGRQGKRTFMAERQYTRMEDWLTAKLAYEGLPSKTYLSKTLAQYTSKTCSNCGFTITSADYDRVLEKLKKTATGWMTTINGKELKVEGQITYYNRYKRQNVVKDLSVELDRLSEESVNNDISSWTKGRSGNEALSLLKKRFSHRPVQEKFVCLNCGFETHADEQAALNIARSWLFLRSQEYKKYQTNKTTGNTDKRAFVETWQSFYRKKLKEVWKPAV

SEQ ID NO: 48887 - protein, 978 aa, synthetic construct
  REGION 1..978: note = engineered CasX variant
QEIKRINKIRRRLVKDSNTKKAGKTGPMKTLLVRVMTPDLRERLENLRKKPENIPQPISNTSRANLNKLLTDYTEMKKAILHVYDEEFQKDPVGLMSRVAQPASKKIDQNKLKPEMDEKGNLTTAGFACSQCGQPLFVYKLEQVSEKGKAYTNYFGRCNVAEHEKLILLAQLKPEKDSDEAVTYSLGKFGQRALDFYSIHVTKESTHPVKPLAQIAGNRYASGPVGKALRDACMGTIASFLSKYQDIIIEHQKVVKGNQKRLESLRELAGKENLEYPSVTLPPQPHTKEGVDAYNEVIARVRMWVNLNLWQKLKLSRDDAKPLLRLKGFPSFPLVERQANEVDWWDMVCNVKKLINEKKEDGKVFWQNLAGYKRQEALRPYLSSEEDRQKGKKFARYQLGDLLLHLEKKHGEDWGKVYDEAWERIDKKVEGLSKHIKLEEERRSEDAQSKAALTDWLRAKASFVIEGLKEADKDEFCRCELKLQKWYGDLRGKPFAIEAENSILDISGFSKQYNCAFIWQKDGVKKLNLYLIINYFKGGKLRFKKIKPEAFEANRFYTVINKKSGEIVPMEVNFNFDDPNLIILPLAFGKRQGREFIWNDLLSLETGSLKLANGRVIEKTLYNRRTRQDEPALFVALTFERREVLDSSNIKPMNLIGVDRGENIPAVIALTDPEGCPLSRFKDSLGNPTHILRIGESYKEKQRTIQAKKEVEQRRAGGYSRKYASKAKNLADDMVRNTARDLLYYAVTQDAMLIFENLSRGFGRQGKRTFMAERQYTRMEDWLTAKLAYEGLPSKTYLSKTLAQYTSKTCSNCGFTITSADYDRVLEKLKKTATGWMTTINGKELKVEGQITYYNRYKRQNVVKDLSVELDRLSEESVNNDISSWTKGRSGEALSLLKKRFSHRPVQEKFVCLNCGFETHADEQAALNIARSWLFLRSQEYKKYQTNKTTGNTDKRAFVETWQSFYRKKLKEVWKPAV

SEQ ID NO: 48888 - protein, 978 aa, synthetic construct
  REGION 1..978: note = engineered CasX variant
QEIKRINKIRRRLVKDSNTKKAGKTGPMKTLLVRVMTPDLRERLENLRKKPENIPQPISNTSRANLNKLLTDYTEMKKAILHVYDEEFQKDPVGLMSRVAQPASKKIDQNKLKPEMDEKGNLTTAGFACSQCGQPLFVYKLEQVSEKGKAYTNYFGRCNVAEHEKLILLAQLKPEKDSDEAVTYSLGKFGQRALDFYSIHVTKESTHPVKPLAQIAGNRYASGPVGKALRDACMGTIASFLSKYQDIIIEHQKVVKGNQKRLESLRELAGKENLEYPSVTLPPQPHTKEGVDAYNEVIARVRMWVNLNLWQKLKLSRDDAKPLLRLKGFPSFPLVERQANEVDWWDMVCNVKKLINEKKEDGKVFWQNLAGYKRQEALRPYLSSEEDRKKGKKFARYQLGDLLLHLEKKHGEDWGKVYDEAWERIDKKVEGLSKHIKLEEERRSEDAQSKAALTDWLRAKASFVIEGLKEADKDEFCRCELKLQKWYGDLRGKPFAIEAENSILDISGFSKQYNCAFIWQKDGVKKLNLYLIINYFKGGKLRFKKIKPEAFEANRFYTVINKKSGEIVPMEVNFNFDDPNLIILPLAFGKRQGREFIWNDLLSLETGSLKLANGRVIEKTLYNRRTRQDEPALFVALTFERREVLDSSNIKPMNLIGVDRGENIPAVIALTDPEGCPLSRFKDSLGNPTHILRIGESYKEKQRTIQAKKEVEQRRAGGYSRKYASKAKNLADDMVRNTARDLLYYAVTQDAMLIFENLSRGFGRQGKRTFMAERQYTRMEDWLTAKLAYEGLPSQTYLSKTLAQYTSKTCSNCGFTITSADYDRVLEKLKKTATGWMTTINGKELKVEGQITYYNRYKRQNVVKDLSVELDRLSEESVNNDISSWTKGRSGEALSLLKKRFSHRPVQEKFVCLNCGFETHADEQAALNIARSWLFLRSQEYKKYQTNKTTGNTDKRAFVETWQSFYRKKLKEVWKPAV

SEQ ID NO: 48889 - protein, 978 aa, synthetic construct
  REGION 1..978: note = engineered CasX variant
QEIKRINKIRRRLVKDSNTKKAGKTGPMKTLLVRVMTPDLRERLENLRKKPENIPQPISNTSRANLNKLLTDYTEMKKAILHVYDEEFQKDPVGLMSRVAQPASKKIDQNKLKPEMDEKGNLTTAGFACSQCGQPLFVYKLEQVSEKGKAYTNYFGRCNVAEHEKLILLAQLKPEKDSDEAVTYSLGKFGQRALDFYSIHVTKESTHPVKPLAQIAGNRYASGPVGKALRDACMGTIASFLSKYQDIIIEHQKVVKGNQKRLESLRELAGKENLEYPSVTLPPQPHTKEGVDAYNEVIARVRMWVNLNLWQKLKLSRDDAKPLLRLKGFPSFPLVERQANEVDWWDMVCNVKKLINEKKEDGKVFWQNLAGYKRQEALRPYLSSEEDRKKGKKFARYQLGDLLLHLEKKHGEDWGKVYDEAWERIDKKVEGLSKHIKLEEERRSEDAQSKAALTDWLRAKASFVIEGLKEADKDEFCRCELKLQKWYGDLRGKPFAIEAENSILDISGFSKQYNCAFIWQKDGVKKLNLYLIINYFKGGKLRFKKIKPEAFEANRFYTVINKKSGEIVPMEVNFNFDDPNLIILPLAFGKRQGREFIWNDLLSLETGSLKLANGRVIEKTLYNRRTRQDEPALFVALTFERREVLDSSNIKPMNLIGVDRGENIPAVIALTDPEGCPLSRFKDSLGNPTHILRIGESYKEKQRTIQAKKEVEQRRAGGYSRKYASKAKNLADDMVRNTARDLLYYAVTQDAMLIFENLSRGFGRQGKRTFMAERQYTRMEDWLTAKLAYNGLPSKTYLSKTLAQYTSKTCSNCGFTITSADYDRVLEKLKKTATGWMTTINGKELKVEGQITYYNRYKRQNVVKDLSVELDRLSEESVNNDISSWTKGRSGEALSLLKKRFSHRPVQEKFVCLNCGFETHADEQAALNIARSWLFLRSQEYKKYQTNKTTGNTDKRAFVETWQSFYRKKLKEVWKPAV

SEQ ID NO: 48890 - protein, 978 aa, synthetic construct
  REGION 1..978: note = engineered CasX variant
QEIKRINKIRRRLVKDSNTKKAGKTGPMKTLLVRVMTPDLRERLENLRKKPENIPQPISNTSRANLNKLLTDYTEMKKAILHVYDEEFQKDPVGLMSRVAQPASKKIDQNKLKPEMDEKGNLTTAGFACSQCGQPLFVYKLEQVSEKGKAYTNYFGRCNVAEHEKLIQLAQLKPEKDSDEAVTYSLGKFGQRALDFYSIHVTKESTHPVKPLAQIAGNRYASGPVGKALRDACMGTIASFLSKYQDIIIEHQKVVKGNQKRLESLRELAGKENLEYPSVTLPPQPHTKEGVDAYNEVIARVRMWVNLNLWQKLKLSRDDAKPLLRLKGFPSFPLVERQANEVDWWDMVCNVKKLINEKKEDGKVFWQNLAGYKRQEALRPYLSSEEDRKKGKKFARYQLGDLLLHLEKKHGEDWGKVYDEAWERIDKKVEGLSKHIKLEEERRSEDAQSKAALTDWLRAKASFVIEGLKEADKDEFCRCELKLQKWYGDLRGKPFAIEAENSILDISGFSKQYNCAFIWQKDGVKKLNLYLIINYFKGGKLRFKKIKPEAFEANRFYTVINKKSGEIVPMEVNFNFDDPNLIILPLAFGKRQGREFIWNDLLSLETGSLKLANGRVIEKTLYNRRTRQDEPALFVALTFERREVLDSSNIKPMNLIGVDRGENIPAVIALTDPEGCPLSRFKDSLGNPTHILRIGESYKEKQRTIQAKKEVEQRRAGGYSRKYASKAKNLADDMVRNTARDLLYYAVTQDAMLIFENLSRGFGRQGKRTFMAERQYTRMEDWLTAKLAYEGLPSKTYLSKTLAQYTSKTCSNCGFTITSADYDRVLEKLKKTATGWMTTINGKELKVEGQITYYNRYKRQNVVKDLSVELDRLSEESVNNDISSWTKGRSGEALSLLKKRFSHRPVQEKFVCLNCGFETHADEQAALNIARSWLFLRSQEYKKYQTNKTTGNTDKRAFVETWQSFYRKKLKEVWKPAV

SEQ ID NO: 48891 - protein, 978 aa, synthetic construct
  REGION 1..978: note = engineered CasX variant
QEIKRINKIRRRLVKDSNTKKAGKTGPMKTLLVRVMTPDLRERLENLRKKPENIPQPISNTSRANLNKLLTDYTEMKKAILHVYDEEFQKDPVGLMSRVAQPASKKIDQNKLKPEMDEKGNLTTAGFACSQCGQPLFVYKLEQVSEKGKAYTNYFGRCNVAEHEKLILLAQLKPEKDSDEAVTYSLGKFGQRALDFYSIHVTKESTHPVKPLAQIAGNRYASGPVGKALRDACMGTIASFLSKYQDIIIEHQKVVKGNQKRLESLRELAGKENLEYPSVTLPPQPHTKEGVDAYNEVIARVRMWVNLNLWQKLKLSRDDAKPLLRLKGFPSFPLVERQANEVDWWDMVCNVKKLINEKKEDGKVFWQNLAIYKRQEALRPYLSSEEDRKKGKKFARYQLGDLLLHLEKKHGEDWGKVYDEAWERIDKKVEGLSKHIKLEEERRSEDAQSKAALTDWLRAKASFVIEGLKEADKDEFCRCELKLQKWYGDLRGKPFAIEAENSILDISGFSKQYNCAFIWQKDGVKKLNLYLIINYFKGGKLRFKKIKPEAFEANRFYTVINKKSGEIVPMEVNFNFDDPNLIILPLAFGKRQGREFIWNDLLSLETGSLKLANGRVIEKTLYNRRTRQDEPALFVALTFERREVLDSSNIKPMNLIGVDRGENIPAVIALTDPEGCPLSRFKDSLGNPTHILRIGESYKEKQRTIQAKKEVEQRRAGGYSRKYASKAKNLADDMVRNTARDLLYYAVTQDAMLIFENLSRGFGRQGKRTFMAERQYTRMEDWLTAKLAYEGLPSKTYLSKTLAQYTSKTCSNCGFTITSADYDRVLEKLKKTATGWMTTINGKELKVEGQITYYNRYKRQNVVKDLSVELDRLSEESVNNDISSWTKGRSGEALSLLKKRFSHRPVQEKFVCLNCGFETHADEQAALNIARSWLFLRSQEYKKYQTNKTTGNTDKRAFVETWQSFYRKKLKEVWKPAV

SEQ ID NO: 48892 - protein, 978 aa, synthetic construct
  REGION 1..978: note = engineered CasX variant
QEIKRINKIRRRLVKDSNTKKAGKTGPMKTLLVRVMTPDLRERLENLRKKPENIPQPISNTSRANLNKLLTDYTEMKKAILHVYDEEFQKDPVGLMSRVAQPASKKIDQNKLKPEMDEKGNLTTAGFACSQCGQPLFVYKLEQVSEKGKAYTNYFGRCNVAEHEKLILLAQLKPEKDSDEAVTYSLGKFGQRALDFYSIHVTKESTHPVKPLAQIAGNRYASGPVGKALRDACMGTIASFLSKYQDIIIEHQKVVKGNQKRLESLRELAGKENLEYPSVTLPPQPHTKEGVDAYNEVIARVRMWVNLNLWQKLKLSRDDAKPLLRLKGFPSFPLVERQANEVDWWDMVCNVKKLINEKKEDGKVFWQNLAGYKRQEALRPYLSSEEDREKGKKFARYQLGDLLLHLEKKHGEDWGKVYDEAWERIDKKVEGLSKHIKLEEERRSEDAQSKAALTDWLRAKASFVIEGLKEADKDEFCRCELKLQKWYGDLRGKPFAIEAENSILDISGFSKQYNCAFIWQKDGVKKLNLYLIINYFKGGKLRFKKIKPEAFEANRFYTVINKKSGEIVPMEVNFNFDDPNLIILPLAFGKRQGREFIWNDLLSLETGSLKLANGRVIEKTLYNRRTRQDEPALFVALTFERREVLDSSNIKPMNLIGVDRGENIPAVIALTDPEGCPLSRFKDSLGNPTHILRIGESYKEKQRTIQAKKEVEQRRAGGYSRKYASKAKNLADDMVRNTARDLLYYAVTQDAMLIFENLSRGFGRQGKRTFMAERQYTRMEDWLTAKLAYEGLPSKTYLSKTLAQYTSKTCSNCGFTITSADYDRVLEKLKKTATGWMTTINGKELKVEGQITYYNRYKRQNVVKDLSVELDRLSEESVNNDISSWTKGRSGEALSLLKKRFSHRPVQEKFVCLNCGFETHADEQAALNIARSWLFLRSQEYKKYQTNKTTGNTDKRAFVETWQSFYRKKLKEVWKPAV

SEQ ID NO: 48893 - protein, 978 aa, synthetic construct
  REGION 1..978: note = engineered CasX variant
QEIKRINKIRRRLVKDSNTKKAGKTGPMKTLLVRVMTPDLRERLENLRKKPENIPQPISNTSRANLNKLLTDYTEMKKAILHVYDEEFQKDPVGLMSRVAQPASKKIDQNKLKPEMDEKGNLTTAGFACSQCGQPLFVYKLEQVSEKGKAYTNYFGRCNVAEHEKLILLAQLKPEKDSDEAVTYSLGKFGQRALDFYSIHVTKESTHPVKPLAQIAGNRYASGPVGKALRDACMGTIASFLSKYQDIIIEHQKVVKGNQKRLESLRELAGKENLEYPSVTLPPQPHTKEGVDAYNEVIARVRMWVNLNLWQKLKLSRDDAKPLLRLKGFPSFPLVERQANEVDWWDMVCNVKKLINEKKEDGKVFWQNLAGYKRQEALRPYLSSEEDRKKGKKFARYQLGDLLLHLEKKHGEDWGKVYDEAWERIDKKVEGLSKHIKLEEERRSEDAQSKAALTDWLRAKASFVIEGLKEADKDEFCRCELKLQKWYGDLRGKPFAIEAENSILDISGFSKQYNCAFIWQKDGVKKLNLYLIINYFKGGKLRFKKIKPEAFEANRFYTVINKKSGEIVIMEVNFNFDDPNLIILPLAFGKRQGREFIWNDLLSLETGSLKLANGRVIEKTLYNRRTRQDEPALFVALTFERREVLDSSNIKPMNLIGVDRGENIPAVIALTDPEGCPLSRFKDSLGNPTHILRIGESYKEKQRTIQAKKEVEQRRAGGYSRKYASKAKNLADDMVRNTARDLLYYAVTQDAMLIFENLSRGFGRQGKRTFMAERQYTRMEDWLTAKLAYEGLPSKTYLSKTLAQYTSKTCSNCGFTITSADYDRVLEKLKKTATGWMTTINGKELKVEGQITYYNRYKRQNVVKDLSVELDRLSEESVNNDISSWTKGRSGEALSLLKKRFSHRPVQEKFVCLNCGFETHADEQAALNIARSWLFLRSQEYKKYQTNKTTGNTDKRAFVETWQSFYRKKLKEVWKPAV

SEQ ID NO: 48894 - protein, 978 aa, synthetic construct
  REGION 1..978: note = engineered CasX variant
QEIKRINKIRRRLVKDSNTKKAGKTGPMKTLLVRVMTPDLRERLENLRKKPENIPQPISNTSRANLNKLLTDYTEMKKAILHVYWEEFQKDPVGLMSRVAQPASKKIDQNKLKPEMDEKGNLTTAGFACSQCGQPLFVYKLEQVSEKGKAYTNYFGRCNVAEHEKLIKLAQLKPEKDSDEAVTYSLGKFGQRALDFYSIHVTKESTHPVKPLAQIAGNRYASGPVGKALRGACMGTIASFLSKYQDIIIEHQKVVKGNQKRLESLRELAGKENLEYPSVTLPPQPHTKEGVDAYNEVIARVRMWVNLNLWQKLKLSRDDAKPLLRLKGFPSFPLVERQANEVDWWDMVCNVKKLINEKKEDGKVFWQNLAGYKRQEALRPYLSSEEDRKKGKKFARYQLGDLLLHLEKKHGEDWGKVYDEAWERIDKKVEGLSKHIKLEEERRSEDAQSKAALTDWLRAKASFVIEGLKEADKDEFCRCELKLQKWYGDLRGKPFAIEAENSILDISGFSKQYNCAFIWQKDGVKKLNLYLIINYFKGGKLRFKKIKPEAFEANRFYTVINKKSGEIVPMEVNFNFDDPNLIILPLAFGKRQGREFIWNDLLSLETGSLKLANGRVIEKTLYNRRTRQDEPALFVALTFERREVLDSSNIKPMNLIGVDRGENIPAVIALTDPEGCPLSRFKDSLGNPTHILRIGESYKEKQRTIQAKKEVEQRRAGGYSRKYASKAKNLADDMVRNTARDLLYYAVTQDAMLIFENLSRGFGRQGKRTFMAERQYTRMEDWLTAKLAYEGLPSKTYLSKTLAQYTSKTCSNCGFTITSADYDRVLEKLKKTATGWMTTINGKELKVEGQITYYNRYKRQNVVKDLSVELDRLSEESVNNDISSWTKGRSGEALSLLKKRFSHRPVQEKFVCLNCGFETHADEQAALNIARSWLFLRSQEYKKYQTNKTTGNTDKRAFVETWQSFYRKKLKEVWKPAV

SEQ ID NO: 48895 - protein, 978 aa, synthetic construct
  REGION 1..978: note = engineered CasX variant
QEIKRINKIRRRLVKDSNTKKAGKTGPMKTLLVRVMTPDLRERLENLRKKPENIPQPISNTSRANLNKLLTDYTEMKKAILHVYWEEFQKDPVGLMSRVAQPASKKIDQNKLKPEMDEKGNLTTAGFACSQCGQPLFVYKLEQVSEKGKAYTNYFGRCNVAEHEKLIKLAQLKPEKDSDEAVTYSLGKFGQRALDFYSIHVTKESTHPVKPLAQIAGNRYASGPVGKALRDACMGTIASFLSKYQDIIIEHQKVVKGNQKRLESLRELAGKENLEYPSVTLPPQPHTKEGVDAYNEVIARVRMWVNLNLWQKLKLSRDDAKPLLRLKNFPSFPLVERQANEVDWWDMVCNVKKLINEKKEDGKVFWQNLAGYKRQEALRPYLSSEEDRKKGKKFARYQLGDLLLHLEKKHGEDWGKVYDEAWERIDKKVEGLSKHIKLEEERRSEDAQSKAALTDWLRAKASFVIEGLKEADKDEFCRCELKLQKWYGDLRGKPFAIEAENSILDISGFSKQYNCAFIWQKDGVKKLNLYLIINYFKGGKLRFKKIKPEAFEANRFYTVINKKSGEIVPMEVNFNFDDPNLIILPLAFGKRQGREFIWNDLLSLETGSLKLANGRVIEKTLYNRRTRQDEPALFVALTFERREVLDSSNIKPMNLIGVDRGENIPAVIALTDPEGCPLSRFKDSLGNPTHILRIGESYKEKQRTIQAKKEVEQRRAGGYSRKYASKAKNLADDMVRNTARDLLYYAVTQDAMLIFENLSRGFGRQGKRTFMAERQYTRMEDWLTAKLAYEGLPSKTYLSKTLAQYTSKTCSNCGFTITSADYDRVLEKLKKTATGWMTTINGKELKVEGQITYYNRYKRQNVVKDLSVELDRLSEESVNNDISSWTKGRSGEALSLLKKRFSHRPVQEKFVCLNCGFETHADEQAALNIARSWLFLRSQEYKKYQTNKTTGNTDKRAFVETWQSFYRKKLKEVWKPAV

SEQ ID NO: 48896 - protein, 978 aa, synthetic construct
  REGION 1..978: note = engineered CasX variant
QEIKRINKIRRRLVKDSNTKKAGKTGPMKTLLVRVMTPDLRERLENLRKKPENIPQPISNTSRANLNKLLTDYTEMKKAILHVYWEEFQKDPVGLMSRVAQPASKKIDQNKLKPEMDEKGNLTTAGFACSQCGQPLFVYKLEQVSEKGKAYTNYFGRCNVAEHEKLIKLAQLKPEKDSDEAVTYSLGKFGQRALDFYSIHVTKESTHPVKPLAQIAGNRYASGPVGKALRDACMGTIASFLSKYQDIIIEHQKVVKGNQKRLESLRELAGKENLEYPSVTLPPQPHTKEGVDAYNEVIARVRMWVNLNLWQKLKLSRDDAKPLLRLKGFPSFPLVERQANEVDWWDMVCNVKKLINEKKEDGKVFWQNLAGYKRQEALRPYLSSEEDRKKGKKFARYQLGDLLNHLEKKHGEDWGKVYDEAWERIDKKVEGLSKHIKLEEERRSEDAQSKAALTDWLRAKASFVIEGLKEADKDEFCRCELKLQKWYGDLRGKPFAIEAENSILDISGFSKQYNCAFIWQKDGVKKLNLYLIINYFKGGKLRFKKIKPEAFEANRFYTVINKKSGEIVPMEVNFNFDDPNLIILPLAFGKRQGREFIWNDLLSLETGSLKLANGRVIEKTLYNRRTRQDEPALFVALTFERREVLDSSNIKPMNLIGVDRGENIPAVIALTDPEGCPLSRFKDSLGNPTHILRIGESYKEKQRTIQAKKEVEQRRAGGYSRKYASKAKNLADDMVRNTARDLLYYAVTQDAMLIFENLSRGFGRQGKRTFMAERQYTRMEDWLTAKLAYEGLPSKTYLSKTLAQYTSKTCSNCGFTITSADYDRVLEKLKKTATGWMTTINGKELKVEGQITYYNRYKRQNVVKDLSVELDRLSEESVNNDISSWTKGRSGEALSLLKKRFSHRPVQEKFVCLNCGFETHADEQAALNIARSWLFLRSQEYKKYQTNKTTGNTDKRAFVETWQSFYRKKLKEVWKPAV

SEQ ID NO: 48897 - protein, 978 aa, synthetic construct
  REGION 1..978: note = engineered CasX variant
QEIKRINKIRRRLVKDSNTKKAGKTGPMKTLLVRVMTPDLRERLENLRKKPENIPQPISNTSRANLNKLLTDYTEMKKAILHVYWEEFQKDPVGLMSRVAQPASKKIDQNKLKPEMDEKGNLTTAGFACSQCGQPLFVYKLEQVSEKGKAYTNYFGRCNVAEHEKLIKLAQLKPEKDSDEAVTYSLGKFGQRALDFYSIHVTKESTHPVKPLAQIAGNRYASGPVGKALRDACMGTIASFLSKYQDIIIEHQKVVKGNQKRLESLRELAGKENLEYPSVTLPPQPHTKEGVDAYNEVIARVRMWVNLNLWQKLKLSRDDAKPLLRLKGFPSFPLVERQANEVDWWDMVCNVKKLINEKKEDGKVFWQNLAGYKRQEALRPYLSSEEDRKKGKKFARYQLGDLLWHLEKKHGEDWGKVYDEAWERIDKKVEGLSKHIKLEEERRSEDAQSKAALTDWLRAKASFVIEGLKEADKDEFCRCELKLQKWYGDLRGKPFAIEAENSILDISGFSKQYNCAFIWQKDGVKKLNLYLIINYFKGGKLRFKKIKPEAFEANRFYTVINKKSGEIVPMEVNFNFDDPNLIILPLAFGKRQGREFIWNDLLSLETGSLKLANGRVIEKTLYNRRTRQDEPALFVALTFERREVLDSSNIKPMNLIGVDRGENIPAVIALTDPEGCPLSRFKDSLGNPTHILRIGESYKEKQRTIQAKKEVEQRRAGGYSRKYASKAKNLADDMVRNTARDLLYYAVTQDAMLIFENLSRGFGRQGKRTFMAERQYTRMEDWLTAKLAYEGLPSKTYLSKTLAQYTSKTCSNCGFTITSADYDRVLEKLKKTATGWMTTINGKELKVEGQITYYNRYKRQNVVKDLSVELDRLSEESVNNDISSWTKGRSGEALSLLKKRFSHRPVQEKFVCLNCGFETHADEQAALNIARSWLFLRSQEYKKYQTNKTTGNTDKRAFVETWQSFYRKKLKEVWKPAV

SEQ ID NO: 48898 - protein, 978 aa, synthetic construct
  REGION 1..978: note = engineered CasX variant
QEIKRINKIRRRLVKDSNTKKAGKTGPMKTLLVRVMTPDLRERLENLRKKPENIPQPISNTSRANLNKLLTDYTEMKKAILHVYWEEFQKDPVGLMSRVAQPASKKIDQNKLKPEMDEKGNLTTAGFACSQCGQPLFVYKLEQVSEKGKAYTNYFGRCNVAEHEKLIKLAQLKPEKDSDEAVTYSLGKFGQRALDFYSIHVTKESTHPVKPLAQIAGNRYASGPVGKALRDACMGTIASFLSKYQDIIIEHQKVVKGNQKRLESLRELAGKENLEYPSVTLPPQPHTKEGVDAYNEVIARVRMWVNLNLWQKLKLSRDDAKPLLRLKGFPSFPLVERQANEVDWWDMVCNVKKLINEKKEDGKVFWQNLAGYKRQEALRPYLSSEEDRKKGKKFARYQLGDLLLHLYKKHGEDWGKVYDEAWERIDKKVEGLSKHIKLEEERRSEDAQSKAALTDWLRAKASFVIEGLKEADKDEFCRCELKLQKWYGDLRGKPFAIEAENSILDISGFSKQYNCAFIWQKDGVKKLNLYLIINYFKGGKLRFKKIKPEAFEANRFYTVINKKSGEIVPMEVNFNFDDPNLIILPLAFGKRQGREFIWNDLLSLETGSLKLANGRVIEKTLYNRRTRQDEPALFVALTFERREVLDSSNIKPMNLIGVDRGENIPAVIALTDPEGCPLSRFKDSLGNPTHILRIGESYKEKQRTIQAKKEVEQRRAGGYSRKYASKAKNLADDMVRNTARDLLYYAVTQDAMLIFENLSRGFGRQGKRTFMAERQYTRMEDWLTAKLAYEGLPSKTYLSKTLAQYTSKTCSNCGFTITSADYDRVLEKLKKTATGWMTTINGKELKVEGQITYYNRYKRQNVVKDLSVELDRLSEESVNNDISSWTKGRSGEALSLLKKRFSHRPVQEKFVCLNCGFETHADEQAALNIARSWLFLRSQEYKKYQTNKTTGNTDKRAFVETWQSFYRKKLKEVWKPAV

SEQ ID NO: 48899 - protein, 978 aa, synthetic construct
  REGION 1..978: note = engineered CasX variant
QEIKRINKIRRRLVKDSNTKKAGKTGPMKTLLVRVMTPDLRERLENLRKKPENIPQPISNTSRANLNKLLTDYTEMKKAILHVYWEEFQKDPVGLMSRVAQPASKKIDQNKLKPEMDEKGNLTTAGFACSQCGQPLFVYKLEQVSEKGKAYTNYFGRCNVAEHEKLIKLAQLKPEKDSDEAVTYSLGKFGQRALDFYSIHVTKESTHPVKPLAQIAGNRYASGPVGKALRDACMGTIASFLSKYQDIIIEHQKVVKGNQKRLESLRELAGKENLEYPSVTLPPQPHTKEGVDAYNEVIARVRMWVNLNLWQKLKLSRDDAKPLLRLKGFPSFPLVERQANEVDWWDMVCNVKKLINEKKEDGKVFWQNLAGYKRQEALRPYLSSEEDRKKGKKFARYQLGDLLLHLEKKHPEDWGKVYDEAWERIDKKVEGLSKHIKLEEERRSEDAQSKAALTDWLRAKASFVIEGLKEADKDEFCRCELKLQKWYGDLRGKPFAIEAENSILDISGFSKQYNCAFIWQKDGVKKLNLYLIINYFKGGKLRFKKIKPEAFEANRFYTVINKKSGEIVPMEVNFNFDDPNLIILPLAFGKRQGREFIWNDLLSLETGSLKLANGRVIEKTLYNRRTRQDEPALFVALTFERREVLDSSNIKPMNLIGVDRGENIPAVIALTDPEGCPLSRFKDSLGNPTHILRIGESYKEKQRTIQAKKEVEQRRAGGYSRKYASKAKNLADDMVRNTARDLLYYAVTQDAMLIFENLSRGFGRQGKRTFMAERQYTRMEDWLTAKLAYEGLPSKTYLSKTLAQYTSKTCSNCGFTITSADYDRVLEKLKKTATGWMTTINGKELKVEGQITYYNRYKRQNVVKDLSVELDRLSEESVNNDISSWTKGRSGEALSLLKKRFSHRPVQEKFVCLNCGFETHADEQAALNIARSWLFLRSQEYKKYQTNKTTGNTDKRAFVETWQSFYRKKLKEVWKPAV

SEQ ID NO: 48900 - protein, 979 aa, synthetic construct
  REGION 1..979: note = engineered CasX variant
QEIKRINKIRRRLVKDSNTKKAGKTGPMKTLLVRVMTPDLRERLENLRKKPENIPQPISNTSRANLNKLLTDYTEMKKAILHVYWEEFQKDPVGLMSRVAQPASKKIDQNKLKPEMDEKGNLTTAGFACSQCGQPLFVYKLEQVSEKGKAYTNYFGRCNVAEHEKLIKLAQLKPEKDSDEAVTYSLGKFGQRALDFYSIHVTKESTHPVKPLAQIAGNRYASGPVGKALRDACMGTIASFLSKYQDIIIEHQKVVKGNQKRLESLRELAGKENLEYPSVTLPPQPHTKEGVDAYNEVIARVRMWVNLNLWQKLKLSRDDAKPLLRLKGFPSFPLVERQANEVDWWDMVCNVKKLINEKKEDGKVFWQNLAGYKRQEALRPYLSSEEDRKKGKKFARYQLGDLLLHLEKKHGERDWGKVYDEAWERIDKKVEGLSKHIKLEEERRSEDAQSKAALTDWLRAKASFVIEGLKEADKDEFCRCELKLQKWYGDLRGKPFAIEAENSILDISGFSKQYNCAFIWQKDGVKKLNLYLIINYFKGGKLRFKKIKPEAFEANRFYTVINKKSGEIVPMEVNFNFDDPNLIILPLAFGKRQGREFIWNDLLSLETGSLKLANGRVIEKTLYNRRTRQDEPALFVALTFERREVLDSSNIKPMNLIGVDRGENIPAVIALTDPEGCPLSRFKDSLGNPTHILRIGESYKEKQRTIQAKKEVEQRRAGGYSRKYASKAKNLADDMVRNTARDLLYYAVTQDAMLIFENLSRGFGRQGKRTFMAERQYTRMEDWLTAKLAYEGLPSKTYLSKTLAQYTSKTCSNCGFTITSADYDRVLEKLKKTATGWMTTINGKELKVEGQITYYNRYKRQNVVKDLSVELDRLSEESVNNDISSWTKGRSGEALSLLKKRFSHRPVQEKFVCLNCGFETHADEQAALNIARSWLFLRSQEYKKYQTNKTTGNTDKRAFVETWQSFYRKKLKEVWKPAV

SEQ ID NO: 48901 - protein, 979 aa, synthetic construct
  REGION 1..979: note = engineered CasX variant
QEIKRINKIRRRLVKDSNTKKAGKTGPMKTLLVRVMTPDLRERLENLRKKPENIPQPISNTSRANLNKLLTDYTEMKKAILHVYWEEFQKDPVGLMSRVAQPASKKIDQNKLKPEMDEKGNLTTAGFACSQCGQPLFVYKLEQVSEKGKAYTNYFGRCNVAEHEKLIKLAQLKPEKDSDEAVTYSLGKFGQRALDFYSIHVTKESTHPVKPLAQIAGNRYASGPVGKALRDACMGTIASFLSKYQDIIIEHQKVVKGNQKRLESLRELAGKENLEYPSVTLPPQPHTKEGVDAYNEVIARVRMWVNLNLWQKLKLSRDDAKPLLRLKGFPSFPLVERQANEVDWWDMVCNVKKLINEKKEDGKVFWQNLAGYKRQEALRPYLSSEEDRKKGKKFARYQLGDLLLHLEKKHGEYDWGKVYDEAWERIDKKVEGLSKHIKLEEERRSEDAQSKAALTDWLRAKASFVIEGLKEADKDEFCRCELKLQKWYGDLRGKPFAIEAENSILDISGFSKQYNCAFIWQKDGVKKLNLYLIINYFKGGKLRFKKIKPEAFEANRFYTVINKKSGEIVPMEVNFNFDDPNLIILPLAFGKRQGREFIWNDLLSLETGSLKLANGRVIEKTLYNRRTRQDEPALFVALTFERREVLDSSNIKPMNLIGVDRGENIPAVIALTDPEGCPLSRFKDSLGNPTHILRIGESYKEKQRTIQAKKEVEQRRAGGYSRKYASKAKNLADDMVRNTARDLLYYAVTQDAMLIFENLSRGFGRQGKRTFMAERQYTRMEDWLTAKLAYEGLPSKTYLSKTLAQYTSKTCSNCGFTITSADYDRVLEKLKKTATGWMTTINGKELKVEGQITYYNRYKRQNVVKDLSVELDRLSEESVNNDISSWTKGRSGEALSLLKKRFSHRPVQEKFVCLNCGFETHADEQAALNIARSWLFLRSQEYKKYQTNKTTGNTDKRAFVETWQSFYRKKLKEVWKPAV

SEQ ID NO: 48902 - protein, 978 aa, synthetic construct
  REGION 1..978: note = engineered CasX variant
QEIKRINKIRRRLVKDSNTKKAGKTGPMKTLLVRVMTPDLRERLENLRKKPENIPQPISNTSRANLNKLLTDYTEMKKAILHVYWEEFQKDPVGLMSRVAQPASKKIDQNKLKPEMDEKGNLTTAGFACSQCGQPLFVYKLEQVSEKGKAYTNYFGRCNVAEHEKLIKLAQLKPEKDSDEAVTYSLGKFGQRALDFYSIHVTKESTHPVKPLAQIAGNRYASGPVGKALRDACMGTIASFLSKYQDIIIEHQKVVKGNQKRLESLRELAGKENLEYPSVTLPPQPHTKEGVDAYNEVIARVRMWVNLNLWQKLKLSRDDAKPLLRLKGFPSFPLVERQANEVDWWDMVCNVKKLINEKKEDGKVFWQNLAGYKRQEALRPYLSSEEDRKKGKKFARYQLGDLLLHLEKKHGEDWGDVYDEAWERIDKKVEGLSKHIKLEEERRSEDAQSKAALTDWLRAKASFVIEGLKEADKDEFCRCELKLQKWYGDLRGKPFAIEAENSILDISGFSKQYNCAFIWQKDGVKKLNLYLIINYFKGGKLRFKKIKPEAFEANRFYTVINKKSGEIVPMEVNFNFDDPNLIILPLAFGKRQGREFIWNDLLSLETGSLKLANGRVIEKTLYNRRTRQDEPALFVALTFERREVLDSSNIKPMNLIGVDRGENIPAVIALTDPEGCPLSRFKDSLGNPTHILRIGESYKEKQRTIQAKKEVEQRRAGGYSRKYASKAKNLADDMVRNTARDLLYYAVTQDAMLIFENLSRGFGRQGKRTFMAERQYTRMEDWLTAKLAYEGLPSKTYLSKTLAQYTSKTCSNCGFTITSADYDRVLEKLKKTATGWMTTINGKELKVEGQITYYNRYKRQNVVKDLSVELDRLSEESVNNDISSWTKGRSGEALSLLKKRFSHRPVQEKFVCLNCGFETHADEQAALNIARSWLFLRSQEYKKYQTNKTTGNTDKRAFVETWQSFYRKKLKEVWKPAV

SEQ ID NO: 48903 - protein, 978 aa, synthetic construct
  REGION 1..978: note = engineered CasX variant
QEIKRINKIRRRLVKDSNTKKAGKTGPMKTLLVRVMTPDLRERLENLRKKPENIPQPISNTSRANLNKLLTDYTEMKKAILHVYWEEFQKDPVGLMSRVAQPASKKIDQNKLKPEMDEKGNLTTAGFACSQCGQPLFVYKLEQVSEKGKAYTNYFGRCNVAEHEKLIKLAQLKPEKDSDEAVTYSLGKFGQRALDFYSIHVTKESTHPVKPLAQIAGNRYASGPVGKALRDACMGTIASFLSKYQDIIIEHQKVVKGNQKRLESLRELAGKENLEYPSVTLPPQPHTKEGVDAYNEVIARVRMWVNLNLWQKLKLSRDDAKPLLRLKGFPSFPLVERQANEVDWWDMVCNVKKLINEKKEDGKVFWQNLAGYKRQEALRPYLSSEEDRKKGKKFARYQLGDLLLHLEKKHGEDWGKVYGEAWERIDKKVEGLSKHIKLEEERRSEDAQSKAALTDWLRAKASFVIEGLKEADKDEFCRCELKLQKWYGDLRGKPFAIEAENSILDISGFSKQYNCAFIWQKDGVKKLNLYLIINYFKGGKLRFKKIKPEAFEANRFYTVINKKSGEIVPMEVNFNFDDPNLIILPLAFGKRQGREFIWNDLLSLETGSLKLANGRVIEKTLYNRRTRQDEPALFVALTFERREVLDSSNIKPMNLIGVDRGENIPAVIALTDPEGCPLSRFKDSLGNPTHILRIGESYKEKQRTIQAKKEVEQRRAGGYSRKYASKAKNLADDMVRNTARDLLYYAVTQDAMLIFENLSRGFGRQGKRTFMAERQYTRMEDWLTAKLAYEGLPSKTYLSKTLAQYTSKTCSNCGFTITSADYDRVLEKLKKTATGWMTTINGKELKVEGQITYYNRYKRQNVVKDLSVELDRLSEESVNNDISSWTKGRSGEALSLLKKRFSHRPVQEKFVCLNCGFETHADEQAALNIARSWLFLRSQEYKKYQTNKTTGNTDKRAFVETWQSFYRKKLKEVWKPAV

SEQ ID NO: 48904 - protein, 978 aa, synthetic construct
  REGION 1..978: note = engineered CasX variant
QEIKRINKIRRRLVKDSNTKKAGKTGPMKTLLVRVMTPDLRERLENLRKKPENIPQPISNTSRANLNKLLTDYTEMKKAILHVYWEEFQKDPVGLMSRVAQPASKKIDQNKLKPEMDEKGNLTTAGFACSQCGQPLFVYKLEQVSEKGKAYTNYFGRCNVAEHEKLIKLAQLKPEKDSDEAVTYSLGKFGQRALDFYSIHVTKESTHPVKPLAQIAGNRYASGPVGKALRDACMGTIASFLSKYQDIIIEHQKVVKGNQKRLESLRELAGKENLEYPSVTLPPQPHTKEGVDAYNEVIARVRMWVNLNLWQKLKLSRDDAKPLLRLKGFPSFPLVERQANEVDWWDMVCNVKKLINEKKEDGKVFWQNLAGYKRQEALRPYLSSEEDRKKGKKFARYQLGDLLLHLEKKHGEDWGKVYDEAWERIDKKVEGLSKHIKLEEERRSEDAQSKAALTDWLRAKASFVIEGKKEADKDEFCRCELKLQKWYGDLRGKPFAIEAENSILDISGFSKQYNCAFIWQKDGVKKLNLYLIINYFKGGKLRFKKIKPEAFEANRFYTVINKKSGEIVPMEVNFNFDDPNLIILPLAFGKRQGREFIWNDLLSLETGSLKLANGRVIEKTLYNRRTRQDEPALFVALTFERREVLDSSNIKPMNLIGVDRGENIPAVIALTDPEGCPLSRFKDSLGNPTHILRIGESYKEKQRTIQAKKEVEQRRAGGYSRKYASKAKNLADDMVRNTARDLLYYAVTQDAMLIFENLSRGFGRQGKRTFMAERQYTRMEDWLTAKLAYEGLPSKTYLSKTLAQYTSKTCSNCGFTITSADYDRVLEKLKKTATGWMTTINGKELKVEGQITYYNRYKRQNVVKDLSVELDRLSEESVNNDISSWTKGRSGEALSLLKKRFSHRPVQEKFVCLNCGFETHADEQAALNIARSWLFLRSQEYKKYQTNKTTGNTDKRAFVETWQSFYRKKLKEVWKPAV

SEQ ID NO: 48905 - protein, 978 aa, synthetic construct
  REGION 1..978: note = engineered CasX variant
QEIKRINKIRRRLVKDSNTKKAGKTGPMKTLLVRVMTPDLRERLENLRKKPENIPQPISNTSRANLNKLLTDYTEMKKAILHVYWEEFQKDPVGLMSRVAQPASKKIDQNKLKPEMDEKGNLTTAGFACSQCGQPLFVYKLEQVSEKGKAYTNYFGRCNVAEHEKLIKLAQLKPEKDSDEAVTYSLGKFGQRALDFYSIHVTKESTHPVKPLAQIAGNRYASGPVGKALRDACMGTIASFLSKYQDIIIEHQKVVKGNQKRLESLRELAGKENLEYPSVTLPPQPHTKEGVDAYNEVIARVRMWVNLNLWQKLKLSRDDAKPLLRLKGFPSFPLVERQANEVDWWDMVCNVKKLINEKKEDGKVFWQNLAGYKRQEALRPYLSSEEDRKKGKKFARYQLGDLLLHLEKKHGEDWGKVYDEAWERIDKKVEGLSKHIKLEEERRSEDAQSKAALTDWLRAKASFVIEGSKEADKDEFCRCELKLQKWYGDLRGKPFAIEAENSILDISGFSKQYNCAFIWQKDGVKKLNLYLIINYFKGGKLRFKKIKPEAFEANRFYTVINKKSGEIVPMEVNFNFDDPNLIILPLAFGKRQGREFIWNDLLSLETGSLKLANGRVIEKTLYNRRTRQDEPALFVALTFERREVLDSSNIKPMNLIGVDRGENIPAVIALTDPEGCPLSRFKDSLGNPTHILRIGESYKEKQRTIQAKKEVEQRRAGGYSRKYASKAKNLADDMVRNTARDLLYYAVTQDAMLIFENLSRGFGRQGKRTFMAERQYTRMEDWLTAKLAYEGLPSKTYLSKTLAQYTSKTCSNCGFTITSADYDRVLEKLKKTATGWMTTINGKELKVEGQITYYNRYKRQNVVKDLSVELDRLSEESVNNDISSWTKGRSGEALSLLKKRFSHRPVQEKFVCLNCGFETHADEQAALNIARSWLFLRSQEYKKYQTNKTTGNTDKRAFVETWQSFYRKKLKEVWKPAV

SEQ ID NO: 48906 - protein, 979 aa, synthetic construct
  REGION 1..979: note = engineered CasX variant
QEIKRINKIRRRLVKDSNTKKAGKTGPMKTLLVRVMTPDLRERLENLRKKPENIPQPISNTSRANLNKLLTDYTEMKKAILHVYWEEFQKDPVGLMSRVAQPASKKIDQNKLKPEMDEKGNLTTAGFACSQCGQPLFVYKLEQVSEKGKAYTNYFGRCNVAEHEKLIKLAQLKPEKDSDEAVTYSLGKFGQRALDFYSIHVTKESTHPVKPLAQIAGNRYASGPVGKALRDACMGTIASFLSKYQDIIIEHQKVVKGNQKRLESLRELAGKENLEYPSVTLPPQPHTKEGVDAYNEVIARVRMWVNLNLWQKLKLSRDDAKPLLRLKGFPSFPLVERQANEVDWWDMVCNVKKLINEKKEDGKVFWQNLAGYKRQEALRPYLSSEEDRKKGKKFARYQLGDLLLHLEKKHGEDWGKVYDEAWERIDKKVEGLSKHIKLEEERRSEDAQSKAALTDWLRAKASFVIEGLKEADDKDEFCRCELKLQKWYGDLRGKPFAIEAENSILDISGFSKQYNCAFIWQKDGVKKLNLYLIINYFKGGKLRFKKIKPEAFEANRFYTVINKKSGEIVPMEVNFNFDDPNLIILPLAFGKRQGREFIWNDLLSLETGSLKLANGRVIEKTLYNRRTRQDEPALFVALTFERREVLDSSNIKPMNLIGVDRGENIPAVIALTDPEGCPLSRFKDSLGNPTHILRIGESYKEKQRTIQAKKEVEQRRAGGYSRKYASKAKNLADDMVRNTARDLLYYAVTQDAMLIFENLSRGFGRQGKRTFMAERQYTRMEDWLTAKLAYEGLPSKTYLSKTLAQYTSKTCSNCGFTITSADYDRVLEKLKKTATGWMTTINGKELKVEGQITYYNRYKRQNVVKDLSVELDRLSEESVNNDISSWTKGRSGEALSLLKKRFSHRPVQEKFVCLNCGFETHADEQAALNIARSWLFLRSQEYKKYQTNKTTGNTDKRAFVETWQSFYRKKLKEVWKPAV

SEQ ID NO: 48907 - protein, 979 aa, synthetic construct
  REGION 1..979: note = engineered CasX variant
QEIKRINKIRRRLVKDSNTKKAGKTGPMKTLLVRVMTPDLRERLENLRKKPENIPQPISNTSRANLNKLLTDYTEMKKAILHVYWEEFQKDPVGLMSRVAQPASKKIDQNKLKPEMDEKGNLTTAGFACSQCGQPLFVYKLEQVSEKGKAYTNYFGRCNVAEHEKLIKLAQLKPEKDSDEAVTYSLGKFGQRALDFYSIHVTKESTHPVKPLAQIAGNRYASGPVGKALRDACMGTIASFLSKYQDIIIEHQKVVKGNQKRLESLRELAGKENLEYPSVTLPPQPHTKEGVDAYNEVIARVRMWVNLNLWQKLKLSRDDAKPLLRLKGFPSFPLVERQANEVDWWDMVCNVKKLINEKKEDGKVFWQNLAGYKRQEALRPYLSSEEDRKKGKKFARYQLGDLLLHLEKKHGEDWGKVYDEAWERIDKKVEGLSKHIKLEEERRSEDAQSKAALTDWLRAKASFVIEGLKEADKDEFCRCELKLQKWYGDLRGKPFAIEAENSILDISGFSKQYNCAFIWQKDGVKKLNLYLIINYFKGGKLRFKKIKPEAFEANRFYTVINKKSGEIVPMEVNFNFDDPNLIILPLAFGKRQGREFIWNDLLSLETGSLKLANGRVIEKTLYNRRTRQDEPALFVALTFERREVLDSSNIKPMNLIGVDRGENIPAVIALTDPEGCPLSRFKDSLGNPTHILRIGESYKEKQRTIQAKKEVEQRRAGGYSRKYASKAKNLADDMVRNTARDLLYYAVTQDAMLIFENLSRGFGRQGKRTFMAERQYTRMEDWLTAKLAYEGLPSKTYLSKTLAQYTSKTCSNCGFTITSADYDRVLEKLKKTATGWMTTINGKELKVEGQITYYNRYKRQNVVKDLSVELDRLSEESVNNDISSWTKGRSGNEALSLLKKRFSHRPVQEKFVCLNCGFETHADEQAALNIARSWLFLRSQEYKKYQTNKTTGNTDKRAFVETWQSFYRKKLKEVWKPAV

SEQ ID NO: 48908 - protein, 978 aa, synthetic construct
  REGION 1..978: note = engineered CasX variant
QEIKRINKIRRRLVKDSNTKKAGKTGPMKTLLVRVMTPDLRERLENLRKKPENIPQPISNTSRANLNKLLTDYTEMKKAILHVYWEEFQKDPVGLMSRVAQPASKKIDQNKLKPEMDEKGNLTTAGFACSQCGQPLFVYKLEQVSEKGKAYTNYFGRCNVAEHEKLIKLAQLKPEKDSDEAVTYSLGKFGQRALDFYSIHVTKESTHPVKPLAQIAGNRYASGPVGKALRDACMGTIASFLSKYQDIIIEHQKVVKGNQKRLESLRELAGKENLEYPSVTLPPQPHTKEGVDAYNEVIARVRMWVNLNLWQKLKLSRDDAKPLLRLKGFPSFPLVERQANEVDWWDMVCNVKKLINEKKEDGKVFWQNLAGYKRQEALRPYLSSEEDRQKGKKFARYQLGDLLLHLEKKHGEDWGKVYDEAWERIDKKVEGLSKHIKLEEERRSEDAQSKAALTDWLRAKASFVIEGLKEADKDEFCRCELKLQKWYGDLRGKPFAIEAENSILDISGFSKQYNCAFIWQKDGVKKLNLYLIINYFKGGKLRFKKIKPEAFEANRFYTVINKKSGEIVPMEVNFNFDDPNLIILPLAFGKRQGREFIWNDLLSLETGSLKLANGRVIEKTLYNRRTRQDEPALFVALTFERREVLDSSNIKPMNLIGVDRGENIPAVIALTDPEGCPLSRFKDSLGNPTHILRIGESYKEKQRTIQAKKEVEQRRAGGYSRKYASKAKNLADDMVRNTARDLLYYAVTQDAMLIFENLSRGFGRQGKRTFMAERQYTRMEDWLTAKLAYEGLPSKTYLSKTLAQYTSKTCSNCGFTITSADYDRVLEKLKKTATGWMTTINGKELKVEGQITYYNRYKRQNVVKDLSVELDRLSEESVNNDISSWTKGRSGEALSLLKKRFSHRPVQEKFVCLNCGFETHADEQAALNIARSWLFLRSQEYKKYQTNKTTGNTDKRAFVETWQSFYRKKLKEVWKPAV

SEQ ID NO: 48909 - protein, 978 aa, synthetic construct
  REGION 1..978: note = engineered CasX variant
QEIKRINKIRRRLVKDSNTKKAGKTGPMKTLLVRVMTPDLRERLENLRKKPENIPQPISNTSRANLNKLLTDYTEMKKAILHVYWEEFQKDPVGLMSRVAQPASKKIDQNKLKPEMDEKGNLTTAGFACSQCGQPLFVYKLEQVSEKGKAYTNYFGRCNVAEHEKLIKLAQLKPEKDSDEAVTYSLGKFGQRALDFYSIHVTKESTHPVKPLAQIAGNRYASGPVGKALRDACMGTIASFLSKYQDIIIEHQKVVKGNQKRLESLRELAGKENLEYPSVTLPPQPHTKEGVDAYNEVIARVRMWVNLNLWQKLKLSRDDAKPLLRLKGFPSFPLVERQANEVDWWDMVCNVKKLINEKKEDGKVFWQNLAGYKRQEALRPYLSSEEDRKKGKKFARYQLGDLLLHLEKKHGEDWGKVYDEAWERIDKKVEGLSKHIKLEEERRSEDAQSKAALTDWLRAKASFVIEGLKEADKDEFCRCELKLQKWYGDLRGKPFAIEAENSILDISGFSKQYNCAFIWQKDGVKKLNLYLIINYFKGGKLRFKKIKPEAFEANRFYTVINKKSGEIVPMEVNFNFDDPNLIILPLAFGKRQGREFIWNDLLSLETGSLKLANGRVIEKTLYNRRTRQDEPALFVALTFERREVLDSSNIKPMNLIGVDRGENIPAVIALTDPEGCPLSRFKDSLGNPTHILRIGESYKEKQRTIQAKKEVEQRRAGGYSRKYASKAKNLADDMVRNTARDLLYYAVTQDAMLIFENLSRGFGRQGKRTFMAERQYTRMEDWLTAKLAYEGLPSQTYLSKTLAQYTSKTCSNCGFTITSADYDRVLEKLKKTATGWMTTINGKELKVEGQITYYNRYKRQNVVKDLSVELDRLSEESVNNDISSWTKGRSGEALSLLKKRFSHRPVQEKFVCLNCGFETHADEQAALNIARSWLFLRSQEYKKYQTNKTTGNTDKRAFVETWQSFYRKKLKEVWKPAV

SEQ ID NO: 48910 - protein, 978 aa, synthetic construct
  REGION 1..978: note = engineered CasX variant
QEIKRINKIRRRLVKDSNTKKAGKTGPMKTLLVRVMTPDLRERLENLRKKPENIPQPISNTSRANLNKLLTDYTEMKKAILHVYWEEFQKDPVGLMSRVAQPASKKIDQNKLKPEMDEKGNLTTAGFACSQCGQPLFVYKLEQVSEKGKAYTNYFGRCNVAEHEKLIKLAQLKPEKDSDEAVTYSLGKFGQRALDFYSIHVTKESTHPVKPLAQIAGNRYASGPVGKALRDACMGTIASFLSKYQDIIIEHQKVVKGNQKRLESLRELAGKENLEYPSVTLPPQPHTKEGVDAYNEVIARVRMWVNLNLWQKLKLSRDDAKPLLRLKGFPSFPLVERQANEVDWWDMVCNVKKLINEKKEDGKVFWQNLAGYKRQEALRPYLSSEEDRKKGKKFARYQLGDLLLHLEKKHGEDWGKVYDEAWERIDKKVEGLSKHIKLEEERRSEDAQSKAALTDWLRAKASFVIEGLKEADKDEFCRCELKLQKWYGDLRGKPFAIEAENSILDISGFSKQYNCAFIWQKDGVKKLNLYLIINYFKGGKLRFKKIKPEAFEANRFYTVINKKSGEIVPMEVNFNFDDPNLIILPLAFGKRQGREFIWNDLLSLETGSLKLANGRVIEKTLYNRRTRQDEPALFVALTFERREVLDSSNIKPMNLIGVDRGENIPAVIALTDPEGCPLSRFKDSLGNPTHILRIGESYKEKQRTIQAKKEVEQRRAGGYSRKYASKAKNLADDMVRNTARDLLYYAVTQDAMLIFENLSRGFGRQGKRTFMAERQYTRMEDWLTAKLAYNGLPSKTYLSKTLAQYTSKTCSNCGFTITSADYDRVLEKLKKTATGWMTTINGKELKVEGQITYYNRYKRQNVVKDLSVELDRLSEESVNNDISSWTKGRSGEALSLLKKRFSHRPVQEKFVCLNCGFETHADEQAALNIARSWLFLRSQEYKKYQTNKTTGNTDKRAFVETWQSFYRKKLKEVWKPAV

SEQ ID NO: 48911 - protein, 979 aa, synthetic construct
  REGION 1..979: note = engineered CasX variant
QEIKRINKIRRRLVKDSNTKKAGKTGPMKTLLVRVMTPDLRERLENLRKKPENIPQPISNTSRANLNKLLTDYTEMKKAILHVYWEEFQKDPVGLMSRVAQPASKKIDQNKLKPEMDEKGNLTTAGFACSQCGQPLFVYKLEQVSEKGKAYTNYFGRCNVAEHEKLIKQLAQLKPEKDSDEAVTYSLGKFGQRALDFYSIHVTKESTHPVKPLAQIAGNRYASGPVGKALRDACMGTIASFLSKYQDIIIEHQKVVKGNQKRLESLRELAGKENLEYPSVTLPPQPHTKEGVDAYNEVIARVRMWVNLNLWQKLKLSRDDAKPLLRLKGFPSFPLVERQANEVDWWDMVCNVKKLINEKKEDGKVFWQNLAGYKRQEALRPYLSSEEDRKKGKKFARYQLGDLLLHLEKKHGEDWGKVYDEAWERIDKKVEGLSKHIKLEEERRSEDAQSKAALTDWLRAKASFVIEGLKEADKDEFCRCELKLQKWYGDLRGKPFAIEAENSILDISGFSKQYNCAFIWQKDGVKKLNLYLIINYFKGGKLRFKKIKPEAFEANRFYTVINKKSGEIVPMEVNFNFDDPNLIILPLAFGKRQGREFIWNDLLSLETGSLKLANGRVIEKTLYNRRTRQDEPALFVALTFERREVLDSSNIKPMNLIGVDRGENIPAVIALTDPEGCPLSRFKDSLGNPTHILRIGESYKEKQRTIQAKKEVEQRRAGGYSRKYASKAKNLADDMVRNTARDLLYYAVTQDAMLIFENLSRGFGRQGKRTFMAERQYTRMEDWLTAKLAYEGLPSKTYLSKTLAQYTSKTCSNCGFTITSADYDRVLEKLKKTATGWMTTINGKELKVEGQITYYNRYKRQNVVKDLSVELDRLSEESVNNDISSWTKGRSGEALSLLKKRFSHRPVQEKFVCLNCGFETHADEQAALNIARSWLFLRSQEYKKYQTNKTTGNTDKRAFVETWQSFYRKKLKEVWKPAV

SEQ ID NO: 48912 - protein, 978 aa, synthetic construct
  REGION 1..978: note = engineered CasX variant
QEIKRINKIRRRLVKDSNTKKAGKTGPMKTLLVRVMTPDLRERLENLRKKPENIPQPISNTSRANLNKLLTDYTEMKKAILHVYWEEFQKDPVGLMSRVAQPASKKIDQNKLKPEMDEKGNLTTAGFACSQCGQPLFVYKLEQVSEKGKAYTNYFGRCNVAEHEKLIKLAQLKPEKDSDEAVTYSLGKFGQRALDFYSIHVTKESTHPVKPLAQIAGNRYASGPVGKALRDACMGTIASFLSKYQDIIIEHQKVVKGNQKRLESLRELAGKENLEYPSVTLPPQPHTKEGVDAYNEVIARVRMWVNLNLWQKLKLSRDDAKPLLRLKGFPSFPLVERQANEVDWWDMVCNVKKLINEKKEDGKVFWQNLAIYKRQEALRPYLSSEEDRKKGKKFARYQLGDLLLHLEKKHGEDWGKVYDEAWERIDKKVEGLSKHIKLEEERRSEDAQSKAALTDWLRAKASFVIEGLKEADKDEFCRCELKLQKWYGDLRGKPFAIEAENSILDISGFSKQYNCAFIWQKDGVKKLNLYLIINYFKGGKLRFKKIKPEAFEANRFYTVINKKSGEIVPMEVNFNFDDPNLIILPLAFGKRQGREFIWNDLLSLETGSLKLANGRVIEKTLYNRRTRQDEPALFVALTFERREVLDSSNIKPMNLIGVDRGENIPAVIALTDPEGCPLSRFKDSLGNPTHILRIGESYKEKQRTIQAKKEVEQRRAGGYSRKYASKAKNLADDMVRNTARDLLYYAVTQDAMLIFENLSRGFGRQGKRTFMAERQYTRMEDWLTAKLAYEGLPSKTYLSKTLAQYTSKTCSNCGFTITSADYDRVLEKLKKTATGWMTTINGKELKVEGQITYYNRYKRQNVVKDLSVELDRLSEESVNNDISSWTKGRSGEALSLLKKRFSHRPVQEKFVCLNCGFETHADEQAALNIARSWLFLRSQEYKKYQTNKTTGNTDKRAFVETWQSFYRKKLKEVWKPAV

SEQ ID NO: 48913 - protein, 978 aa, synthetic construct
  REGION 1..978: note = engineered CasX variant
QEIKRINKIRRRLVKDSNTKKAGKTGPMKTLLVRVMTPDLRERLENLRKKPENIPQPISNTSRANLNKLLTDYTEMKKAILHVYWEEFQKDPVGLMSRVAQPASKKIDQNKLKPEMDEKGNLTTAGFACSQCGQPLFVYKLEQVSEKGKAYTNYFGRCNVAEHEKLIKLAQLKPEKDSDEAVTYSLGKFGQRALDFYSIHVTKESTHPVKPLAQIAGNRYASGPVGKALRDACMGTIASFLSKYQDIIIEHQKVVKGNQKRLESLRELAGKENLEYPSVTLPPQPHTKEGVDAYNEVIARVRMWVNLNLWQKLKLSRDDAKPLLRLKGFPSFPLVERQANEVDWWDMVCNVKKLINEKKEDGKVFWQNLAGYKRQEALRPYLSSEEDREKGKKFARYQLGDLLLHLEKKHGEDWGKVYDEAWERIDKKVEGLSKHIKLEEERRSEDAQSKAALTDWLRAKASFVIEGLKEADKDEFCRCELKLQKWYGDLRGKPFAIEAENSILDISGFSKQYNCAFIWQKDGVKKLNLYLIINYFKGGKLRFKKIKPEAFEANRFYTVINKKSGEIVPMEVNFNFDDPNLIILPLAFGKRQGREFIWNDLLSLETGSLKLANGRVIEKTLYNRRTRQDEPALFVALTFERREVLDSSNIKPMNLIGVDRGENIPAVIALTDPEGCPLSRFKDSLGNPTHILRIGESYKEKQRTIQAKKEVEQRRAGGYSRKYASKAKNLADDMVRNTARDLLYYAVTQDAMLIFENLSRGFGRQGKRTFMAERQYTRMEDWLTAKLAYEGLPSKTYLSKTLAQYTSKTCSNCGFTITSADYDRVLEKLKKTATGWMTTINGKELKVEGQITYYNRYKRQNVVKDLSVELDRLSEESVNNDISSWTKGRSGEALSLLKKRFSHRPVQEKFVCLNCGFETHADEQAALNIARSWLFLRSQEYKKYQTNKTTGNTDKRAFVETWQSFYRKKLKEVWKPAV

SEQ ID NO: 48914 - protein, 978 aa, synthetic construct
  REGION 1..978: note = engineered CasX variant
QEIKRINKIRRRLVKDSNTKKAGKTGPMKTLLVRVMTPDLRERLENLRKKPENIPQPISNTSRANLNKLLTDYTEMKKAILHVYWEEFQKDPVGLMSRVAQPASKKIDQNKLKPEMDEKGNLTTAGFACSQCGQPLFVYKLEQVSEKGKAYTNYFGRCNVAEHEKLIKLAQLKPEKDSDEAVTYSLGKFGQRALDFYSIHVTKESTHPVKPLAQIAGNRYASGPVGKALRDACMGTIASFLSKYQDIIIEHQKVVKGNQKRLESLRELAGKENLEYPSVTLPPQPHTKEGVDAYNEVIARVRMWVNLNLWQKLKLSRDDAKPLLRLKGFPSFPLVERQANEVDWWDMVCNVKKLINEKKEDGKVFWQNLAGYKRQEALRPYLSSEEDRKKGKKFARYQLGDLLLHLEKKHGEDWGKVYDEAWERIDKKVEGLSKHIKLEEERRSEDAQSKAALTDWLRAKASFVIEGLKEADKDEFCRCELKLQKWYGDLRGKPFAIEAENSILDISGFSKQYNCAFIWQKDGVKKLNLYLIINYFKGGKLRFKKIKPEAFEANRFYTVINKKSGEIVIMEVNFNFDDPNLIILPLAFGKRQGREFIWNDLLSLETGSLKLANGRVIEKTLYNRRTRQDEPALFVALTFERREVLDSSNIKPMNLIGVDRGENIPAVIALTDPEGCPLSRFKDSLGNPTHILRIGESYKEKQRTIQAKKEVEQRRAGGYSRKYASKAKNLADDMVRNTARDLLYYAVTQDAMLIFENLSRGFGRQGKRTFMAERQYTRMEDWLTAKLAYEGLPSKTYLSKTLAQYTSKTCSNCGFTITSADYDRVLEKLKKTATGWMTTINGKELKVEGQITYYNRYKRQNVVKDLSVELDRLSEESVNNDISSWTKGRSGEALSLLKKRFSHRPVQEKFVCLNCGFETHADEQAALNIARSWLFLRSQEYKKYQTNKTTGNTDKRAFVETWQSFYRKKLKEVWKPAV

SEQ ID NO: 48915 - protein, 978 aa, synthetic construct
  REGION 1..978: note = engineered CasX variant
QEIKRINKIRRRLVKDSNTKKAGKTGPMKTLLVRVMTPDLRERLENLRKKPENIPQPISNTSRANLNKLLTDYTEMKKAILHVYWEEFQKDPVGLMSRVAQPASKKIDQNKLKPEMDEKGNLTTAGFACSQCGQPLFVYKLEQVSEKGKAYTNYFGRCNVAEHEKLILLYQLKPEKDSDEAVTYSLGKFGQRALDFYSIHVTKESTHPVKPLAQIAGNRYASGPVGKALRGACMGTIASFLSKYQDIIIEHQKVVKGNQKRLESLRELAGKENLEYPSVTLPPQPHTKEGVDAYNEVIARVRMWVNLNLWQKLKLSRDDAKPLLRLKGFPSFPLVERQANEVDWWDMVCNVKKLINEKKEDGKVFWQNLAGYKRQEALRPYLSSEEDRKKGKKFARYQLGDLLLHLEKKHGEDWGKVYDEAWERIDKKVEGLSKHIKLEEERRSEDAQSKAALTDWLRAKASFVIEGLKEADKDEFCRCELKLQKWYGDLRGKPFAIEAENSILDISGFSKQYNCAFIWQKDGVKKLNLYLIINYFKGGKLRFKKIKPEAFEANRFYTVINKKSGEIVPMEVNFNFDDPNLIILPLAFGKRQGREFIWNDLLSLETGSLKLANGRVIEKTLYNRRTRQDEPALFVALTFERREVLDSSNIKPMNLIGVDRGENIPAVIALTDPEGCPLSRFKDSLGNPTHILRIGESYKEKQRTIQAKKEVEQRRAGGYSRKYASKAKNLADDMVRNTARDLLYYAVTQDAMLIFENLSRGFGRQGKRTFMAERQYTRMEDWLTAKLAYEGLPSKTYLSKTLAQYTSKTCSNCGFTITSADYDRVLEKLKKTATGWMTTINGKELKVEGQITYYNRYKRQNVVKDLSVELDRLSEESVNNDISSWTKGRSGEALSLLKKRFSHRPVQEKFVCLNCGFETHADEQAALNIARSWLFLRSQEYKKYQTNKTTGNTDKRAFVETWQSFYRKKLKEVWKPAV

SEQ ID NO: 48916 - protein, 978 aa, synthetic construct
  REGION 1..978: note = engineered CasX variant
QEIKRINKIRRRLVKDSNTKKAGKTGPMKTLLVRVMTPDLRERLENLRKKPENIPQPISNTSRANLNKLLTDYTEMKKAILHVYWEEFQKDPVGLMSRVAQPASKKIDQNKLKPEMDEKGNLTTAGFACSQCGQPLFVYKLEQVSEKGKAYTNYFGRCNVAEHEKLILLYQLKPEKDSDEAVTYSLGKFGQRALDFYSIHVTKESTHPVKPLAQIAGNRYASGPVGKALRDACMGTIASFLSKYQDIIIEHQKVVKGNQKRLESLRELAGKENLEYPSVTLPPQPHTKEGVDAYNEVIARVRMWVNLNLWQKLKLSRDDAKPLLRLKNFPSFPLVERQANEVDWWDMVCNVKKLINEKKEDGKVFWQNLAGYKRQEALRPYLSSEEDRKKGKKFARYQLGDLLLHLEKKHGEDWGKVYDEAWERIDKKVEGLSKHIKLEEERRSEDAQSKAALTDWLRAKASFVIEGLKEADKDEFCRCELKLQKWYGDLRGKPFAIEAENSILDISGFSKQYNCAFIWQKDGVKKLNLYLIINYFKGGKLRFKKIKPEAFEANRFYTVINKKSGEIVPMEVNFNFDDPNLIILPLAFGKRQGREFIWNDLLSLETGSLKLANGRVIEKTLYNRRTRQDEPALFVALTFERREVLDSSNIKPMNLIGVDRGENIPAVIALTDPEGCPLSRFKDSLGNPTHILRIGESYKEKQRTIQAKKEVEQRRAGGYSRKYASKAKNLADDMVRNTARDLLYYAVTQDAMLIFENLSRGFGRQGKRTFMAERQYTRMEDWLTAKLAYEGLPSKTYLSKTLAQYTSKTCSNCGFTITSADYDRVLEKLKKTATGWMTTINGKELKVEGQITYYNRYKRQNVVKDLSVELDRLSEESVNNDISSWTKGRSGEALSLLKKRFSHRPVQEKFVCLNCGFETHADEQAALNIARSWLFLRSQEYKKYQTNKTTGNTDKRAFVETWQSFYRKKLKEVWKPAV

SEQ ID NO: 48917 - protein, 978 aa, synthetic construct
  REGION 1..978: note = engineered CasX variant
QEIKRINKIRRRLVKDSNTKKAGKTGPMKTLLVRVMTPDLRERLENLRKKPENIPQPISNTSRANLNKLLTDYTEMKKAILHVYWEEFQKDPVGLMSRVAQPASKKIDQNKLKPEMDEKGNLTTAGFACSQCGQPLFVYKLEQVSEKGKAYTNYFGRCNVAEHEKLILLYQLKPEKDSDEAVTYSLGKFGQRALDFYSIHVTKESTHPVKPLAQIAGNRYASGPVGKALRDACMGTIASFLSKYQDIIIEHQKVVKGNQKRLESLRELAGKENLEYPSVTLPPQPHTKEGVDAYNEVIARVRMWVNLNLWQKLKLSRDDAKPLLRLKGFPSFPLVERQANEVDWWDMVCNVKKLINEKKEDGKVFWQNLAGYKRQEALRPYLSSEEDRKKGKKFARYQLGDLLNHLEKKHGEDWGKVYDEAWERIDKKVEGLSKHIKLEEERRSEDAQSKAALTDWLRAKASFVIEGLKEADKDEFCRCELKLQKWYGDLRGKPFAIEAENSILDISGFSKQYNCAFIWQKDGVKKLNLYLIINYFKGGKLRFKKIKPEAFEANRFYTVINKKSGEIVPMEVNFNFDDPNLIILPLAFGKRQGREFIWNDLLSLETGSLKLANGRVIEKTLYNRRTRQDEPALFVALTFERREVLDSSNIKPMNLIGVDRGENIPAVIALTDPEGCPLSRFKDSLGNPTHILRIGESYKEKQRTIQAKKEVEQRRAGGYSRKYASKAKNLADDMVRNTARDLLYYAVTQDAMLIFENLSRGFGRQGKRTFMAERQYTRMEDWLTAKLAYEGLPSKTYLSKTLAQYTSKTCSNCGFTITSADYDRVLEKLKKTATGWMTTINGKELKVEGQITYYNRYKRQNVVKDLSVELDRLSEESVNNDISSWTKGRSGEALSLLKKRFSHRPVQEKFVCLNCGFETHADEQAALNIARSWLFLRSQEYKKYQTNKTTGNTDKRAFVETWQSFYRKKLKEVWKPAV

SEQ ID NO: 48918 - protein, 978 aa, synthetic construct
  REGION 1..978: note = engineered CasX variant
QEIKRINKIRRRLVKDSNTKKAGKTGPMKTLLVRVMTPDLRERLENLRKKPENIPQPISNTSRANLNKLLTDYTEMKKAILHVYWEEFQKDPVGLMSRVAQPASKKIDQNKLKPEMDEKGNLTTAGFACSQCGQPLFVYKLEQVSEKGKAYTNYFGRCNVAEHEKLILLYQLKPEKDSDEAVTYSLGKFGQRALDFYSIHVTKESTHPVKPLAQIAGNRYASGPVGKALRDACMGTIASFLSKYQDIIIEHQKVVKGNQKRLESLRELAGKENLEYPSVTLPPQPHTKEGVDAYNEVIARVRMWVNLNLWQKLKLSRDDAKPLLRLKGFPSFPLVERQANEVDWWDMVCNVKKLINEKKEDGKVFWQNLAGYKRQEALRPYLSSEEDRKKGKKFARYQLGDLLWHLEKKHGEDWGKVYDEAWERIDKKVEGLSKHIKLEEERRSEDAQSKAALTDWLRAKASFVIEGLKEADKDEFCRCELKLQKWYGDLRGKPFAIEAENSILDISGFSKQYNCAFIWQKDGVKKLNLYLIINYFKGGKLRFKKIKPEAFEANRFYTVINKKSGEIVPMEVNFNFDDPNLIILPLAFGKRQGREFIWNDLLSLETGSLKLANGRVIEKTLYNRRTRQDEPALFVALTFERREVLDSSNIKPMNLIGVDRGENIPAVIALTDPEGCPLSRFKDSLGNPTHILRIGESYKEKQRTIQAKKEVEQRRAGGYSRKYASKAKNLADDMVRNTARDLLYYAVTQDAMLIFENLSRGFGRQGKRTFMAERQYTRMEDWLTAKLAYEGLPSKTYLSKTLAQYTSKTCSNCGFTITSADYDRVLEKLKKTATGWMTTINGKELKVEGQITYYNRYKRQNVVKDLSVELDRLSEESVNNDISSWTKGRSGEALSLLKKRFSHRPVQEKFVCLNCGFETHADEQAALNIARSWLFLRSQEYKKYQTNKTTGNTDKRAFVETWQSFYRKKLKEVWKPAV

SEQ ID NO: 48919 - protein, 978 aa, synthetic construct
  REGION 1..978: note = engineered CasX variant
QEIKRINKIRRRLVKDSNTKKAGKTGPMKTLLVRVMTPDLRERLENLRKKPENIPQPISNTSRANLNKLLTDYTEMKKAILHVYWEEFQKDPVGLMSRVAQPASKKIDQNKLKPEMDEKGNLTTAGFACSQCGQPLFVYKLEQVSEKGKAYTNYFGRCNVAEHEKLILLYQLKPEKDSDEAVTYSLGKFGQRALDFYSIHVTKESTHPVKPLAQIAGNRYASGPVGKALRDACMGTIASFLSKYQDIIIEHQKVVKGNQKRLESLRELAGKENLEYPSVTLPPQPHTKEGVDAYNEVIARVRMWVNLNLWQKLKLSRDDAKPLLRLKGFPSFPLVERQANEVDWWDMVCNVKKLINEKKEDGKVFWQNLAGYKRQEALRPYLSSEEDRKKGKKFARYQLGDLLLHLYKKHGEDWGKVYDEAWERIDKKVEGLSKHIKLEEERRSEDAQSKAALTDWLRAKASFVIEGLKEADKDEFCRCELKLQKWYGDLRGKPFAIEAENSILDISGFSKQYNCAFIWQKDGVKKLNLYLIINYFKGGKLRFKKIKPEAFEANRFYTVINKKSGEIVPMEVNFNFDDPNLIILPLAFGKRQGREFIWNDLLSLETGSLKLANGRVIEKTLYNRRTRQDEPALFVALTFERREVLDSSNIKPMNLIGVDRGENIPAVIALTDPEGCPLSRFKDSLGNPTHILRIGESYKEKQRTIQAKKEVEQRRAGGYSRKYASKAKNLADDMVRNTARDLLYYAVTQDAMLIFENLSRGFGRQGKRTFMAERQYTRMEDWLTAKLAYEGLPSKTYLSKTLAQYTSKTCSNCGFTITSADYDRVLEKLKKTATGWMTTINGKELKVEGQITYYNRYKRQNVVKDLSVELDRLSEESVNNDISSWTKGRSGEALSLLKKRFSHRPVQEKFVCLNCGFETHADEQAALNIARSWLFLRSQEYKKYQTNKTTGNTDKRAFVETWQSFYRKKLKEVWKPAV

SEQ ID NO: 48920 - protein, 978 aa, synthetic construct
  REGION 1..978: note = engineered CasX variant
QEIKRINKIRRRLVKDSNTKKAGKTGPMKTLLVRVMTPDLRERLENLRKKPENIPQPISNTSRANLNKLLTDYTEMKKAILHVYWEEFQKDPVGLMSRVAQPASKKIDQNKLKPEMDEKGNLTTAGFACSQCGQPLFVYKLEQVSEKGKAYTNYFGRCNVAEHEKLILLYQLKPEKDSDEAVTYSLGKFGQRALDFYSIHVTKESTHPVKPLAQIAGNRYASGPVGKALRDACMGTIASFLSKYQDIIIEHQKVVKGNQKRLESLRELAGKENLEYPSVTLPPQPHTKEGVDAYNEVIARVRMWVNLNLWQKLKLSRDDAKPLLRLKGFPSFPLVERQANEVDWWDMVCNVKKLINEKKEDGKVFWQNLAGYKRQEALRPYLSSEEDRKKGKKFARYQLGDLLLHLEKKHPEDWGKVYDEAWERIDKKVEGLSKHIKLEEERRSEDAQSKAALTDWLRAKASFVIEGLKEADKDEFCRCELKLQKWYGDLRGKPFAIEAENSILDISGFSKQYNCAFIWQKDGVKKLNLYLIINYFKGGKLRFKKIKPEAFEANRFYTVINKKSGEIVPMEVNFNFDDPNLIILPLAFGKRQGREFIWNDLLSLETGSLKLANGRVIEKTLYNRRTRQDEPALFVALTFERREVLDSSNIKPMNLIGVDRGENIPAVIALTDPEGCPLSRFKDSLGNPTHILRIGESYKEKQRTIQAKKEVEQRRAGGYSRKYASKAKNLADDMVRNTARDLLYYAVTQDAMLIFENLSRGFGRQGKRTFMAERQYTRMEDWLTAKLAYEGLPSKTYLSKTLAQYTSKTCSNCGFTITSADYDRVLEKLKKTATGWMTTINGKELKVEGQITYYNRYKRQNVVKDLSVELDRLSEESVNNDISSWTKGRSGEALSLLKKRFSHRPVQEKFVCLNCGFETHADEQAALNIARSWLFLRSQEYKKYQTNKTTGNTDKRAFVETWQSFYRKKLKEVWKPAV

SEQ ID NO: 48921 - protein, 979 aa, synthetic construct
  REGION 1..979: note = engineered CasX variant
QEIKRINKIRRRLVKDSNTKKAGKTGPMKTLLVRVMTPDLRERLENLRKKPENIPQPISNTSRANLNKLLTDYTEMKKAILHVYWEEFQKDPVGLMSRVAQPASKKIDQNKLKPEMDEKGNLTTAGFACSQCGQPLFVYKLEQVSEKGKAYTNYFGRCNVAEHEKLILLYQLKPEKDSDEAVTYSLGKFGQRALDFYSIHVTKESTHPVKPLAQIAGNRYASGPVGKALRDACMGTIASFLSKYQDIIIEHQKVVKGNQKRLESLRELAGKENLEYPSVTLPPQPHTKEGVDAYNEVIARVRMWVNLNLWQKLKLSRDDAKPLLRLKGFPSFPLVERQANEVDWWDMVCNVKKLINEKKEDGKVFWQNLAGYKRQEALRPYLSSEEDRKKGKKFARYQLGDLLLHLEKKHGERDWGKVYDEAWERIDKKVEGLSKHIKLEEERRSEDAQSKAALTDWLRAKASFVIEGLKEADKDEFCRCELKLQKWYGDLRGKPFAIEAENSILDISGFSKQYNCAFIWQKDGVKKLNLYLIINYFKGGKLRFKKIKPEAFEANRFYTVINKKSGEIVPMEVNFNFDDPNLIILPLAFGKRQGREFIWNDLLSLETGSLKLANGRVIEKTLYNRRTRQDEPALFVALTFERREVLDSSNIKPMNLIGVDRGENIPAVIALTDPEGCPLSRFKDSLGNPTHILRIGESYKEKQRTIQAKKEVEQRRAGGYSRKYASKAKNLADDMVRNTARDLLYYAVTQDAMLIFENLSRGFGRQGKRTFMAERQYTRMEDWLTAKLAYEGLPSKTYLSKTLAQYTSKTCSNCGFTITSADYDRVLEKLKKTATGWMTTINGKELKVEGQITYYNRYKRQNVVKDLSVELDRLSEESVNNDISSWTKGRSGEALSLLKKRFSHRPVQEKFVCLNCGFETHADEQAALNIARSWLFLRSQEYKKYQTNKTTGNTDKRAFVETWQSFYRKKLKEVWKPAV

SEQ ID NO: 48922 - protein, 979 aa, synthetic construct
  REGION 1..979: note = engineered CasX variant
QEIKRINKIRRRLVKDSNTKKAGKTGPMKTLLVRVMTPDLRERLENLRKKPENIPQPISNTSRANLNKLLTDYTEMKKAILHVYWEEFQKDPVGLMSRVAQPASKKIDQNKLKPEMDEKGNLTTAGFACSQCGQPLFVYKLEQVSEKGKAYTNYFGRCNVAEHEKLILLYQLKPEKDSDEAVTYSLGKFGQRALDFYSIHVTKESTHPVKPLAQIAGNRYASGPVGKALRDACMGTIASFLSKYQDIIIEHQKVVKGNQKRLESLRELAGKENLEYPSVTLPPQPHTKEGVDAYNEVIARVRMWVNLNLWQKLKLSRDDAKPLLRLKGFPSFPLVERQANEVDWWDMVCNVKKLINEKKEDGKVFWQNLAGYKRQEALRPYLSSEEDRKKGKKFARYQLGDLLLHLEKKHGEYDWGKVYDEAWERIDKKVEGLSKHIKLEEERRSEDAQSKAALTDWLRAKASFVIEGLKEADKDEFCRCELKLQKWYGDLRGKPFAIEAENSILDISGFSKQYNCAFIWQKDGVKKLNLYLIINYFKGGKLRFKKIKPEAFEANRFYTVINKKSGEIVPMEVNFNFDDPNLIILPLAFGKRQGREFIWNDLLSLETGSLKLANGRVIEKTLYNRRTRQDEPALFVALTFERREVLDSSNIKPMNLIGVDRGENIPAVIALTDPEGCPLSRFKDSLGNPTHILRIGESYKEKQRTIQAKKEVEQRRAGGYSRKYASKAKNLADDMVRNTARDLLYYAVTQDAMLIFENLSRGFGRQGKRTFMAERQYTRMEDWLTAKLAYEGLPSKTYLSKTLAQYTSKTCSNCGFTITSADYDRVLEKLKKTATGWMTTINGKELKVEGQITYYNRYKRQNVVKDLSVELDRLSEESVNNDISSWTKGRSGEALSLLKKRFSHRPVQEKFVCLNCGFETHADEQAALNIARSWLFLRSQEYKKYQTNKTTGNTDKRAFVETWQSFYRKKLKEVWKPAV

SEQ ID NO: 48923 - protein, 978 aa, synthetic construct
  REGION 1..978: note = engineered CasX variant
QEIKRINKIRRRLVKDSNTKKAGKTGPMKTLLVRVMTPDLRERLENLRKKPENIPQPISNTSRANLNKLLTDYTEMKKAILHVYWEEFQKDPVGLMSRVAQPASKKIDQNKLKPEMDEKGNLTTAGFACSQCGQPLFVYKLEQVSEKGKAYTNYFGRCNVAEHEKLILLYQLKPEKDSDEAVTYSLGKFGQRALDFYSIHVTKESTHPVKPLAQIAGNRYASGPVGKALRDACMGTIASFLSKYQDIIIEHQKVVKGNQKRLESLRELAGKENLEYPSVTLPPQPHTKEGVDAYNEVIARVRMWVNLNLWQKLKLSRDDAKPLLRLKGFPSFPLVERQANEVDWWDMVCNVKKLINEKKEDGKVFWQNLAGYKRQEALRPYLSSEEDRKKGKKFARYQLGDLLLHLEKKHGEDWGDVYDEAWERIDKKVEGLSKHIKLEEERRSEDAQSKAALTDWLRAKASFVIEGLKEADKDEFCRCELKLQKWYGDLRGKPFAIEAENSILDISGFSKQYNCAFIWQKDGVKKLNLYLIINYFKGGKLRFKKIKPEAFEANRFYTVINKKSGEIVPMEVNFNFDDPNLIILPLAFGKRQGREFIWNDLLSLETGSLKLANGRVIEKTLYNRRTRQDEPALFVALTFERREVLDSSNIKPMNLIGVDRGENIPAVIALTDPEGCPLSRFKDSLGNPTHILRIGESYKEKQRTIQAKKEVEQRRAGGYSRKYASKAKNLADDMVRNTARDLLYYAVTQDAMLIFENLSRGFGRQGKRTFMAERQYTRMEDWLTAKLAYEGLPSKTYLSKTLAQYTSKTCSNCGFTITSADYDRVLEKLKKTATGWMTTINGKELKVEGQITYYNRYKRQNVVKDLSVELDRLSEESVNNDISSWTKGRSGEALSLLKKRFSHRPVQEKFVCLNCGFETHADEQAALNIARSWLFLRSQEYKKYQTNKTTGNTDKRAFVETWQSFYRKKLKEVWKPAV

SEQ ID NO: 48924 - protein, 978 aa, synthetic construct
  REGION 1..978: note = engineered CasX variant
QEIKRINKIRRRLVKDSNTKKAGKTGPMKTLLVRVMTPDLRERLENLRKKPENIPQPISNTSRANLNKLLTDYTEMKKAILHVYWEEFQKDPVGLMSRVAQPASKKIDQNKLKPEMDEKGNLTTAGFACSQCGQPLFVYKLEQVSEKGKAYTNYFGRCNVAEHEKLILLYQLKPEKDSDEAVTYSLGKFGQRALDFYSIHVTKESTHPVKPLAQIAGNRYASGPVGKALRDACMGTIASFLSKYQDIIIEHQKVVKGNQKRLESLRELAGKENLEYPSVTLPPQPHTKEGVDAYNEVIARVRMWVNLNLWQKLKLSRDDAKPLLRLKGFPSFPLVERQANEVDWWDMVCNVKKLINEKKEDGKVFWQNLAGYKRQEALRPYLSSEEDRKKGKKFARYQLGDLLLHLEKKHGEDWGKVYGEAWERIDKKVEGLSKHIKLEEERRSEDAQSKAALTDWLRAKASFVIEGLKEADKDEFCRCELKLQKWYGDLRGKPFAIEAENSILDISGFSKQYNCAFIWQKDGVKKLNLYLIINYFKGGKLRFKKIKPEAFEANRFYTVINKKSGEIVPMEVNFNFDDPNLIILPLAFGKRQGREFIWNDLLSLETGSLKLANGRVIEKTLYNRRTRQDEPALFVALTFERREVLDSSNIKPMNLIGVDRGENIPAVIALTDPEGCPLSRFKDSLGNPTHILRIGESYKEKQRTIQAKKEVEQRRAGGYSRKYASKAKNLADDMVRNTARDLLYYAVTQDAMLIFENLSRGFGRQGKRTFMAERQYTRMEDWLTAKLAYEGLPSKTYLSKTLAQYTSKTCSNCGFTITSADYDRVLEKLKKTATGWMTTINGKELKVEGQITYYNRYKRQNVVKDLSVELDRLSEESVNNDISSWTKGRSGEALSLLKKRFSHRPVQEKFVCLNCGFETHADEQAALNIARSWLFLRSQEYKKYQTNKTTGNTDKRAFVETWQSFYRKKLKEVWKPAV

SEQ ID NO: 48925 - protein, 978 aa, synthetic construct
  REGION 1..978: note = engineered CasX variant
QEIKRINKIRRRLVKDSNTKKAGKTGPMKTLLVRVMTPDLRERLENLRKKPENIPQPISNTSRANLNKLLTDYTEMKKAILHVYWEEFQKDPVGLMSRVAQPASKKIDQNKLKPEMDEKGNLTTAGFACSQCGQPLFVYKLEQVSEKGKAYTNYFGRCNVAEHEKLILLYQLKPEKDSDEAVTYSLGKFGQRALDFYSIHVTKESTHPVKPLAQIAGNRYASGPVGKALRDACMGTIASFLSKYQDIIIEHQKVVKGNQKRLESLRELAGKENLEYPSVTLPPQPHTKEGVDAYNEVIARVRMWVNLNLWQKLKLSRDDAKPLLRLKGFPSFPLVERQANEVDWWDMVCNVKKLINEKKEDGKVFWQNLAGYKRQEALRPYLSSEEDRKKGKKFARYQLGDLLLHLEKKHGEDWGKVYDEAWERIDKKVEGLSKHIKLEEERRSEDAQSKAALTDWLRAKASFVIEGKKEADKDEFCRCELKLQKWYGDLRGKPFAIEAENSILDISGFSKQYNCAFIWQKDGVKKLNLYLIINYFKGGKLRFKKIKPEAFEANRFYTVINKKSGEIVPMEVNFNFDDPNLIILPLAFGKRQGREFIWNDLLSLETGSLKLANGRVIEKTLYNRRTRQDEPALFVALTFERREVLDSSNIKPMNLIGVDRGENIPAVIALTDPEGCPLSRFKDSLGNPTHILRIGESYKEKQRTIQAKKEVEQRRAGGYSRKYASKAKNLADDMVRNTARDLLYYAVTQDAMLIFENLSRGFGRQGKRTFMAERQYTRMEDWLTAKLAYEGLPSKTYLSKTLAQYTSKTCSNCGFTITSADYDRVLEKLKKTATGWMTTINGKELKVEGQITYYNRYKRQNVVKDLSVELDRLSEESVNNDISSWTKGRSGEALSLLKKRFSHRPVQEKFVCLNCGFETHADEQAALNIARSWLFLRSQEYKKYQTNKTTGNTDKRAFVETWQSFYRKKLKEVWKPAV

SEQ ID NO: 48926 - protein, 978 aa, synthetic construct
  REGION 1..978: note = engineered CasX variant
QEIKRINKIRRRLVKDSNTKKAGKTGPMKTLLVRVMTPDLRERLENLRKKPENIPQPISNTSRANLNKLLTDYTEMKKAILHVYWEEFQKDPVGLMSRVAQPASKKIDQNKLKPEMDEKGNLTTAGFACSQCGQPLFVYKLEQVSEKGKAYTNYFGRCNVAEHEKLILLYQLKPEKDSDEAVTYSLGKFGQRALDFYSIHVTKESTHPVKPLAQIAGNRYASGPVGKALRDACMGTIASFLSKYQDIIIEHQKVVKGNQKRLESLRELAGKENLEYPSVTLPPQPHTKEGVDAYNEVIARVRMWVNLNLWQKLKLSRDDAKPLLRLKGFPSFPLVERQANEVDWWDMVCNVKKLINEKKEDGKVFWQNLAGYKRQEALRPYLSSEEDRKKGKKFARYQLGDLLLHLEKKHGEDWGKVYDEAWERIDKKVEGLSKHIKLEEERRSEDAQSKAALTDWLRAKASFVIEGSKEADKDEFCRCELKLQKWYGDLRGKPFAIEAENSILDISGFSKQYNCAFIWQKDGVKKLNLYLIINYFKGGKLRFKKIKPEAFEANRFYTVINKKSGEIVPMEVNFNFDDPNLIILPLAFGKRQGREFIWNDLLSLETGSLKLANGRVIEKTLYNRRTRQDEPALFVALTFERREVLDSSNIKPMNLIGVDRGENIPAVIALTDPEGCPLSRFKDSLGNPTHILRIGESYKEKQRTIQAKKEVEQRRAGGYSRKYASKAKNLADDMVRNTARDLLYYAVTQDAMLIFENLSRGFGRQGKRTFMAERQYTRMEDWLTAKLAYEGLPSKTYLSKTLAQYTSKTCSNCGFTITSADYDRVLEKLKKTATGWMTTINGKELKVEGQITYYNRYKRQNVVKDLSVELDRLSEESVNNDISSWTKGRSGEALSLLKKRFSHRPVQEKFVCLNCGFETHADEQAALNIARSWLFLRSQEYKKYQTNKTTGNTDKRAFVETWQSFYRKKLKEVWKPAV

SEQ ID NO: 48927 - protein, 979 aa, synthetic construct
  REGION 1..979: note = engineered CasX variant
QEIKRINKIRRRLVKDSNTKKAGKTGPMKTLLVRVMTPDLRERLENLRKKPENIPQPISNTSRANLNKLLTDYTEMKKAILHVYWEEFQKDPVGLMSRVAQPASKKIDQNKLKPEMDEKGNLTTAGFACSQCGQPLFVYKLEQVSEKGKAYTNYFGRCNVAEHEKLILLYQLKPEKDSDEAVTYSLGKFGQRALDFYSIHVTKESTHPVKPLAQIAGNRYASGPVGKALRDACMGTIASFLSKYQDIIIEHQKVVKGNQKRLESLRELAGKENLEYPSVTLPPQPHTKEGVDAYNEVIARVRMWVNLNLWQKLKLSRDDAKPLLRLKGFPSFPLVERQANEVDWWDMVCNVKKLINEKKEDGKVFWQNLAGYKRQEALRPYLSSEEDRKKGKKFARYQLGDLLLHLEKKHGEDWGKVYDEAWERIDKKVEGLSKHIKLEEERRSEDAQSKAALTDWLRAKASFVIEGLKEADDKDEFCRCELKLQKWYGDLRGKPFAIEAENSILDISGFSKQYNCAFIWQKDGVKKLNLYLIINYFKGGKLRFKKIKPEAFEANRFYTVINKKSGEIVPMEVNFNFDDPNLIILPLAFGKRQGREFIWNDLLSLETGSLKLANGRVIEKTLYNRRTRQDEPALFVALTFERREVLDSSNIKPMNLIGVDRGENIPAVIALTDPEGCPLSRFKDSLGNPTHILRIGESYKEKQRTIQAKKEVEQRRAGGYSRKYASKAKNLADDMVRNTARDLLYYAVTQDAMLIFENLSRGFGRQGKRTFMAERQYTRMEDWLTAKLAYEGLPSKTYLSKTLAQYTSKTCSNCGFTITSADYDRVLEKLKKTATGWMTTINGKELKVEGQITYYNRYKRQNVVKDLSVELDRLSEESVNNDISSWTKGRSGEALSLLKKRFSHRPVQEKFVCLNCGFETHADEQAALNIARSWLFLRSQEYKKYQTNKTTGNTDKRAFVETWQSFYRKKLKEVWKPAV

SEQ ID NO: 48928 - protein, 979 aa, synthetic construct
  REGION 1..979: note = engineered CasX variant
QEIKRINKIRRRLVKDSNTKKAGKTGPMKTLLVRVMTPDLRERLENLRKKPENIPQPISNTSRANLNKLLTDYTEMKKAILHVYWEEFQKDPVGLMSRVAQPASKKIDQNKLKPEMDEKGNLTTAGFACSQCGQPLFVYKLEQVSEKGKAYTNYFGRCNVAEHEKLILLYQLKPEKDSDEAVTYSLGKFGQRALDFYSIHVTKESTHPVKPLAQIAGNRYASGPVGKALRDACMGTIASFLSKYQDIIIEHQKVVKGNQKRLESLRELAGKENLEYPSVTLPPQPHTKEGVDAYNEVIARVRMWVNLNLWQKLKLSRDDAKPLLRLKGFPSFPLVERQANEVDWWDMVCNVKKLINEKKEDGKVFWQNLAGYKRQEALRPYLSSEEDRKKGKKFARYQLGDLLLHLEKKHGEDWGKVYDEAWERIDKKVEGLSKHIKLEEERRSEDAQSKAALTDWLRAKASFVIEGLKEADKDEFCRCELKLQKWYGDLRGKPFAIEAENSILDISGFSKQYNCAFIWQKDGVKKLNLYLIINYFKGGKLRFKKIKPEAFEANRFYTVINKKSGEIVPMEVNFNFDDPNLIILPLAFGKRQGREFIWNDLLSLETGSLKLANGRVIEKTLYNRRTRQDEPALFVALTFERREVLDSSNIKPMNLIGVDRGENIPAVIALTDPEGCPLSRFKDSLGNPTHILRIGESYKEKQRTIQAKKEVEQRRAGGYSRKYASKAKNLADDMVRNTARDLLYYAVTQDAMLIFENLSRGFGRQGKRTFMAERQYTRMEDWLTAKLAYEGLPSKTYLSKTLAQYTSKTCSNCGFTITSADYDRVLEKLKKTATGWMTTINGKELKVEGQITYYNRYKRQNVVKDLSVELDRLSEESVNNDISSWTKGRSGNEALSLLKKRFSHRPVQEKFVCLNCGFETHADEQAALNIARSWLFLRSQEYKKYQTNKTTGNTDKRAFVETWQSFYRKKLKEVWKPAV

SEQ ID NO: 48929 - protein, 978 aa, synthetic construct
  REGION 1..978: note = engineered CasX variant
QEIKRINKIRRRLVKDSNTKKAGKTGPMKTLLVRVMTPDLRERLENLRKKPENIPQPISNTSRANLNKLLTDYTEMKKAILHVYWEEFQKDPVGLMSRVAQPASKKIDQNKLKPEMDEKGNLTTAGFACSQCGQPLFVYKLEQVSEKGKAYTNYFGRCNVAEHEKLILLYQLKPEKDSDEAVTYSLGKFGQRALDFYSIHVTKESTHPVKPLAQIAGNRYASGPVGKALRDACMGTIASFLSKYQDIIIEHQKVVKGNQKRLESLRELAGKENLEYPSVTLPPQPHTKEGVDAYNEVIARVRMWVNLNLWQKLKLSRDDAKPLLRLKGFPSFPLVERQANEVDWWDMVCNVKKLINEKKEDGKVFWQNLAGYKRQEALRPYLSSEEDRQKGKKFARYQLGDLLLHLEKKHGEDWGKVYDEAWERIDKKVEGLSKHIKLEEERRSEDAQSKAALTDWLRAKASFVIEGLKEADKDEFCRCELKLQKWYGDLRGKPFAIEAENSILDISGFSKQYNCAFIWQKDGVKKLNLYLIINYFKGGKLRFKKIKPEAFEANRFYTVINKKSGEIVPMEVNFNFDDPNLIILPLAFGKRQGREFIWNDLLSLETGSLKLANGRVIEKTLYNRRTRQDEPALFVALTFERREVLDSSNIKPMNLIGVDRGENIPAVIALTDPEGCPLSRFKDSLGNPTHILRIGESYKEKQRTIQAKKEVEQRRAGGYSRKYASKAKNLADDMVRNTARDLLYYAVTQDAMLIFENLSRGFGRQGKRTFMAERQYTRMEDWLTAKLAYEGLPSKTYLSKTLAQYTSKTCSNCGFTITSADYDRVLEKLKKTATGWMTTINGKELKVEGQITYYNRYKRQNVVKDLSVELDRLSEESVNNDISSWTKGRSGEALSLLKKRFSHRPVQEKFVCLNCGFETHADEQAALNIARSWLFLRSQEYKKYQTNKTTGNTDKRAFVETWQSFYRKKLKEVWKPAV

SEQ ID NO: 48930 - protein, 978 aa, synthetic construct
  REGION 1..978: note = engineered CasX variant
QEIKRINKIRRRLVKDSNTKKAGKTGPMKTLLVRVMTPDLRERLENLRKKPENIPQPISNTSRANLNKLLTDYTEMKKAILHVYWEEFQKDPVGLMSRVAQPASKKIDQNKLKPEMDEKGNLTTAGFACSQCGQPLFVYKLEQVSEKGKAYTNYFGRCNVAEHEKLILLYQLKPEKDSDEAVTYSLGKFGQRALDFYSIHVTKESTHPVKPLAQIAGNRYASGPVGKALRDACMGTIASFLSKYQDIIIEHQKVVKGNQKRLESLRELAGKENLEYPSVTLPPQPHTKEGVDAYNEVIARVRMWVNLNLWQKLKLSRDDAKPLLRLKGFPSFPLVERQANEVDWWDMVCNVKKLINEKKEDGKVFWQNLAGYKRQEALRPYLSSEEDRKKGKKFARYQLGDLLLHLEKKHGEDWGKVYDEAWERIDKKVEGLSKHIKLEEERRSEDAQSKAALTDWLRAKASFVIEGLKEADKDEFCRCELKLQKWYGDLRGKPFAIEAENSILDISGFSKQYNCAFIWQKDGVKKLNLYLIINYFKGGKLRFKKIKPEAFEANRFYTVINKKSGEIVPMEVNFNFDDPNLIILPLAFGKRQGREFIWNDLLSLETGSLKLANGRVIEKTLYNRRTRQDEPALFVALTFERREVLDSSNIKPMNLIGVDRGENIPAVIALTDPEGCPLSRFKDSLGNPTHILRIGESYKEKQRTIQAKKEVEQRRAGGYSRKYASKAKNLADDMVRNTARDLLYYAVTQDAMLIFENLSRGFGRQGKRTFMAERQYTRMEDWLTAKLAYEGLPSQTYLSKTLAQYTSKTCSNCGFTITSADYDRVLEKLKKTATGWMTTINGKELKVEGQITYYNRYKRQNVVKDLSVELDRLSEESVNNDISSWTKGRSGEALSLLKKRFSHRPVQEKFVCLNCGFETHADEQAALNIARSWLFLRSQEYKKYQTNKTTGNTDKRAFVETWQSFYRKKLKEVWKPAV

SEQ ID NO: 48931 - protein, 978 aa, synthetic construct
  REGION 1..978: note = engineered CasX variant
QEIKRINKIRRRLVKDSNTKKAGKTGPMKTLLVRVMTPDLRERLENLRKKPENIPQPISNTSRANLNKLLTDYTEMKKAILHVYWEEFQKDPVGLMSRVAQPASKKIDQNKLKPEMDEKGNLTTAGFACSQCGQPLFVYKLEQVSEKGKAYTNYFGRCNVAEHEKLILLYQLKPEKDSDEAVTYSLGKFGQRALDFYSIHVTKESTHPVKPLAQIAGNRYASGPVGKALRDACMGTIASFLSKYQDIIIEHQKVVKGNQKRLESLRELAGKENLEYPSVTLPPQPHTKEGVDAYNEVIARVRMWVNLNLWQKLKLSRDDAKPLLRLKGFPSFPLVERQANEVDWWDMVCNVKKLINEKKEDGKVFWQNLAGYKRQEALRPYLSSEEDRKKGKKFARYQLGDLLLHLEKKHGEDWGKVYDEAWERIDKKVEGLSKHIKLEEERRSEDAQSKAALTDWLRAKASFVIEGLKEADKDEFCRCELKLQKWYGDLRGKPFAIEAENSILDISGFSKQYNCAFIWQKDGVKKLNLYLIINYFKGGKLRFKKIKPEAFEANRFYTVINKKSGEIVPMEVNFNFDDPNLIILPLAFGKRQGREFIWNDLLSLETGSLKLANGRVIEKTLYNRRTRQDEPALFVALTFERREVLDSSNIKPMNLIGVDRGENIPAVIALTDPEGCPLSRFKDSLGNPTHILRIGESYKEKQRTIQAKKEVEQRRAGGYSRKYASKAKNLADDMVRNTARDLLYYAVTQDAMLIFENLSRGFGRQGKRTFMAERQYTRMEDWLTAKLAYNGLPSKTYLSKTLAQYTSKTCSNCGFTITSADYDRVLEKLKKTATGWMTTINGKELKVEGQITYYNRYKRQNVVKDLSVELDRLSEESVNNDISSWTKGRSGEALSLLKKRFSHRPVQEKFVCLNCGFETHADEQAALNIARSWLFLRSQEYKKYQTNKTTGNTDKRAFVETWQSFYRKKLKEVWKPAV

SEQ ID NO: 48932 - protein, 978 aa, synthetic construct
  REGION 1..978: note = engineered CasX variant
QEIKRINKIRRRLVKDSNTKKAGKTGPMKTLLVRVMTPDLRERLENLRKKPENIPQPISNTSRANLNKLLTDYTEMKKAILHVYWEEFQKDPVGLMSRVAQPASKKIDQNKLKPEMDEKGNLTTAGFACSQCGQPLFVYKLEQVSEKGKAYTNYFGRCNVAEHEKLIQLYQLKPEKDSDEAVTYSLGKFGQRALDFYSIHVTKESTHPVKPLAQIAGNRYASGPVGKALRDACMGTIASFLSKYQDIIIEHQKVVKGNQKRLESLRELAGKENLEYPSVTLPPQPHTKEGVDAYNEVIARVRMWVNLNLWQKLKLSRDDAKPLLRLKGFPSFPLVERQANEVDWWDMVCNVKKLINEKKEDGKVFWQNLAGYKRQEALRPYLSSEEDRKKGKKFARYQLGDLLLHLEKKHGEDWGKVYDEAWERIDKKVEGLSKHIKLEEERRSEDAQSKAALTDWLRAKASFVIEGLKEADKDEFCRCELKLQKWYGDLRGKPFAIEAENSILDISGFSKQYNCAFIWQKDGVKKLNLYLIINYFKGGKLRFKKIKPEAFEANRFYTVINKKSGEIVPMEVNFNFDDPNLIILPLAFGKRQGREFIWNDLLSLETGSLKLANGRVIEKTLYNRRTRQDEPALFVALTFERREVLDSSNIKPMNLIGVDRGENIPAVIALTDPEGCPLSRFKDSLGNPTHILRIGESYKEKQRTIQAKKEVEQRRAGGYSRKYASKAKNLADDMVRNTARDLLYYAVTQDAMLIFENLSRGFGRQGKRTFMAERQYTRMEDWLTAKLAYEGLPSKTYLSKTLAQYTSKTCSNCGFTITSADYDRVLEKLKKTATGWMTTINGKELKVEGQITYYNRYKRQNVVKDLSVELDRLSEESVNNDISSWTKGRSGEALSLLKKRFSHRPVQEKFVCLNCGFETHADEQAALNIARSWLFLRSQEYKKYQTNKTTGNTDKRAFVETWQSFYRKKLKEVWKPAV

SEQ ID NO: 48933 - protein, 978 aa, synthetic construct
  REGION 1..978: note = engineered CasX variant
QEIKRINKIRRRLVKDSNTKKAGKTGPMKTLLVRVMTPDLRERLENLRKKPENIPQPISNTSRANLNKLLTDYTEMKKAILHVYWEEFQKDPVGLMSRVAQPASKKIDQNKLKPEMDEKGNLTTAGFACSQCGQPLFVYKLEQVSEKGKAYTNYFGRCNVAEHEKLILLYQLKPEKDSDEAVTYSLGKFGQRALDFYSIHVTKESTHPVKPLAQIAGNRYASGPVGKALRDACMGTIASFLSKYQDIIIEHQKVVKGNQKRLESLRELAGKENLEYPSVTLPPQPHTKEGVDAYNEVIARVRMWVNLNLWQKLKLSRDDAKPLLRLKGFPSFPLVERQANEVDWWDMVCNVKKLINEKKEDGKVFWQNLAIYKRQEALRPYLSSEEDRKKGKKFARYQLGDLLLHLEKKHGEDWGKVYDEAWERIDKKVEGLSKHIKLEEERRSEDAQSKAALTDWLRAKASFVIEGLKEADKDEFCRCELKLQKWYGDLRGKPFAIEAENSILDISGFSKQYNCAFIWQKDGVKKLNLYLIINYFKGGKLRFKKIKPEAFEANRFYTVINKKSGEIVPMEVNFNFDDPNLIILPLAFGKRQGREFIWNDLLSLETGSLKLANGRVIEKTLYNRRTRQDEPALFVALTFERREVLDSSNIKPMNLIGVDRGENIPAVIALTDPEGCPLSRFKDSLGNPTHILRIGESYKEKQRTIQAKKEVEQRRAGGYSRKYASKAKNLADDMVRNTARDLLYYAVTQDAMLIFENLSRGFGRQGKRTFMAERQYTRMEDWLTAKLAYEGLPSKTYLSKTLAQYTSKTCSNCGFTITSADYDRVLEKLKKTATGWMTTINGKELKVEGQITYYNRYKRQNVVKDLSVELDRLSEESVNNDISSWTKGRSGEALSLLKKRFSHRPVQEKFVCLNCGFETHADEQAALNIARSWLFLRSQEYKKYQTNKTTGNTDKRAFVETWQSFYRKKLKEVWKPAV

SEQ ID NO: 48934 - protein, 978 aa, synthetic construct
  REGION 1..978: note = engineered CasX variant
QEIKRINKIRRRLVKDSNTKKAGKTGPMKTLLVRVMTPDLRERLENLRKKPENIPQPISNTSRANLNKLLTDYTEMKKAILHVYWEEFQKDPVGLMSRVAQPASKKIDQNKLKPEMDEKGNLTTAGFACSQCGQPLFVYKLEQVSEKGKAYTNYFGRCNVAEHEKLILLYQLKPEKDSDEAVTYSLGKFGQRALDFYSIHVTKESTHPVKPLAQIAGNRYASGPVGKALRDACMGTIASFLSKYQDIIIEHQKVVKGNQKRLESLRELAGKENLEYPSVTLPPQPHTKEGVDAYNEVIARVRMWVNLNLWQKLKLSRDDAKPLLRLKGFPSFPLVERQANEVDWWDMVCNVKKLINEKKEDGKVFWQNLAGYKRQEALRPYLSSEEDREKGKKFARYQLGDLLLHLEKKHGEDWGKVYDEAWERIDKKVEGLSKHIKLEEERRSEDAQSKAALTDWLRAKASFVIEGLKEADKDEFCRCELKLQKWYGDLRGKPFAIEAENSILDISGFSKQYNCAFIWQKDGVKKLNLYLIINYFKGGKLRFKKIKPEAFEANRFYTVINKKSGEIVPMEVNFNFDDPNLIILPLAFGKRQGREFIWNDLLSLETGSLKLANGRVIEKTLYNRRTRQDEPALFVALTFERREVLDSSNIKPMNLIGVDRGENIPAVIALTDPEGCPLSRFKDSLGNPTHILRIGESYKEKQRTIQAKKEVEQRRAGGYSRKYASKAKNLADDMVRNTARDLLYYAVTQDAMLIFENLSRGFGRQGKRTFMAERQYTRMEDWLTAKLAYEGLPSKTYLSKTLAQYTSKTCSNCGFTITSADYDRVLEKLKKTATGWMTTINGKELKVEGQITYYNRYKRQNVVKDLSVELDRLSEESVNNDISSWTKGRSGEALSLLKKRFSHRPVQEKFVCLNCGFETHADEQAALNIARSWLFLRSQEYKKYQTNKTTGNTDKRAFVETWQSFYRKKLKEVWKPAV

SEQ ID NO: 48935 - protein, 978 aa, synthetic construct
  REGION 1..978: note = engineered CasX variant
QEIKRINKIRRRLVKDSNTKKAGKTGPMKTLLVRVMTPDLRERLENLRKKPENIPQPISNTSRANLNKLLTDYTEMKKAILHVYWEEFQKDPVGLMSRVAQPASKKIDQNKLKPEMDEKGNLTTAGFACSQCGQPLFVYKLEQVSEKGKAYTNYFGRCNVAEHEKLILLYQLKPEKDSDEAVTYSLGKFGQRALDFYSIHVTKESTHPVKPLAQIAGNRYASGPVGKALRDACMGTIASFLSKYQDIIIEHQKVVKGNQKRLESLRELAGKENLEYPSVTLPPQPHTKEGVDAYNEVIARVRMWVNLNLWQKLKLSRDDAKPLLRLKGFPSFPLVERQANEVDWWDMVCNVKKLINEKKEDGKVFWQNLAGYKRQEALRPYLSSEEDRKKGKKFARYQLGDLLLHLEKKHGEDWGKVYDEAWERIDKKVEGLSKHIKLEEERRSEDAQSKAALTDWLRAKASFVIEGLKEADKDEFCRCELKLQKWYGDLRGKPFAIEAENSILDISGFSKQYNCAFIWQKDGVKKLNLYLIINYFKGGKLRFKKIKPEAFEANRFYTVINKKSGEIVIMEVNFNFDDPNLIILPLAFGKRQGREFIWNDLLSLETGSLKLANGRVIEKTLYNRRTRQDEPALFVALTFERREVLDSSNIKPMNLIGVDRGENIPAVIALTDPEGCPLSRFKDSLGNPTHILRIGESYKEKQRTIQAKKEVEQRRAGGYSRKYASKAKNLADDMVRNTARDLLYYAVTQDAMLIFENLSRGFGRQGKRTFMAERQYTRMEDWLTAKLAYEGLPSKTYLSKTLAQYTSKTCSNCGFTITSADYDRVLEKLKKTATGWMTTINGKELKVEGQITYYNRYKRQNVVKDLSVELDRLSEESVNNDISSWTKGRSGEALSLLKKRFSHRPVQEKFVCLNCGFETHADEQAALNIARSWLFLRSQEYKKYQTNKTTGNTDKRAFVETWQSFYRKKLKEVWKPAV

SEQ ID NO: 48936 - protein, 978 aa, synthetic construct
  REGION 1..978: note = engineered CasX variant
QEIKRINKIRRRLVKDSNTKKAGKTGPMKTLLVRVMTPDLRERLENLRKKPENIPQPISNTSRANLNKLLTDYTEMKKAILHVYWEEFQKDPVGLMSRVAQPASKKIDQNKLKPEMDEKGNLTTAGFACSQCGQPLFVYKLEQVSEKGKAYTNYFGRCNVAEHEKLILLSQLKPEKDSDEAVTYSLGKFGQRALDFYSIHVTKESTHPVKPLAQIAGNRYASGPVGKALRGACMGTIASFLSKYQDIIIEHQKVVKGNQKRLESLRELAGKENLEYPSVTLPPQPHTKEGVDAYNEVIARVRMWVNLNLWQKLKLSRDDAKPLLRLKGFPSFPLVERQANEVDWWDMVCNVKKLINEKKEDGKVFWQNLAGYKRQEALRPYLSSEEDRKKGKKFARYQLGDLLLHLEKKHGEDWGKVYDEAWERIDKKVEGLSKHIKLEEERRSEDAQSKAALTDWLRAKASFVIEGLKEADKDEFCRCELKLQKWYGDLRGKPFAIEAENSILDISGFSKQYNCAFIWQKDGVKKLNLYLIINYFKGGKLRFKKIKPEAFEANRFYTVINKKSGEIVPMEVNFNFDDPNLIILPLAFGKRQGREFIWNDLLSLETGSLKLANGRVIEKTLYNRRTRQDEPALFVALTFERREVLDSSNIKPMNLIGVDRGENIPAVIALTDPEGCPLSRFKDSLGNPTHILRIGESYKEKQRTIQAKKEVEQRRAGGYSRKYASKAKNLADDMVRNTARDLLYYAVTQDAMLIFENLSRGFGRQGKRTFMAERQYTRMEDWLTAKLAYEGLPSKTYLSKTLAQYTSKTCSNCGFTITSADYDRVLEKLKKTATGWMTTINGKELKVEGQITYYNRYKRQNVVKDLSVELDRLSEESVNNDISSWTKGRSGEALSLLKKRFSHRPVQEKFVCLNCGFETHADEQAALNIARSWLFLRSQEYKKYQTNKTTGNTDKRAFVETWQSFYRKKLKEVWKPAV

SEQ ID NO: 48937 - protein, 978 aa, synthetic construct
  REGION 1..978: note = engineered CasX variant
QEIKRINKIRRRLVKDSNTKKAGKTGPMKTLLVRVMTPDLRERLENLRKKPENIPQPISNTSRANLNKLLTDYTEMKKAILHVYWEEFQKDPVGLMSRVAQPASKKIDQNKLKPEMDEKGNLTTAGFACSQCGQPLFVYKLEQVSEKGKAYTNYFGRCNVAEHEKLILLSQLKPEKDSDEAVTYSLGKFGQRALDFYSIHVTKESTHPVKPLAQIAGNRYASGPVGKALRDACMGTIASFLSKYQDIIIEHQKVVKGNQKRLESLRELAGKENLEYPSVTLPPQPHTKEGVDAYNEVIARVRMWVNLNLWQKLKLSRDDAKPLLRLKNFPSFPLVERQANEVDWWDMVCNVKKLINEKKEDGKVFWQNLAGYKRQEALRPYLSSEEDRKKGKKFARYQLGDLLLHLEKKHGEDWGKVYDEAWERIDKKVEGLSKHIKLEEERRSEDAQSKAALTDWLRAKASFVIEGLKEADKDEFCRCELKLQKWYGDLRGKPFAIEAENSILDISGFSKQYNCAFIWQKDGVKKLNLYLIINYFKGGKLRFKKIKPEAFEANRFYTVINKKSGEIVPMEVNFNFDDPNLIILPLAFGKRQGREFIWNDLLSLETGSLKLANGRVIEKTLYNRRTRQDEPALFVALTFERREVLDSSNIKPMNLIGVDRGENIPAVIALTDPEGCPLSRFKDSLGNPTHILRIGESYKEKQRTIQAKKEVEQRRAGGYSRKYASKAKNLADDMVRNTARDLLYYAVTQDAMLIFENLSRGFGRQGKRTFMAERQYTRMEDWLTAKLAYEGLPSKTYLSKTLAQYTSKTCSNCGFTITSADYDRVLEKLKKTATGWMTTINGKELKVEGQITYYNRYKRQNVVKDLSVELDRLSEESVNNDISSWTKGRSGEALSLLKKRFSHRPVQEKFVCLNCGFETHADEQAALNIARSWLFLRSQEYKKYQTNKTTGNTDKRAFVETWQSFYRKKLKEVWKPAV

SEQ ID NO: 48938 - protein, 978 aa, synthetic construct
  REGION 1..978: note = engineered CasX variant
QEIKRINKIRRRLVKDSNTKKAGKTGPMKTLLVRVMTPDLRERLENLRKKPENIPQPISNTSRANLNKLLTDYTEMKKAILHVYWEEFQKDPVGLMSRVAQPASKKIDQNKLKPEMDEKGNLTTAGFACSQCGQPLFVYKLEQVSEKGKAYTNYFGRCNVAEHEKLILLSQLKPEKDSDEAVTYSLGKFGQRALDFYSIHVTKESTHPVKPLAQIAGNRYASGPVGKALRDACMGTIASFLSKYQDIIIEHQKVVKGNQKRLESLRELAGKENLEYPSVTLPPQPHTKEGVDAYNEVIARVRMWVNLNLWQKLKLSRDDAKPLLRLKGFPSFPLVERQANEVDWWDMVCNVKKLINEKKEDGKVFWQNLAGYKRQEALRPYLSSEEDRKKGKKFARYQLGDLLNHLEKKHGEDWGKVYDEAWERIDKKVEGLSKHIKLEEERRSEDAQSKAALTDWLRAKASFVIEGLKEADKDEFCRCELKLQKWYGDLRGKPFAIEAENSILDISGFSKQYNCAFIWQKDGVKKLNLYLIINYFKGGKLRFKKIKPEAFEANRFYTVINKKSGEIVPMEVNFNFDDPNLIILPLAFGKRQGREFIWNDLLSLETGSLKLANGRVIEKTLYNRRTRQDEPALFVALTFERREVLDSSNIKPMNLIGVDRGENIPAVIALTDPEGCPLSRFKDSLGNPTHILRIGESYKEKQRTIQAKKEVEQRRAGGYSRKYASKAKNLADDMVRNTARDLLYYAVTQDAMLIFENLSRGFGRQGKRTFMAERQYTRMEDWLTAKLAYEGLPSKTYLSKTLAQYTSKTCSNCGFTITSADYDRVLEKLKKTATGWMTTINGKELKVEGQITYYNRYKRQNVVKDLSVELDRLSEESVNNDISSWTKGRSGEALSLLKKRFSHRPVQEKFVCLNCGFETHADEQAALNIARSWLFLRSQEYKKYQTNKTTGNTDKRAFVETWQSFYRKKLKEVWKPAV

SEQ ID NO: 48939 - protein, 978 aa, synthetic construct
  REGION 1..978: note = engineered CasX variant
QEIKRINKIRRRLVKDSNTKKAGKTGPMKTLLVRVMTPDLRERLENLRKKPENIPQPISNTSRANLNKLLTDYTEMKKAILHVYWEEFQKDPVGLMSRVAQPASKKIDQNKLKPEMDEKGNLTTAGFACSQCGQPLFVYKLEQVSEKGKAYTNYFGRCNVAEHEKLILLSQLKPEKDSDEAVTYSLGKFGQRALDFYSIHVTKESTHPVKPLAQIAGNRYASGPVGKALRDACMGTIASFLSKYQDIIIEHQKVVKGNQKRLESLRELAGKENLEYPSVTLPPQPHTKEGVDAYNEVIARVRMWVNLNLWQKLKLSRDDAKPLLRLKGFPSFPLVERQANEVDWWDMVCNVKKLINEKKEDGKVFWQNLAGYKRQEALRPYLSSEEDRKKGKKFARYQLGDLLWHLEKKHGEDWGKVYDEAWERIDKKVEGLSKHIKLEEERRSEDAQSKAALTDWLRAKASFVIEGLKEADKDEFCRCELKLQKWYGDLRGKPFAIEAENSILDISGFSKQYNCAFIWQKDGVKKLNLYLIINYFKGGKLRFKKIKPEAFEANRFYTVINKKSGEIVPMEVNFNFDDPNLIILPLAFGKRQGREFIWNDLLSLETGSLKLANGRVIEKTLYNRRTRQDEPALFVALTFERREVLDSSNIKPMNLIGVDRGENIPAVIALTDPEGCPLSRFKDSLGNPTHILRIGESYKEKQRTIQAKKEVEQRRAGGYSRKYASKAKNLADDMVRNTARDLLYYAVTQDAMLIFENLSRGFGRQGKRTFMAERQYTRMEDWLTAKLAYEGLPSKTYLSKTLAQYTSKTCSNCGFTITSADYDRVLEKLKKTATGWMTTINGKELKVEGQITYYNRYKRQNVVKDLSVELDRLSEESVNNDISSWTKGRSGEALSLLKKRFSHRPVQEKFVCLNCGFETHADEQAALNIARSWLFLRSQEYKKYQTNKTTGNTDKRAFVETWQSFYRKKLKEVWKPAV

SEQ ID NO: 48940 - protein, 978 aa, synthetic construct
  REGION 1..978: note = engineered CasX variant
QEIKRINKIRRRLVKDSNTKKAGKTGPMKTLLVRVMTPDLRERLENLRKKPENIPQPISNTSRANLNKLLTDYTEMKKAILHVYWEEFQKDPVGLMSRVAQPASKKIDQNKLKPEMDEKGNLTTAGFACSQCGQPLFVYKLEQVSEKGKAYTNYFGRCNVAEHEKLILLSQLKPEKDSDEAVTYSLGKFGQRALDFYSIHVTKESTHPVKPLAQIAGNRYASGPVGKALRDACMGTIASFLSKYQDIIIEHQKVVKGNQKRLESLRELAGKENLEYPSVTLPPQPHTKEGVDAYNEVIARVRMWVNLNLWQKLKLSRDDAKPLLRLKGFPSFPLVERQANEVDWWDMVCNVKKLINEKKEDGKVFWQNLAGYKRQEALRPYLSSEEDRKKGKKFARYQLGDLLLHLYKKHGEDWGKVYDEAWERIDKKVEGLSKHIKLEEERRSEDAQSKAALTDWLRAKASFVIEGLKEADKDEFCRCELKLQKWYGDLRGKPFAIEAENSILDISGFSKQYNCAFIWQKDGVKKLNLYLIINYFKGGKLRFKKIKPEAFEANRFYTVINKKSGEIVPMEVNFNFDDPNLIILPLAFGKRQGREFIWNDLLSLETGSLKLANGRVIEKTLYNRRTRQDEPALFVALTFERREVLDSSNIKPMNLIGVDRGENIPAVIALTDPEGCPLSRFKDSLGNPTHILRIGESYKEKQRTIQAKKEVEQRRAGGYSRKYASKAKNLADDMVRNTARDLLYYAVTQDAMLIFENLSRGFGRQGKRTFMAERQYTRMEDWLTAKLAYEGLPSKTYLSKTLAQYTSKTCSNCGFTITSADYDRVLEKLKKTATGWMTTINGKELKVEGQITYYNRYKRQNVVKDLSVELDRLSEESVNNDISSWTKGRSGEALSLLKKRFSHRPVQEKFVCLNCGFETHADEQAALNIARSWLFLRSQEYKKYQTNKTTGNTDKRAFVETWQSFYRKKLKEVWKPAV

SEQ ID NO: 48941 - protein, 978 aa, synthetic construct
  REGION 1..978: note = engineered CasX variant
QEIKRINKIRRRLVKDSNTKKAGKTGPMKTLLVRVMTPDLRERLENLRKKPENIPQPISNTSRANLNKLLTDYTEMKKAILHVYWEEFQKDPVGLMSRVAQPASKKIDQNKLKPEMDEKGNLTTAGFACSQCGQPLFVYKLEQVSEKGKAYTNYFGRCNVAEHEKLILLSQLKPEKDSDEAVTYSLGKFGQRALDFYSIHVTKESTHPVKPLAQIAGNRYASGPVGKALRDACMGTIASFLSKYQDIIIEHQKVVKGNQKRLESLRELAGKENLEYPSVTLPPQPHTKEGVDAYNEVIARVRMWVNLNLWQKLKLSRDDAKPLLRLKGFPSFPLVERQANEVDWWDMVCNVKKLINEKKEDGKVFWQNLAGYKRQEALRPYLSSEEDRKKGKKFARYQLGDLLLHLEKKHPEDWGKVYDEAWERIDKKVEGLSKHIKLEEERRSEDAQSKAALTDWLRAKASFVIEGLKEADKDEFCRCELKLQKWYGDLRGKPFAIEAENSILDISGFSKQYNCAFIWQKDGVKKLNLYLIINYFKGGKLRFKKIKPEAFEANRFYTVINKKSGEIVPMEVNFNFDDPNLIILPLAFGKRQGREFIWNDLLSLETGSLKLANGRVIEKTLYNRRTRQDEPALFVALTFERREVLDSSNIKPMNLIGVDRGENIPAVIALTDPEGCPLSRFKDSLGNPTHILRIGESYKEKQRTIQAKKEVEQRRAGGYSRKYASKAKNLADDMVRNTARDLLYYAVTQDAMLIFENLSRGFGRQGKRTFMAERQYTRMEDWLTAKLAYEGLPSKTYLSKTLAQYTSKTCSNCGFTITSADYDRVLEKLKKTATGWMTTINGKELKVEGQITYYNRYKRQNVVKDLSVELDRLSEESVNNDISSWTKGRSGEALSLLKKRFSHRPVQEKFVCLNCGFETHADEQAALNIARSWLFLRSQEYKKYQTNKTTGNTDKRAFVETWQSFYRKKLKEVWKPAV

SEQ ID NO: 48942 - protein, 979 aa, synthetic construct
  REGION 1..979: note = engineered CasX variant
QEIKRINKIRRRLVKDSNTKKAGKTGPMKTLLVRVMTPDLRERLENLRKKPENIPQPISNTSRANLNKLLTDYTEMKKAILHVYWEEFQKDPVGLMSRVAQPASKKIDQNKLKPEMDEKGNLTTAGFACSQCGQPLFVYKLEQVSEKGKAYTNYFGRCNVAEHEKLILLSQLKPEKDSDEAVTYSLGKFGQRALDFYSIHVTKESTHPVKPLAQIAGNRYASGPVGKALRDACMGTIASFLSKYQDIIIEHQKVVKGNQKRLESLRELAGKENLEYPSVTLPPQPHTKEGVDAYNEVIARVRMWVNLNLWQKLKLSRDDAKPLLRLKGFPSFPLVERQANEVDWWDMVCNVKKLINEKKEDGKVFWQNLAGYKRQEALRPYLSSEEDRKKGKKFARYQLGDLLLHLEKKHGERDWGKVYDEAWERIDKKVEGLSKHIKLEEERRSEDAQSKAALTDWLRAKASFVIEGLKEADKDEFCRCELKLQKWYGDLRGKPFAIEAENSILDISGFSKQYNCAFIWQKDGVKKLNLYLIINYFKGGKLRFKKIKPEAFEANRFYTVINKKSGEIVPMEVNFNFDDPNLIILPLAFGKRQGREFIWNDLLSLETGSLKLANGRVIEKTLYNRRTRQDEPALFVALTFERREVLDSSNIKPMNLIGVDRGENIPAVIALTDPEGCPLSRFKDSLGNPTHILRIGESYKEKQRTIQAKKEVEQRRAGGYSRKYASKAKNLADDMVRNTARDLLYYAVTQDAMLIFENLSRGFGRQGKRTFMAERQYTRMEDWLTAKLAYEGLPSKTYLSKTLAQYTSKTCSNCGFTITSADYDRVLEKLKKTATGWMTTINGKELKVEGQITYYNRYKRQNVVKDLSVELDRLSEESVNNDISSWTKGRSGEALSLLKKRFSHRPVQEKFVCLNCGFETHADEQAALNIARSWLFLRSQEYKKYQTNKTTGNTDKRAFVETWQSFYRKKLKEVWKPAV

SEQ ID NO: 48943 - protein, 979 aa, synthetic construct
  REGION 1..979: note = engineered CasX variant
QEIKRINKIRRRLVKDSNTKKAGKTGPMKTLLVRVMTPDLRERLENLRKKPENIPQPISNTSRANLNKLLTDYTEMKKAILHVYWEEFQKDPVGLMSRVAQPASKKIDQNKLKPEMDEKGNLTTAGFACSQCGQPLFVYKLEQVSEKGKAYTNYFGRCNVAEHEKLILLSQLKPEKDSDEAVTYSLGKFGQRALDFYSIHVTKESTHPVKPLAQIAGNRYASGPVGKALRDACMGTIASFLSKYQDIIIEHQKVVKGNQKRLESLRELAGKENLEYPSVTLPPQPHTKEGVDAYNEVIARVRMWVNLNLWQKLKLSRDDAKPLLRLKGFPSFPLVERQANEVDWWDMVCNVKKLINEKKEDGKVFWQNLAGYKRQEALRPYLSSEEDRKKGKKFARYQLGDLLLHLEKKHGEYDWGKVYDEAWERIDKKVEGLSKHIKLEEERRSEDAQSKAALTDWLRAKASFVIEGLKEADKDEFCRCELKLQKWYGDLRGKPFAIEAENSILDISGFSKQYNCAFIWQKDGVKKLNLYLIINYFKGGKLRFKKIKPEAFEANRFYTVINKKSGEIVPMEVNFNFDDPNLIILPLAFGKRQGREFIWNDLLSLETGSLKLANGRVIEKTLYNRRTRQDEPALFVALTFERREVLDSSNIKPMNLIGVDRGENIPAVIALTDPEGCPLSRFKDSLGNPTHILRIGESYKEKQRTIQAKKEVEQRRAGGYSRKYASKAKNLADDMVRNTARDLLYYAVTQDAMLIFENLSRGFGRQGKRTFMAERQYTRMEDWLTAKLAYEGLPSKTYLSKTLAQYTSKTCSNCGFTITSADYDRVLEKLKKTATGWMTTINGKELKVEGQITYYNRYKRQNVVKDLSVELDRLSEESVNNDISSWTKGRSGEALSLLKKRFSHRPVQEKFVCLNCGFETHADEQAALNIARSWLFLRSQEYKKYQTNKTTGNTDKRAFVETWQSFYRKKLKEVWKPAV

SEQ ID NO: 48944 - protein, 978 aa, synthetic construct
  REGION 1..978: note = engineered CasX variant
QEIKRINKIRRRLVKDSNTKKAGKTGPMKTLLVRVMTPDLRERLENLRKKPENIPQPISNTSRANLNKLLTDYTEMKKAILHVYWEEFQKDPVGLMSRVAQPASKKIDQNKLKPEMDEKGNLTTAGFACSQCGQPLFVYKLEQVSEKGKAYTNYFGRCNVAEHEKLILLSQLKPEKDSDEAVTYSLGKFGQRALDFYSIHVTKESTHPVKPLAQIAGNRYASGPVGKALRDACMGTIASFLSKYQDIIIEHQKVVKGNQKRLESLRELAGKENLEYPSVTLPPQPHTKEGVDAYNEVIARVRMWVNLNLWQKLKLSRDDAKPLLRLKGFPSFPLVERQANEVDWWDMVCNVKKLINEKKEDGKVFWQNLAGYKRQEALRPYLSSEEDRKKGKKFARYQLGDLLLHLEKKHGEDWGDVYDEAWERIDKKVEGLSKHIKLEEERRSEDAQSKAALTDWLRAKASFVIEGLKEADKDEFCRCELKLQKWYGDLRGKPFAIEAENSILDISGFSKQYNCAFIWQKDGVKKLNLYLIINYFKGGKLRFKKIKPEAFEANRFYTVINKKSGEIVPMEVNFNFDDPNLIILPLAFGKRQGREFIWNDLLSLETGSLKLANGRVIEKTLYNRRTRQDEPALFVALTFERREVLDSSNIKPMNLIGVDRGENIPAVIALTDPEGCPLSRFKDSLGNPTHILRIGESYKEKQRTIQAKKEVEQRRAGGYSRKYASKAKNLADDMVRNTARDLLYYAVTQDAMLIFENLSRGFGRQGKRTFMAERQYTRMEDWLTAKLAYEGLPSKTYLSKTLAQYTSKTCSNCGFTITSADYDRVLEKLKKTATGWMTTINGKELKVEGQITYYNRYKRQNVVKDLSVELDRLSEESVNNDISSWTKGRSGEALSLLKKRFSHRPVQEKFVCLNCGFETHADEQAALNIARSWLFLRSQEYKKYQTNKTTGNTDKRAFVETWQSFYRKKLKEVWKPAV

SEQ ID NO: 48945 - protein, 978 aa, synthetic construct
  REGION 1..978: note = engineered CasX variant
QEIKRINKIRRRLVKDSNTKKAGKTGPMKTLLVRVMTPDLRERLENLRKKPENIPQPISNTSRANLNKLLTDYTEMKKAILHVYWEEFQKDPVGLMSRVAQPASKKIDQNKLKPEMDEKGNLTTAGFACSQCGQPLFVYKLEQVSEKGKAYTNYFGRCNVAEHEKLILLSQLKPEKDSDEAVTYSLGKFGQRALDFYSIHVTKESTHPVKPLAQIAGNRYASGPVGKALRDACMGTIASFLSKYQDIIIEHQKVVKGNQKRLESLRELAGKENLEYPSVTLPPQPHTKEGVDAYNEVIARVRMWVNLNLWQKLKLSRDDAKPLLRLKGFPSFPLVERQANEVDWWDMVCNVKKLINEKKEDGKVFWQNLAGYKRQEALRPYLSSEEDRKKGKKFARYQLGDLLLHLEKKHGEDWGKVYGEAWERIDKKVEGLSKHIKLEEERRSEDAQSKAALTDWLRAKASFVIEGLKEADKDEFCRCELKLQKWYGDLRGKPFAIEAENSILDISGFSKQYNCAFIWQKDGVKKLNLYLIINYFKGGKLRFKKIKPEAFEANRFYTVINKKSGEIVPMEVNFNFDDPNLIILPLAFGKRQGREFIWNDLLSLETGSLKLANGRVIEKTLYNRRTRQDEPALFVALTFERREVLDSSNIKPMNLIGVDRGENIPAVIALTDPEGCPLSRFKDSLGNPTHILRIGESYKEKQRTIQAKKEVEQRRAGGYSRKYASKAKNLADDMVRNTARDLLYYAVTQDAMLIFENLSRGFGRQGKRTFMAERQYTRMEDWLTAKLAYEGLPSKTYLSKTLAQYTSKTCSNCGFTITSADYDRVLEKLKKTATGWMTTINGKELKVEGQITYYNRYKRQNVVKDLSVELDRLSEESVNNDISSWTKGRSGEALSLLKKRFSHRPVQEKFVCLNCGFETHADEQAALNIARSWLFLRSQEYKKYQTNKTTGNTDKRAFVETWQSFYRKKLKEVWKPAV

SEQ ID NO: 48946 - protein, 978 aa, synthetic construct
  REGION 1..978: note = engineered CasX variant
QEIKRINKIRRRLVKDSNTKKAGKTGPMKTLLVRVMTPDLRERLENLRKKPENIPQPISNTSRANLNKLLTDYTEMKKAILHVYWEEFQKDPVGLMSRVAQPASKKIDQNKLKPEMDEKGNLTTAGFACSQCGQPLFVYKLEQVSEKGKAYTNYFGRCNVAEHEKLILLSQLKPEKDSDEAVTYSLGKFGQRALDFYSIHVTKESTHPVKPLAQIAGNRYASGPVGKALRDACMGTIASFLSKYQDIIIEHQKVVKGNQKRLESLRELAGKENLEYPSVTLPPQPHTKEGVDAYNEVIARVRMWVNLNLWQKLKLSRDDAKPLLRLKGFPSFPLVERQANEVDWWDMVCNVKKLINEKKEDGKVFWQNLAGYKRQEALRPYLSSEEDRKKGKKFARYQLGDLLLHLEKKHGEDWGKVYDEAWERIDKKVEGLSKHIKLEEERRSEDAQSKAALTDWLRAKASFVIEGKKEADKDEFCRCELKLQKWYGDLRGKPFAIEAENSILDISGFSKQYNCAFIWQKDGVKKLNLYLIINYFKGGKLRFKKIKPEAFEANRFYTVINKKSGEIVPMEVNFNFDDPNLIILPLAFGKRQGREFIWNDLLSLETGSLKLANGRVIEKTLYNRRTRQDEPALFVALTFERREVLDSSNIKPMNLIGVDRGENIPAVIALTDPEGCPLSRFKDSLGNPTHILRIGESYKEKQRTIQAKKEVEQRRAGGYSRKYASKAKNLADDMVRNTARDLLYYAVTQDAMLIFENLSRGFGRQGKRTFMAERQYTRMEDWLTAKLAYEGLPSKTYLSKTLAQYTSKTCSNCGFTITSADYDRVLEKLKKTATGWMTTINGKELKVEGQITYYNRYKRQNVVKDLSVELDRLSEESVNNDISSWTKGRSGEALSLLKKRFSHRPVQEKFVCLNCGFETHADEQAALNIARSWLFLRSQEYKKYQTNKTTGNTDKRAFVETWQSFYRKKLKEVWKPAV

SEQ ID NO: 48947 - protein, 978 aa, synthetic construct
  REGION 1..978: note = engineered CasX variant
QEIKRINKIRRRLVKDSNTKKAGKTGPMKTLLVRVMTPDLRERLENLRKKPENIPQPISNTSRANLNKLLTDYTEMKKAILHVYWEEFQKDPVGLMSRVAQPASKKIDQNKLKPEMDEKGNLTTAGFACSQCGQPLFVYKLEQVSEKGKAYTNYFGRCNVAEHEKLILLSQLKPEKDSDEAVTYSLGKFGQRALDFYSIHVTKESTHPVKPLAQIAGNRYASGPVGKALRDACMGTIASFLSKYQDIIIEHQKVVKGNQKRLESLRELAGKENLEYPSVTLPPQPHTKEGVDAYNEVIARVRMWVNLNLWQKLKLSRDDAKPLLRLKGFPSFPLVERQANEVDWWDMVCNVKKLINEKKEDGKVFWQNLAGYKRQEALRPYLSSEEDRKKGKKFARYQLGDLLLHLEKKHGEDWGKVYDEAWERIDKKVEGLSKHIKLEEERRSEDAQSKAALTDWLRAKASFVIEGSKEADKDEFCRCELKLQKWYGDLRGKPFAIEAENSILDISGFSKQYNCAFIWQKDGVKKLNLYLIINYFKGGKLRFKKIKPEAFEANRFYTVINKKSGEIVPMEVNFNFDDPNLIILPLAFGKRQGREFIWNDLLSLETGSLKLANGRVIEKTLYNRRTRQDEPALFVALTFERREVLDSSNIKPMNLIGVDRGENIPAVIALTDPEGCPLSRFKDSLGNPTHILRIGESYKEKQRTIQAKKEVEQRRAGGYSRKYASKAKNLADDMVRNTARDLLYYAVTQDAMLIFENLSRGFGRQGKRTFMAERQYTRMEDWLTAKLAYEGLPSKTYLSKTLAQYTSKTCSNCGFTITSADYDRVLEKLKKTATGWMTTINGKELKVEGQITYYNRYKRQNVVKDLSVELDRLSEESVNNDISSWTKGRSGEALSLLKKRFSHRPVQEKFVCLNCGFETHADEQAALNIARSWLFLRSQEYKKYQTNKTTGNTDKRAFVETWQSFYRKKLKEVWKPAV

SEQ ID NO: 48948 - protein, 979 aa, synthetic construct
  REGION 1..979: note = engineered CasX variant
QEIKRINKIRRRLVKDSNTKKAGKTGPMKTLLVRVMTPDLRERLENLRKKPENIPQPISNTSRANLNKLLTDYTEMKKAILHVYWEEFQKDPVGLMSRVAQPASKKIDQNKLKPEMDEKGNLTTAGFACSQCGQPLFVYKLEQVSEKGKAYTNYFGRCNVAEHEKLILLSQLKPEKDSDEAVTYSLGKFGQRALDFYSIHVTKESTHPVKPLAQIAGNRYASGPVGKALRDACMGTIASFLSKYQDIIIEHQKVVKGNQKRLESLRELAGKENLEYPSVTLPPQPHTKEGVDAYNEVIARVRMWVNLNLWQKLKLSRDDAKPLLRLKGFPSFPLVERQANEVDWWDMVCNVKKLINEKKEDGKVFWQNLAGYKRQEALRPYLSSEEDRKKGKKFARYQLGDLLLHLEKKHGEDWGKVYDEAWERIDKKVEGLSKHIKLEEERRSEDAQSKAALTDWLRAKASFVIEGLKEADDKDEFCRCELKLQKWYGDLRGKPFAIEAENSILDISGFSKQYNCAFIWQKDGVKKLNLYLIINYFKGGKLRFKKIKPEAFEANRFYTVINKKSGEIVPMEVNFNFDDPNLIILPLAFGKRQGREFIWNDLLSLETGSLKLANGRVIEKTLYNRRTRQDEPALFVALTFERREVLDSSNIKPMNLIGVDRGENIPAVIALTDPEGCPLSRFKDSLGNPTHILRIGESYKEKQRTIQAKKEVEQRRAGGYSRKYASKAKNLADDMVRNTARDLLYYAVTQDAMLIFENLSRGFGRQGKRTFMAERQYTRMEDWLTAKLAYEGLPSKTYLSKTLAQYTSKTCSNCGFTITSADYDRVLEKLKKTATGWMTTINGKELKVEGQITYYNRYKRQNVVKDLSVELDRLSEESVNNDISSWTKGRSGEALSLLKKRFSHRPVQEKFVCLNCGFETHADEQAALNIARSWLFLRSQEYKKYQTNKTTGNTDKRAFVETWQSFYRKKLKEVWKPAV

SEQ ID NO: 48949 - protein, 979 aa, synthetic construct
  REGION 1..979: note = engineered CasX variant
QEIKRINKIRRRLVKDSNTKKAGKTGPMKTLLVRVMTPDLRERLENLRKKPENIPQPISNTSRANLNKLLTDYTEMKKAILHVYWEEFQKDPVGLMSRVAQPASKKIDQNKLKPEMDEKGNLTTAGFACSQCGQPLFVYKLEQVSEKGKAYTNYFGRCNVAEHEKLILLSQLKPEKDSDEAVTYSLGKFGQRALDFYSIHVTKESTHPVKPLAQIAGNRYASGPVGKALRDACMGTIASFLSKYQDIIIEHQKVVKGNQKRLESLRELAGKENLEYPSVTLPPQPHTKEGVDAYNEVIARVRMWVNLNLWQKLKLSRDDAKPLLRLKGFPSFPLVERQANEVDWWDMVCNVKKLINEKKEDGKVFWQNLAGYKRQEALRPYLSSEEDRKKGKKFARYQLGDLLLHLEKKHGEDWGKVYDEAWERIDKKVEGLSKHIKLEEERRSEDAQSKAALTDWLRAKASFVIEGLKEADKDEFCRCELKLQKWYGDLRGKPFAIEAENSILDISGFSKQYNCAFIWQKDGVKKLNLYLIINYFKGGKLRFKKIKPEAFEANRFYTVINKKSGEIVPMEVNFNFDDPNLIILPLAFGKRQGREFIWNDLLSLETGSLKLANGRVIEKTLYNRRTRQDEPALFVALTFERREVLDSSNIKPMNLIGVDRGENIPAVIALTDPEGCPLSRFKDSLGNPTHILRIGESYKEKQRTIQAKKEVEQRRAGGYSRKYASKAKNLADDMVRNTARDLLYYAVTQDAMLIFENLSRGFGRQGKRTFMAERQYTRMEDWLTAKLAYEGLPSKTYLSKTLAQYTSKTCSNCGFTITSADYDRVLEKLKKTATGWMTTINGKELKVEGQITYYNRYKRQNVVKDLSVELDRLSEESVNNDISSWTKGRSGNEALSLLKKRFSHRPVQEKFVCLNCGFETHADEQAALNIARSWLFLRSQEYKKYQTNKTTGNTDKRAFVETWQSFYRKKLKEVWKPAV

SEQ ID NO: 48950 - protein, 978 aa, synthetic construct
  REGION 1..978: note = engineered CasX variant
QEIKRINKIRRRLVKDSNTKKAGKTGPMKTLLVRVMTPDLRERLENLRKKPENIPQPISNTSRANLNKLLTDYTEMKKAILHVYWEEFQKDPVGLMSRVAQPASKKIDQNKLKPEMDEKGNLTTAGFACSQCGQPLFVYKLEQVSEKGKAYTNYFGRCNVAEHEKLILLSQLKPEKDSDEAVTYSLGKFGQRALDFYSIHVTKESTHPVKPLAQIAGNRYASGPVGKALRDACMGTIASFLSKYQDIIIEHQKVVKGNQKRLESLRELAGKENLEYPSVTLPPQPHTKEGVDAYNEVIARVRMWVNLNLWQKLKLSRDDAKPLLRLKGFPSFPLVERQANEVDWWDMVCNVKKLINEKKEDGKVFWQNLAGYKRQEALRPYLSSEEDRQKGKKFARYQLGDLLLHLEKKHGEDWGKVYDEAWERIDKKVEGLSKHIKLEEERRSEDAQSKAALTDWLRAKASFVIEGLKEADKDEFCRCELKLQKWYGDLRGKPFAIEAENSILDISGFSKQYNCAFIWQKDGVKKLNLYLIINYFKGGKLRFKKIKPEAFEANRFYTVINKKSGEIVPMEVNFNFDDPNLIILPLAFGKRQGREFIWNDLLSLETGSLKLANGRVIEKTLYNRRTRQDEPALFVALTFERREVLDSSNIKPMNLIGVDRGENIPAVIALTDPEGCPLSRFKDSLGNPTHILRIGESYKEKQRTIQAKKEVEQRRAGGYSRKYASKAKNLADDMVRNTARDLLYYAVTQDAMLIFENLSRGFGRQGKRTFMAERQYTRMEDWLTAKLAYEGLPSKTYLSKTLAQYTSKTCSNCGFTITSADYDRVLEKLKKTATGWMTTINGKELKVEGQITYYNRYKRQNVVKDLSVELDRLSEESVNNDISSWTKGRSGEALSLLKKRFSHRPVQEKFVCLNCGFETHADEQAALNIARSWLFLRSQEYKKYQTNKTTGNTDKRAFVETWQSFYRKKLKEVWKPAV

SEQ ID NO: 48951 - protein, 978 aa, synthetic construct
  REGION 1..978: note = engineered CasX variant
QEIKRINKIRRRLVKDSNTKKAGKTGPMKTLLVRVMTPDLRERLENLRKKPENIPQPISNTSRANLNKLLTDYTEMKKAILHVYWEEFQKDPVGLMSRVAQPASKKIDQNKLKPEMDEKGNLTTAGFACSQCGQPLFVYKLEQVSEKGKAYTNYFGRCNVAEHEKLILLSQLKPEKDSDEAVTYSLGKFGQRALDFYSIHVTKESTHPVKPLAQIAGNRYASGPVGKALRDACMGTIASFLSKYQDIIIEHQKVVKGNQKRLESLRELAGKENLEYPSVTLPPQPHTKEGVDAYNEVIARVRMWVNLNLWQKLKLSRDDAKPLLRLKGFPSFPLVERQANEVDWWDMVCNVKKLINEKKEDGKVFWQNLAGYKRQEALRPYLSSEEDRKKGKKFARYQLGDLLLHLEKKHGEDWGKVYDEAWERIDKKVEGLSKHIKLEEERRSEDAQSKAALTDWLRAKASFVIEGLKEADKDEFCRCELKLQKWYGDLRGKPFAIEAENSILDISGFSKQYNCAFIWQKDGVKKLNLYLIINYFKGGKLRFKKIKPEAFEANRFYTVINKKSGEIVPMEVNFNFDDPNLIILPLAFGKRQGREFIWNDLLSLETGSLKLANGRVIEKTLYNRRTRQDEPALFVALTFERREVLDSSNIKPMNLIGVDRGENIPAVIALTDPEGCPLSRFKDSLGNPTHILRIGESYKEKQRTIQAKKEVEQRRAGGYSRKYASKAKNLADDMVRNTARDLLYYAVTQDAMLIFENLSRGFGRQGKRTFMAERQYTRMEDWLTAKLAYEGLPSQTYLSKTLAQYTSKTCSNCGFTITSADYDRVLEKLKKTATGWMTTINGKELKVEGQITYYNRYKRQNVVKDLSVELDRLSEESVNNDISSWTKGRSGEALSLLKKRFSHRPVQEKFVCLNCGFETHADEQAALNIARSWLFLRSQEYKKYQTNKTTGNTDKRAFVETWQSFYRKKLKEVWKPAV

SEQ ID NO: 48952 - protein, 978 aa, synthetic construct
  REGION 1..978: note = engineered CasX variant
QEIKRINKIRRRLVKDSNTKKAGKTGPMKTLLVRVMTPDLRERLENLRKKPENIPQPISNTSRANLNKLLTDYTEMKKAILHVYWEEFQKDPVGLMSRVAQPASKKIDQNKLKPEMDEKGNLTTAGFACSQCGQPLFVYKLEQVSEKGKAYTNYFGRCNVAEHEKLILLSQLKPEKDSDEAVTYSLGKFGQRALDFYSIHVTKESTHPVKPLAQIAGNRYASGPVGKALRDACMGTIASFLSKYQDIIIEHQKVVKGNQKRLESLRELAGKENLEYPSVTLPPQPHTKEGVDAYNEVIARVRMWVNLNLWQKLKLSRDDAKPLLRLKGFPSFPLVERQANEVDWWDMVCNVKKLINEKKEDGKVFWQNLAGYKRQEALRPYLSSEEDRKKGKKFARYQLGDLLLHLEKKHGEDWGKVYDEAWERIDKKVEGLSKHIKLEEERRSEDAQSKAALTDWLRAKASFVIEGLKEADKDEFCRCELKLQKWYGDLRGKPFAIEAENSILDISGFSKQYNCAFIWQKDGVKKLNLYLIINYFKGGKLRFKKIKPEAFEANRFYTVINKKSGEIVPMEVNFNFDDPNLIILPLAFGKRQGREFIWNDLLSLETGSLKLANGRVIEKTLYNRRTRQDEPALFVALTFERREVLDSSNIKPMNLIGVDRGENIPAVIALTDPEGCPLSRFKDSLGNPTHILRIGESYKEKQRTIQAKKEVEQRRAGGYSRKYASKAKNLADDMVRNTARDLLYYAVTQDAMLIFENLSRGFGRQGKRTFMAERQYTRMEDWLTAKLAYNGLPSKTYLSKTLAQYTSKTCSNCGFTITSADYDRVLEKLKKTATGWMTTINGKELKVEGQITYYNRYKRQNVVKDLSVELDRLSEESVNNDISSWTKGRSGEALSLLKKRFSHRPVQEKFVCLNCGFETHADEQAALNIARSWLFLRSQEYKKYQTNKTTGNTDKRAFVETWQSFYRKKLKEVWKPAV

SEQ ID NO: 48953 - protein, 978 aa, synthetic construct
  REGION 1..978: note = engineered CasX variant
QEIKRINKIRRRLVKDSNTKKAGKTGPMKTLLVRVMTPDLRERLENLRKKPENIPQPISNTSRANLNKLLTDYTEMKKAILHVYWEEFQKDPVGLMSRVAQPASKKIDQNKLKPEMDEKGNLTTAGFACSQCGQPLFVYKLEQVSEKGKAYTNYFGRCNVAEHEKLIQLSQLKPEKDSDEAVTYSLGKFGQRALDFYSIHVTKESTHPVKPLAQIAGNRYASGPVGKALRDACMGTIASFLSKYQDIIIEHQKVVKGNQKRLESLRELAGKENLEYPSVTLPPQPHTKEGVDAYNEVIARVRMWVNLNLWQKLKLSRDDAKPLLRLKGFPSFPLVERQANEVDWWDMVCNVKKLINEKKEDGKVFWQNLAGYKRQEALRPYLSSEEDRKKGKKFARYQLGDLLLHLEKKHGEDWGKVYDEAWERIDKKVEGLSKHIKLEEERRSEDAQSKAALTDWLRAKASFVIEGLKEADKDEFCRCELKLQKWYGDLRGKPFAIEAENSILDISGFSKQYNCAFIWQKDGVKKLNLYLIINYFKGGKLRFKKIKPEAFEANRFYTVINKKSGEIVPMEVNFNFDDPNLIILPLAFGKRQGREFIWNDLLSLETGSLKLANGRVIEKTLYNRRTRQDEPALFVALTFERREVLDSSNIKPMNLIGVDRGENIPAVIALTDPEGCPLSRFKDSLGNPTHILRIGESYKEKQRTIQAKKEVEQRRAGGYSRKYASKAKNLADDMVRNTARDLLYYAVTQDAMLIFENLSRGFGRQGKRTFMAERQYTRMEDWLTAKLAYEGLPSKTYLSKTLAQYTSKTCSNCGFTITSADYDRVLEKLKKTATGWMTTINGKELKVEGQITYYNRYKRQNVVKDLSVELDRLSEESVNNDISSWTKGRSGEALSLLKKRFSHRPVQEKFVCLNCGFETHADEQAALNIARSWLFLRSQEYKKYQTNKTTGNTDKRAFVETWQSFYRKKLKEVWKPAV

SEQ ID NO: 48954 - protein, 978 aa, synthetic construct
  REGION 1..978: note = engineered CasX variant
QEIKRINKIRRRLVKDSNTKKAGKTGPMKTLLVRVMTPDLRERLENLRKKPENIPQPISNTSRANLNKLLTDYTEMKKAILHVYWEEFQKDPVGLMSRVAQPASKKIDQNKLKPEMDEKGNLTTAGFACSQCGQPLFVYKLEQVSEKGKAYTNYFGRCNVAEHEKLILLSQLKPEKDSDEAVTYSLGKFGQRALDFYSIHVTKESTHPVKPLAQIAGNRYASGPVGKALRDACMGTIASFLSKYQDIIIEHQKVVKGNQKRLESLRELAGKENLEYPSVTLPPQPHTKEGVDAYNEVIARVRMWVNLNLWQKLKLSRDDAKPLLRLKGFPSFPLVERQANEVDWWDMVCNVKKLINEKKEDGKVFWQNLAIYKRQEALRPYLSSEEDRKKGKKFARYQLGDLLLHLEKKHGEDWGKVYDEAWERIDKKVEGLSKHIKLEEERRSEDAQSKAALTDWLRAKASFVIEGLKEADKDEFCRCELKLQKWYGDLRGKPFAIEAENSILDISGFSKQYNCAFIWQKDGVKKLNLYLIINYFKGGKLRFKKIKPEAFEANRFYTVINKKSGEIVPMEVNFNFDDPNLIILPLAFGKRQGREFIWNDLLSLETGSLKLANGRVIEKTLYNRRTRQDEPALFVALTFERREVLDSSNIKPMNLIGVDRGENIPAVIALTDPEGCPLSRFKDSLGNPTHILRIGESYKEKQRTIQAKKEVEQRRAGGYSRKYASKAKNLADDMVRNTARDLLYYAVTQDAMLIFENLSRGFGRQGKRTFMAERQYTRMEDWLTAKLAYEGLPSKTYLSKTLAQYTSKTCSNCGFTITSADYDRVLEKLKKTATGWMTTINGKELKVEGQITYYNRYKRQNVVKDLSVELDRLSEESVNNDISSWTKGRSGEALSLLKKRFSHRPVQEKFVCLNCGFETHADEQAALNIARSWLFLRSQEYKKYQTNKTTGNTDKRAFVETWQSFYRKKLKEVWKPAV

SEQ ID NO: 48955 - protein, 978 aa, synthetic construct
  REGION 1..978: note = engineered CasX variant
QEIKRINKIRRRLVKDSNTKKAGKTGPMKTLLVRVMTPDLRERLENLRKKPENIPQPISNTSRANLNKLLTDYTEMKKAILHVYWEEFQKDPVGLMSRVAQPASKKIDQNKLKPEMDEKGNLTTAGFACSQCGQPLFVYKLEQVSEKGKAYTNYFGRCNVAEHEKLILLSQLKPEKDSDEAVTYSLGKFGQRALDFYSIHVTKESTHPVKPLAQIAGNRYASGPVGKALRDACMGTIASFLSKYQDIIIEHQKVVKGNQKRLESLRELAGKENLEYPSVTLPPQPHTKEGVDAYNEVIARVRMWVNLNLWQKLKLSRDDAKPLLRLKGFPSFPLVERQANEVDWWDMVCNVKKLINEKKEDGKVFWQNLAGYKRQEALRPYLSSEEDREKGKKFARYQLGDLLLHLEKKHGEDWGKVYDEAWERIDKKVEGLSKHIKLEEERRSEDAQSKAALTDWLRAKASFVIEGLKEADKDEFCRCELKLQKWYGDLRGKPFAIEAENSILDISGFSKQYNCAFIWQKDGVKKLNLYLIINYFKGGKLRFKKIKPEAFEANRFYTVINKKSGEIVPMEVNFNFDDPNLIILPLAFGKRQGREFIWNDLLSLETGSLKLANGRVIEKTLYNRRTRQDEPALFVALTFERREVLDSSNIKPMNLIGVDRGENIPAVIALTDPEGCPLSRFKDSLGNPTHILRIGESYKEKQRTIQAKKEVEQRRAGGYSRKYASKAKNLADDMVRNTARDLLYYAVTQDAMLIFENLSRGFGRQGKRTFMAERQYTRMEDWLTAKLAYEGLPSKTYLSKTLAQYTSKTCSNCGFTITSADYDRVLEKLKKTATGWMTTINGKELKVEGQITYYNRYKRQNVVKDLSVELDRLSEESVNNDISSWTKGRSGEALSLLKKRFSHRPVQEKFVCLNCGFETHADEQAALNIARSWLFLRSQEYKKYQTNKTTGNTDKRAFVETWQSFYRKKLKEVWKPAV

SEQ ID NO: 48956 - protein, 978 aa, synthetic construct
  REGION 1..978: note = engineered CasX variant
QEIKRINKIRRRLVKDSNTKKAGKTGPMKTLLVRVMTPDLRERLENLRKKPENIPQPISNTSRANLNKLLTDYTEMKKAILHVYWEEFQKDPVGLMSRVAQPASKKIDQNKLKPEMDEKGNLTTAGFACSQCGQPLFVYKLEQVSEKGKAYTNYFGRCNVAEHEKLILLSQLKPEKDSDEAVTYSLGKFGQRALDFYSIHVTKESTHPVKPLAQIAGNRYASGPVGKALRDACMGTIASFLSKYQDIIIEHQKVVKGNQKRLESLRELAGKENLEYPSVTLPPQPHTKEGVDAYNEVIARVRMWVNLNLWQKLKLSRDDAKPLLRLKGFPSFPLVERQANEVDWWDMVCNVKKLINEKKEDGKVFWQNLAGYKRQEALRPYLSSEEDRKKGKKFARYQLGDLLLHLEKKHGEDWGKVYDEAWERIDKKVEGLSKHIKLEEERRSEDAQSKAALTDWLRAKASFVIEGLKEADKDEFCRCELKLQKWYGDLRGKPFAIEAENSILDISGFSKQYNCAFIWQKDGVKKLNLYLIINYFKGGKLRFKKIKPEAFEANRFYTVINKKSGEIVIMEVNFNFDDPNLIILPLAFGKRQGREFIWNDLLSLETGSLKLANGRVIEKTLYNRRTRQDEPALFVALTFERREVLDSSNIKPMNLIGVDRGENIPAVIALTDPEGCPLSRFKDSLGNPTHILRIGESYKEKQRTIQAKKEVEQRRAGGYSRKYASKAKNLADDMVRNTARDLLYYAVTQDAMLIFENLSRGFGRQGKRTFMAERQYTRMEDWLTAKLAYEGLPSKTYLSKTLAQYTSKTCSNCGFTITSADYDRVLEKLKKTATGWMTTINGKELKVEGQITYYNRYKRQNVVKDLSVELDRLSEESVNNDISSWTKGRSGEALSLLKKRFSHRPVQEKFVCLNCGFETHADEQAALNIARSWLFLRSQEYKKYQTNKTTGNTDKRAFVETWQSFYRKKLKEVWKPAV

SEQ ID NO: 48957 - protein, 977 aa, synthetic construct
  REGION 1..977: note = engineered CasX variant
QEIKRINKIRRRLVKDSNTKKAGKTGPMKTLLVRVMTPDLRERLENLRKKPENIPQPISNTSRANLNKLLTDYTEMKKAILHVYWEEFQKDPVGLMSRVAQPASKKIDQNKLKPEMDEKGNLTTAGFACSQCGQPLFVYKLEQVSEKGKAYTNYFGRCNVAEHEKLILLAQLKPEKDSDEAVTYSLGKFGQRALDFYSIHVTKESTHPVKPLAQIAGNRYASPVGKALRGACMGTIASFLSKYQDIIIEHQKVVKGNQKRLESLRELAGKENLEYPSVTLPPQPHTKEGVDAYNEVIARVRMWVNLNLWQKLKLSRDDAKPLLRLKGFPSFPLVERQANEVDWWDMVCNVKKLINEKKEDGKVFWQNLAGYKRQEALRPYLSSEEDRKKGKKFARYQLGDLLLHLEKKHGEDWGKVYDEAWERIDKKVEGLSKHIKLEEERRSEDAQSKAALTDWLRAKASFVIEGLKEADKDEFCRCELKLQKWYGDLRGKPFAIEAENSILDISGFSKQYNCAFIWQKDGVKKLNLYLIINYFKGGKLRFKKIKPEAFEANRFYTVINKKSGEIVPMEVNFNFDDPNLIILPLAFGKRQGREFIWNDLLSLETGSLKLANGRVIEKTLYNRRTRQDEPALFVALTFERREVLDSSNIKPMNLIGVDRGENIPAVIALTDPEGCPLSRFKDSLGNPTHILRIGESYKEKQRTIQAKKEVEQRRAGGYSRKYASKAKNLADDMVRNTARDLLYYAVTQDAMLIFENLSRGFGRQGKRTFMAERQYTRMEDWLTAKLAYEGLPSKTYLSKTLAQYTSKTCSNCGFTITSADYDRVLEKLKKTATGWMTTINGKELKVEGQITYYNRYKRQNVVKDLSVELDRLSEESVNNDISSWTKGRSGEALSLLKKRFSHRPVQEKFVCLNCGFETHADEQAALNIARSWLFLRSQEYKKYQTNKTTGNTDKRAFVETWQSFYRKKLKEVWKPAV

SEQ ID NO: 48958 - protein, 977 aa, synthetic construct
  REGION 1..977: note = engineered CasX variant
QEIKRINKIRRRLVKDSNTKKAGKTGPMKTLLVRVMTPDLRERLENLRKKPENIPQPISNTSRANLNKLLTDYTEMKKAILHVYWEEFQKDPVGLMSRVAQPASKKIDQNKLKPEMDEKGNLTTAGFACSQCGQPLFVYKLEQVSEKGKAYTNYFGRCNVAEHEKLILLAQLKPEKDSDEAVTYSLGKFGQRALDFYSIHVTKESTHPVKPLAQIAGNRYASPVGKALRDACMGTIASFLSKYQDIIIEHQKVVKGNQKRLESLRELAGKENLEYPSVTLPPQPHTKEGVDAYNEVIARVRMWVNLNLWQKLKLSRDDAKPLLRLKNFPSFPLVERQANEVDWWDMVCNVKKLINEKKEDGKVFWQNLAGYKRQEALRPYLSSEEDRKKGKKFARYQLGDLLLHLEKKHGEDWGKVYDEAWERIDKKVEGLSKHIKLEEERRSEDAQSKAALTDWLRAKASFVIEGLKEADKDEFCRCELKLQKWYGDLRGKPFAIEAENSILDISGFSKQYNCAFIWQKDGVKKLNLYLIINYFKGGKLRFKKIKPEAFEANRFYTVINKKSGEIVPMEVNFNFDDPNLIILPLAFGKRQGREFIWNDLLSLETGSLKLANGRVIEKTLYNRRTRQDEPALFVALTFERREVLDSSNIKPMNLIGVDRGENIPAVIALTDPEGCPLSRFKDSLGNPTHILRIGESYKEKQRTIQAKKEVEQRRAGGYSRKYASKAKNLADDMVRNTARDLLYYAVTQDAMLIFENLSRGFGRQGKRTFMAERQYTRMEDWLTAKLAYEGLPSKTYLSKTLAQYTSKTCSNCGFTITSADYDRVLEKLKKTATGWMTTINGKELKVEGQITYYNRYKRQNVVKDLSVELDRLSEESVNNDISSWTKGRSGEALSLLKKRFSHRPVQEKFVCLNCGFETHADEQAALNIARSWLFLRSQEYKKYQTNKTTGNTDKRAFVETWQSFYRKKLKEVWKPAV

SEQ ID NO: 48959 - protein, 977 aa, synthetic construct
  REGION 1..977: note = engineered CasX variant
QEIKRINKIRRRLVKDSNTKKAGKTGPMKTLLVRVMTPDLRERLENLRKKPENIPQPISNTSRANLNKLLTDYTEMKKAILHVYWEEFQKDPVGLMSRVAQPASKKIDQNKLKPEMDEKGNLTTAGFACSQCGQPLFVYKLEQVSEKGKAYTNYFGRCNVAEHEKLILLAQLKPEKDSDEAVTYSLGKFGQRALDFYSIHVTKESTHPVKPLAQIAGNRYASPVGKALRDACMGTIASFLSKYQDIIIEHQKVVKGNQKRLESLRELAGKENLEYPSVTLPPQPHTKEGVDAYNEVIARVRMWVNLNLWQKLKLSRDDAKPLLRLKGFPSFPLVERQANEVDWWDMVCNVKKLINEKKEDGKVFWQNLAGYKRQEALRPYLSSEEDRKKGKKFARYQLGDLLNHLEKKHGEDWGKVYDEAWERIDKKVEGLSKHIKLEEERRSEDAQSKAALTDWLRAKASFVIEGLKEADKDEFCRCELKLQKWYGDLRGKPFAIEAENSILDISGFSKQYNCAFIWQKDGVKKLNLYLIINYFKGGKLRFKKIKPEAFEANRFYTVINKKSGEIVPMEVNFNFDDPNLIILPLAFGKRQGREFIWNDLLSLETGSLKLANGRVIEKTLYNRRTRQDEPALFVALTFERREVLDSSNIKPMNLIGVDRGENIPAVIALTDPEGCPLSRFKDSLGNPTHILRIGESYKEKQRTIQAKKEVEQRRAGGYSRKYASKAKNLADDMVRNTARDLLYYAVTQDAMLIFENLSRGFGRQGKRTFMAERQYTRMEDWLTAKLAYEGLPSKTYLSKTLAQYTSKTCSNCGFTITSADYDRVLEKLKKTATGWMTTINGKELKVEGQITYYNRYKRQNVVKDLSVELDRLSEESVNNDISSWTKGRSGEALSLLKKRFSHRPVQEKFVCLNCGFETHADEQAALNIARSWLFLRSQEYKKYQTNKTTGNTDKRAFVETWQSFYRKKLKEVWKPAV

SEQ ID NO: 48960 - protein, 977 aa, synthetic construct
  REGION 1..977: note = engineered CasX variant
QEIKRINKIRRRLVKDSNTKKAGKTGPMKTLLVRVMTPDLRERLENLRKKPENIPQPISNTSRANLNKLLTDYTEMKKAILHVYWEEFQKDPVGLMSRVAQPASKKIDQNKLKPEMDEKGNLTTAGFACSQCGQPLFVYKLEQVSEKGKAYTNYFGRCNVAEHEKLILLAQLKPEKDSDEAVTYSLGKFGQRALDFYSIHVTKESTHPVKPLAQIAGNRYASPVGKALRDACMGTIASFLSKYQDIIIEHQKVVKGNQKRLESLRELAGKENLEYPSVTLPPQPHTKEGVDAYNEVIARVRMWVNLNLWQKLKLSRDDAKPLLRLKGFPSFPLVERQANEVDWWDMVCNVKKLINEKKEDGKVFWQNLAGYKRQEALRPYLSSEEDRKKGKKFARYQLGDLLWHLEKKHGEDWGKVYDEAWERIDKKVEGLSKHIKLEEERRSEDAQSKAALTDWLRAKASFVIEGLKEADKDEFCRCELKLQKWYGDLRGKPFAIEAENSILDISGFSKQYNCAFIWQKDGVKKLNLYLIINYFKGGKLRFKKIKPEAFEANRFYTVINKKSGEIVPMEVNFNFDDPNLIILPLAFGKRQGREFIWNDLLSLETGSLKLANGRVIEKTLYNRRTRQDEPALFVALTFERREVLDSSNIKPMNLIGVDRGENIPAVIALTDPEGCPLSRFKDSLGNPTHILRIGESYKEKQRTIQAKKEVEQRRAGGYSRKYASKAKNLADDMVRNTARDLLYYAVTQDAMLIFENLSRGFGRQGKRTFMAERQYTRMEDWLTAKLAYEGLPSKTYLSKTLAQYTSKTCSNCGFTITSADYDRVLEKLKKTATGWMTTINGKELKVEGQITYYNRYKRQNVVKDLSVELDRLSEESVNNDISSWTKGRSGEALSLLKKRFSHRPVQEKFVCLNCGFETHADEQAALNIARSWLFLRSQEYKKYQTNKTTGNTDKRAFVETWQSFYRKKLKEVWKPAV

SEQ ID NO: 48961 - protein, 977 aa, synthetic construct
  REGION 1..977: note = engineered CasX variant
QEIKRINKIRRRLVKDSNTKKAGKTGPMKTLLVRVMTPDLRERLENLRKKPENIPQPISNTSRANLNKLLTDYTEMKKAILHVYWEEFQKDPVGLMSRVAQPASKKIDQNKLKPEMDEKGNLTTAGFACSQCGQPLFVYKLEQVSEKGKAYTNYFGRCNVAEHEKLILLAQLKPEKDSDEAVTYSLGKFGQRALDFYSIHVTKESTHPVKPLAQIAGNRYASPVGKALRDACMGTIASFLSKYQDIIIEHQKVVKGNQKRLESLRELAGKENLEYPSVTLPPQPHTKEGVDAYNEVIARVRMWVNLNLWQKLKLSRDDAKPLLRLKGFPSFPLVERQANEVDWWDMVCNVKKLINEKKEDGKVFWQNLAGYKRQEALRPYLSSEEDRKKGKKFARYQLGDLLLHLYKKHGEDWGKVYDEAWERIDKKVEGLSKHIKLEEERRSEDAQSKAALTDWLRAKASFVIEGLKEADKDEFCRCELKLQKWYGDLRGKPFAIEAENSILDISGFSKQYNCAFIWQKDGVKKLNLYLIINYFKGGKLRFKKIKPEAFEANRFYTVINKKSGEIVPMEVNFNFDDPNLIILPLAFGKRQGREFIWNDLLSLETGSLKLANGRVIEKTLYNRRTRQDEPALFVALTFERREVLDSSNIKPMNLIGVDRGENIPAVIALTDPEGCPLSRFKDSLGNPTHILRIGESYKEKQRTIQAKKEVEQRRAGGYSRKYASKAKNLADDMVRNTARDLLYYAVTQDAMLIFENLSRGFGRQGKRTFMAERQYTRMEDWLTAKLAYEGLPSKTYLSKTLAQYTSKTCSNCGFTITSADYDRVLEKLKKTATGWMTTINGKELKVEGQITYYNRYKRQNVVKDLSVELDRLSEESVNNDISSWTKGRSGEALSLLKKRFSHRPVQEKFVCLNCGFETHADEQAALNIARSWLFLRSQEYKKYQTNKTTGNTDKRAFVETWQSFYRKKLKEVWKPAV

SEQ ID NO: 48962 - protein, 977 aa, synthetic construct
  REGION 1..977: note = engineered CasX variant
QEIKRINKIRRRLVKDSNTKKAGKTGPMKTLLVRVMTPDLRERLENLRKKPENIPQPISNTSRANLNKLLTDYTEMKKAILHVYWEEFQKDPVGLMSRVAQPASKKIDQNKLKPEMDEKGNLTTAGFACSQCGQPLFVYKLEQVSEKGKAYTNYFGRCNVAEHEKLILLAQLKPEKDSDEAVTYSLGKFGQRALDFYSIHVTKESTHPVKPLAQIAGNRYASPVGKALRDACMGTIASFLSKYQDIIIEHQKVVKGNQKRLESLRELAGKENLEYPSVTLPPQPHTKEGVDAYNEVIARVRMWVNLNLWQKLKLSRDDAKPLLRLKGFPSFPLVERQANEVDWWDMVCNVKKLINEKKEDGKVFWQNLAGYKRQEALRPYLSSEEDRKKGKKFARYQLGDLLLHLEKKHPEDWGKVYDEAWERIDKKVEGLSKHIKLEEERRSEDAQSKAALTDWLRAKASFVIEGLKEADKDEFCRCELKLQKWYGDLRGKPFAIEAENSILDISGFSKQYNCAFIWQKDGVKKLNLYLIINYFKGGKLRFKKIKPEAFEANRFYTVINKKSGEIVPMEVNFNFDDPNLIILPLAFGKRQGREFIWNDLLSLETGSLKLANGRVIEKTLYNRRTRQDEPALFVALTFERREVLDSSNIKPMNLIGVDRGENIPAVIALTDPEGCPLSRFKDSLGNPTHILRIGESYKEKQRTIQAKKEVEQRRAGGYSRKYASKAKNLADDMVRNTARDLLYYAVTQDAMLIFENLSRGFGRQGKRTFMAERQYTRMEDWLTAKLAYEGLPSKTYLSKTLAQYTSKTCSNCGFTITSADYDRVLEKLKKTATGWMTTINGKELKVEGQITYYNRYKRQNVVKDLSVELDRLSEESVNNDISSWTKGRSGEALSLLKKRFSHRPVQEKFVCLNCGFETHADEQAALNIARSWLFLRSQEYKKYQTNKTTGNTDKRAFVETWQSFYRKKLKEVWKPAV

SEQ ID NO: 48963 - protein, 978 aa, synthetic construct
  REGION 1..978: note = engineered CasX variant
QEIKRINKIRRRLVKDSNTKKAGKTGPMKTLLVRVMTPDLRERLENLRKKPENIPQPISNTSRANLNKLLTDYTEMKKAILHVYWEEFQKDPVGLMSRVAQPASKKIDQNKLKPEMDEKGNLTTAGFACSQCGQPLFVYKLEQVSEKGKAYTNYFGRCNVAEHEKLILLAQLKPEKDSDEAVTYSLGKFGQRALDFYSIHVTKESTHPVKPLAQIAGNRYASPVGKALRDACMGTIASFLSKYQDIIIEHQKVVKGNQKRLESLRELAGKENLEYPSVTLPPQPHTKEGVDAYNEVIARVRMWVNLNLWQKLKLSRDDAKPLLRLKGFPSFPLVERQANEVDWWDMVCNVKKLINEKKEDGKVFWQNLAGYKRQEALRPYLSSEEDRKKGKKFARYQLGDLLLHLEKKHGERDWGKVYDEAWERIDKKVEGLSKHIKLEEERRSEDAQSKAALTDWLRAKASFVIEGLKEADKDEFCRCELKLQKWYGDLRGKPFAIEAENSILDISGFSKQYNCAFIWQKDGVKKLNLYLIINYFKGGKLRFKKIKPEAFEANRFYTVINKKSGEIVPMEVNFNFDDPNLIILPLAFGKRQGREFIWNDLLSLETGSLKLANGRVIEKTLYNRRTRQDEPALFVALTFERREVLDSSNIKPMNLIGVDRGENIPAVIALTDPEGCPLSRFKDSLGNPTHILRIGESYKEKQRTIQAKKEVEQRRAGGYSRKYASKAKNLADDMVRNTARDLLYYAVTQDAMLIFENLSRGFGRQGKRTFMAERQYTRMEDWLTAKLAYEGLPSKTYLSKTLAQYTSKTCSNCGFTITSADYDRVLEKLKKTATGWMTTINGKELKVEGQITYYNRYKRQNVVKDLSVELDRLSEESVNNDISSWTKGRSGEALSLLKKRFSHRPVQEKFVCLNCGFETHADEQAALNIARSWLFLRSQEYKKYQTNKTTGNTDKRAFVETWQSFYRKKLKEVWKPAV

SEQ ID NO: 48964 - protein, 978 aa, synthetic construct
  REGION 1..978: note = engineered CasX variant
QEIKRINKIRRRLVKDSNTKKAGKTGPMKTLLVRVMTPDLRERLENLRKKPENIPQPISNTSRANLNKLLTDYTEMKKAILHVYWEEFQKDPVGLMSRVAQPASKKIDQNKLKPEMDEKGNLTTAGFACSQCGQPLFVYKLEQVSEKGKAYTNYFGRCNVAEHEKLILLAQLKPEKDSDEAVTYSLGKFGQRALDFYSIHVTKESTHPVKPLAQIAGNRYASPVGKALRDACMGTIASFLSKYQDIIIEHQKVVKGNQKRLESLRELAGKENLEYPSVTLPPQPHTKEGVDAYNEVIARVRMWVNLNLWQKLKLSRDDAKPLLRLKGFPSFPLVERQANEVDWWDMVCNVKKLINEKKEDGKVFWQNLAGYKRQEALRPYLSSEEDRKKGKKFARYQLGDLLLHLEKKHGEYDWGKVYDEAWERIDKKVEGLSKHIKLEEERRSEDAQSKAALTDWLRAKASFVIEGLKEADKDEFCRCELKLQKWYGDLRGKPFAIEAENSILDISGFSKQYNCAFIWQKDGVKKLNLYLIINYFKGGKLRFKKIKPEAFEANRFYTVINKKSGEIVPMEVNFNFDDPNLIILPLAFGKRQGREFIWNDLLSLETGSLKLANGRVIEKTLYNRRTRQDEPALFVALTFERREVLDSSNIKPMNLIGVDRGENIPAVIALTDPEGCPLSRFKDSLGNPTHILRIGESYKEKQRTIQAKKEVEQRRAGGYSRKYASKAKNLADDMVRNTARDLLYYAVTQDAMLIFENLSRGFGRQGKRTFMAERQYTRMEDWLTAKLAYEGLPSKTYLSKTLAQYTSKTCSNCGFTITSADYDRVLEKLKKTATGWMTTINGKELKVEGQITYYNRYKRQNVVKDLSVELDRLSEESVNNDISSWTKGRSGEALSLLKKRFSHRPVQEKFVCLNCGFETHADEQAALNIARSWLFLRSQEYKKYQTNKTTGNTDKRAFVETWQSFYRKKLKEVWKPAV

SEQ ID NO: 48965 - protein, 977 aa, synthetic construct
  REGION 1..977: note = engineered CasX variant
QEIKRINKIRRRLVKDSNTKKAGKTGPMKTLLVRVMTPDLRERLENLRKKPENIPQPISNTSRANLNKLLTDYTEMKKAILHVYWEEFQKDPVGLMSRVAQPASKKIDQNKLKPEMDEKGNLTTAGFACSQCGQPLFVYKLEQVSEKGKAYTNYFGRCNVAEHEKLILLAQLKPEKDSDEAVTYSLGKFGQRALDFYSIHVTKESTHPVKPLAQIAGNRYASPVGKALRDACMGTIASFLSKYQDIIIEHQKVVKGNQKRLESLRELAGKENLEYPSVTLPPQPHTKEGVDAYNEVIARVRMWVNLNLWQKLKLSRDDAKPLLRLKGFPSFPLVERQANEVDWWDMVCNVKKLINEKKEDGKVFWQNLAGYKRQEALRPYLSSEEDRKKGKKFARYQLGDLLLHLEKKHGEDWGDVYDEAWERIDKKVEGLSKHIKLEEERRSEDAQSKAALTDWLRAKASFVIEGLKEADKDEFCRCELKLQKWYGDLRGKPFAIEAENSILDISGFSKQYNCAFIWQKDGVKKLNLYLIINYFKGGKLRFKKIKPEAFEANRFYTVINKKSGEIVPMEVNFNFDDPNLIILPLAFGKRQGREFIWNDLLSLETGSLKLANGRVIEKTLYNRRTRQDEPALFVALTFERREVLDSSNIKPMNLIGVDRGENIPAVIALTDPEGCPLSRFKDSLGNPTHILRIGESYKEKQRTIQAKKEVEQRRAGGYSRKYASKAKNLADDMVRNTARDLLYYAVTQDAMLIFENLSRGFGRQGKRTFMAERQYTRMEDWLTAKLAYEGLPSKTYLSKTLAQYTSKTCSNCGFTITSADYDRVLEKLKKTATGWMTTINGKELKVEGQITYYNRYKRQNVVKDLSVELDRLSEESVNNDISSWTKGRSGEALSLLKKRFSHRPVQEKFVCLNCGFETHADEQAALNIARSWLFLRSQEYKKYQTNKTTGNTDKRAFVETWQSFYRKKLKEVWKPAV

SEQ ID NO: 48966 - protein, 977 aa, synthetic construct
  REGION 1..977: note = engineered CasX variant
QEIKRINKIRRRLVKDSNTKKAGKTGPMKTLLVRVMTPDLRERLENLRKKPENIPQPISNTSRANLNKLLTDYTEMKKAILHVYWEEFQKDPVGLMSRVAQPASKKIDQNKLKPEMDEKGNLTTAGFACSQCGQPLFVYKLEQVSEKGKAYTNYFGRCNVAEHEKLILLAQLKPEKDSDEAVTYSLGKFGQRALDFYSIHVTKESTHPVKPLAQIAGNRYASPVGKALRDACMGTIASFLSKYQDIIIEHQKVVKGNQKRLESLRELAGKENLEYPSVTLPPQPHTKEGVDAYNEVIARVRMWVNLNLWQKLKLSRDDAKPLLRLKGFPSFPLVERQANEVDWWDMVCNVKKLINEKKEDGKVFWQNLAGYKRQEALRPYLSSEEDRKKGKKFARYQLGDLLLHLEKKHGEDWGKVYGEAWERIDKKVEGLSKHIKLEEERRSEDAQSKAALTDWLRAKASFVIEGLKEADKDEFCRCELKLQKWYGDLRGKPFAIEAENSILDISGFSKQYNCAFIWQKDGVKKLNLYLIINYFKGGKLRFKKIKPEAFEANRFYTVINKKSGEIVPMEVNFNFDDPNLIILPLAFGKRQGREFIWNDLLSLETGSLKLANGRVIEKTLYNRRTRQDEPALFVALTFERREVLDSSNIKPMNLIGVDRGENIPAVIALTDPEGCPLSRFKDSLGNPTHILRIGESYKEKQRTIQAKKEVEQRRAGGYSRKYASKAKNLADDMVRNTARDLLYYAVTQDAMLIFENLSRGFGRQGKRTFMAERQYTRMEDWLTAKLAYEGLPSKTYLSKTLAQYTSKTCSNCGFTITSADYDRVLEKLKKTATGWMTTINGKELKVEGQITYYNRYKRQNVVKDLSVELDRLSEESVNNDISSWTKGRSGEALSLLKKRFSHRPVQEKFVCLNCGFETHADEQAALNIARSWLFLRSQEYKKYQTNKTTGNTDKRAFVETWQSFYRKKLKEVWKPAV

SEQ ID NO: 48967 - protein, 977 aa, synthetic construct
  REGION 1..977: note = engineered CasX variant
QEIKRINKIRRRLVKDSNTKKAGKTGPMKTLLVRVMTPDLRERLENLRKKPENIPQPISNTSRANLNKLLTDYTEMKKAILHVYWEEFQKDPVGLMSRVAQPASKKIDQNKLKPEMDEKGNLTTAGFACSQCGQPLFVYKLEQVSEKGKAYTNYFGRCNVAEHEKLILLAQLKPEKDSDEAVTYSLGKFGQRALDFYSIHVTKESTHPVKPLAQIAGNRYASPVGKALRDACMGTIASFLSKYQDIIIEHQKVVKGNQKRLESLRELAGKENLEYPSVTLPPQPHTKEGVDAYNEVIARVRMWVNLNLWQKLKLSRDDAKPLLRLKGFPSFPLVERQANEVDWWDMVCNVKKLINEKKEDGKVFWQNLAGYKRQEALRPYLSSEEDRKKGKKFARYQLGDLLLHLEKKHGEDWGKVYDEAWERIDKKVEGLSKHIKLEEERRSEDAQSKAALTDWLRAKASFVIEGKKEADKDEFCRCELKLQKWYGDLRGKPFAIEAENSILDISGFSKQYNCAFIWQKDGVKKLNLYLIINYFKGGKLRFKKIKPEAFEANRFYTVINKKSGEIVPMEVNFNFDDPNLIILPLAFGKRQGREFIWNDLLSLETGSLKLANGRVIEKTLYNRRTRQDEPALFVALTFERREVLDSSNIKPMNLIGVDRGENIPAVIALTDPEGCPLSRFKDSLGNPTHILRIGESYKEKQRTIQAKKEVEQRRAGGYSRKYASKAKNLADDMVRNTARDLLYYAVTQDAMLIFENLSRGFGRQGKRTFMAERQYTRMEDWLTAKLAYEGLPSKTYLSKTLAQYTSKTCSNCGFTITSADYDRVLEKLKKTATGWMTTINGKELKVEGQITYYNRYKRQNVVKDLSVELDRLSEESVNNDISSWTKGRSGEALSLLKKRFSHRPVQEKFVCLNCGFETHADEQAALNIARSWLFLRSQEYKKYQTNKTTGNTDKRAFVETWQSFYRKKLKEVWKPAV

SEQ ID NO: 48968 - protein, 977 aa, synthetic construct
  REGION 1..977: note = engineered CasX variant
QEIKRINKIRRRLVKDSNTKKAGKTGPMKTLLVRVMTPDLRERLENLRKKPENIPQPISNTSRANLNKLLTDYTEMKKAILHVYWEEFQKDPVGLMSRVAQPASKKIDQNKLKPEMDEKGNLTTAGFACSQCGQPLFVYKLEQVSEKGKAYTNYFGRCNVAEHEKLILLAQLKPEKDSDEAVTYSLGKFGQRALDFYSIHVTKESTHPVKPLAQIAGNRYASPVGKALRDACMGTIASFLSKYQDIIIEHQKVVKGNQKRLESLRELAGKENLEYPSVTLPPQPHTKEGVDAYNEVIARVRMWVNLNLWQKLKLSRDDAKPLLRLKGFPSFPLVERQANEVDWWDMVCNVKKLINEKKEDGKVFWQNLAGYKRQEALRPYLSSEEDRKKGKKFARYQLGDLLLHLEKKHGEDWGKVYDEAWERIDKKVEGLSKHIKLEEERRSEDAQSKAALTDWLRAKASFVIEGSKEADKDEFCRCELKLQKWYGDLRGKPFAIEAENSILDISGFSKQYNCAFIWQKDGVKKLNLYLIINYFKGGKLRFKKIKPEAFEANRFYTVINKKSGEIVPMEVNFNFDDPNLIILPLAFGKRQGREFIWNDLLSLETGSLKLANGRVIEKTLYNRRTRQDEPALFVALTFERREVLDSSNIKPMNLIGVDRGENIPAVIALTDPEGCPLSRFKDSLGNPTHILRIGESYKEKQRTIQAKKEVEQRRAGGYSRKYASKAKNLADDMVRNTARDLLYYAVTQDAMLIFENLSRGFGRQGKRTFMAERQYTRMEDWLTAKLAYEGLPSKTYLSKTLAQYTSKTCSNCGFTITSADYDRVLEKLKKTATGWMTTINGKELKVEGQITYYNRYKRQNVVKDLSVELDRLSEESVNNDISSWTKGRSGEALSLLKKRFSHRPVQEKFVCLNCGFETHADEQAALNIARSWLFLRSQEYKKYQTNKTTGNTDKRAFVETWQSFYRKKLKEVWKPAV

SEQ ID NO: 48969 - protein, 978 aa, synthetic construct
  REGION 1..978: note = engineered CasX variant
QEIKRINKIRRRLVKDSNTKKAGKTGPMKTLLVRVMTPDLRERLENLRKKPENIPQPISNTSRANLNKLLTDYTEMKKAILHVYWEEFQKDPVGLMSRVAQPASKKIDQNKLKPEMDEKGNLTTAGFACSQCGQPLFVYKLEQVSEKGKAYTNYFGRCNVAEHEKLILLAQLKPEKDSDEAVTYSLGKFGQRALDFYSIHVTKESTHPVKPLAQIAGNRYASPVGKALRDACMGTIASFLSKYQDIIIEHQKVVKGNQKRLESLRELAGKENLEYPSVTLPPQPHTKEGVDAYNEVIARVRMWVNLNLWQKLKLSRDDAKPLLRLKGFPSFPLVERQANEVDWWDMVCNVKKLINEKKEDGKVFWQNLAGYKRQEALRPYLSSEEDRKKGKKFARYQLGDLLLHLEKKHGEDWGKVYDEAWERIDKKVEGLSKHIKLEEERRSEDAQSKAALTDWLRAKASFVIEGLKEADDKDEFCRCELKLQKWYGDLRGKPFAIEAENSILDISGFSKQYNCAFIWQKDGVKKLNLYLIINYFKGGKLRFKKIKPEAFEANRFYTVINKKSGEIVPMEVNFNFDDPNLIILPLAFGKRQGREFIWNDLLSLETGSLKLANGRVIEKTLYNRRTRQDEPALFVALTFERREVLDSSNIKPMNLIGVDRGENIPAVIALTDPEGCPLSRFKDSLGNPTHILRIGESYKEKQRTIQAKKEVEQRRAGGYSRKYASKAKNLADDMVRNTARDLLYYAVTQDAMLIFENLSRGFGRQGKRTFMAERQYTRMEDWLTAKLAYEGLPSKTYLSKTLAQYTSKTCSNCGFTITSADYDRVLEKLKKTATGWMTTINGKELKVEGQITYYNRYKRQNVVKDLSVELDRLSEESVNNDISSWTKGRSGEALSLLKKRFSHRPVQEKFVCLNCGFETHADEQAALNIARSWLFLRSQEYKKYQTNKTTGNTDKRAFVETWQSFYRKKLKEVWKPAV

SEQ ID NO: 48970 - protein, 978 aa, synthetic construct
  REGION 1..978: note = engineered CasX variant
QEIKRINKIRRRLVKDSNTKKAGKTGPMKTLLVRVMTPDLRERLENLRKKPENIPQPISNTSRANLNKLLTDYTEMKKAILHVYWEEFQKDPVGLMSRVAQPASKKIDQNKLKPEMDEKGNLTTAGFACSQCGQPLFVYKLEQVSEKGKAYTNYFGRCNVAEHEKLILLAQLKPEKDSDEAVTYSLGKFGQRALDFYSIHVTKESTHPVKPLAQIAGNRYASPVGKALRDACMGTIASFLSKYQDIIIEHQKVVKGNQKRLESLRELAGKENLEYPSVTLPPQPHTKEGVDAYNEVIARVRMWVNLNLWQKLKLSRDDAKPLLRLKGFPSFPLVERQANEVDWWDMVCNVKKLINEKKEDGKVFWQNLAGYKRQEALRPYLSSEEDRKKGKKFARYQLGDLLLHLEKKHGEDWGKVYDEAWERIDKKVEGLSKHIKLEEERRSEDAQSKAALTDWLRAKASFVIEGLKEADKDEFCRCELKLQKWYGDLRGKPFAIEAENSILDISGFSKQYNCAFIWQKDGVKKLNLYLIINYFKGGKLRFKKIKPEAFEANRFYTVINKKSGEIVPMEVNFNFDDPNLIILPLAFGKRQGREFIWNDLLSLETGSLKLANGRVIEKTLYNRRTRQDEPALFVALTFERREVLDSSNIKPMNLIGVDRGENIPAVIALTDPEGCPLSRFKDSLGNPTHILRIGESYKEKQRTIQAKKEVEQRRAGGYSRKYASKAKNLADDMVRNTARDLLYYAVTQDAMLIFENLSRGFGRQGKRTFMAERQYTRMEDWLTAKLAYEGLPSKTYLSKTLAQYTSKTCSNCGFTITSADYDRVLEKLKKTATGWMTTINGKELKVEGQITYYNRYKRQNVVKDLSVELDRLSEESVNNDISSWTKGRSGNEALSLLKKRFSHRPVQEKFVCLNCGFETHADEQAALNIARSWLFLRSQEYKKYQTNKTTGNTDKRAFVETWQSFYRKKLKEVWKPAV

SEQ ID NO: 48971 - protein, 977 aa, synthetic construct
  REGION 1..977: note = engineered CasX variant
QEIKRINKIRRRLVKDSNTKKAGKTGPMKTLLVRVMTPDLRERLENLRKKPENIPQPISNTSRANLNKLLTDYTEMKKAILHVYWEEFQKDPVGLMSRVAQPASKKIDQNKLKPEMDEKGNLTTAGFACSQCGQPLFVYKLEQVSEKGKAYTNYFGRCNVAEHEKLILLAQLKPEKDSDEAVTYSLGKFGQRALDFYSIHVTKESTHPVKPLAQIAGNRYASPVGKALRDACMGTIASFLSKYQDIIIEHQKVVKGNQKRLESLRELAGKENLEYPSVTLPPQPHTKEGVDAYNEVIARVRMWVNLNLWQKLKLSRDDAKPLLRLKGFPSFPLVERQANEVDWWDMVCNVKKLINEKKEDGKVFWQNLAGYKRQEALRPYLSSEEDRQKGKKFARYQLGDLLLHLEKKHGEDWGKVYDEAWERIDKKVEGLSKHIKLEEERRSEDAQSKAALTDWLRAKASFVIEGLKEADKDEFCRCELKLQKWYGDLRGKPFAIEAENSILDISGFSKQYNCAFIWQKDGVKKLNLYLIINYFKGGKLRFKKIKPEAFEANRFYTVINKKSGEIVPMEVNFNFDDPNLIILPLAFGKRQGREFIWNDLLSLETGSLKLANGRVIEKTLYNRRTRQDEPALFVALTFERREVLDSSNIKPMNLIGVDRGENIPAVIALTDPEGCPLSRFKDSLGNPTHILRIGESYKEKQRTIQAKKEVEQRRAGGYSRKYASKAKNLADDMVRNTARDLLYYAVTQDAMLIFENLSRGFGRQGKRTFMAERQYTRMEDWLTAKLAYEGLPSKTYLSKTLAQYTSKTCSNCGFTITSADYDRVLEKLKKTATGWMTTINGKELKVEGQITYYNRYKRQNVVKDLSVELDRLSEESVNNDISSWTKGRSGEALSLLKKRFSHRPVQEKFVCLNCGFETHADEQAALNIARSWLFLRSQEYKKYQTNKTTGNTDKRAFVETWQSFYRKKLKEVWKPAV

SEQ ID NO: 48972 - protein, 977 aa, synthetic construct
  REGION 1..977: note = engineered CasX variant
QEIKRINKIRRRLVKDSNTKKAGKTGPMKTLLVRVMTPDLRERLENLRKKPENIPQPISNTSRANLNKLLTDYTEMKKAILHVYWEEFQKDPVGLMSRVAQPASKKIDQNKLKPEMDEKGNLTTAGFACSQCGQPLFVYKLEQVSEKGKAYTNYFGRCNVAEHEKLILLAQLKPEKDSDEAVTYSLGKFGQRALDFYSIHVTKESTHPVKPLAQIAGNRYASPVGKALRDACMGTIASFLSKYQDIIIEHQKVVKGNQKRLESLRELAGKENLEYPSVTLPPQPHTKEGVDAYNEVIARVRMWVNLNLWQKLKLSRDDAKPLLRLKGFPSFPLVERQANEVDWWDMVCNVKKLINEKKEDGKVFWQNLAGYKRQEALRPYLSSEEDRKKGKKFARYQLGDLLLHLEKKHGEDWGKVYDEAWERIDKKVEGLSKHIKLEEERRSEDAQSKAALTDWLRAKASFVIEGLKEADKDEFCRCELKLQKWYGDLRGKPFAIEAENSILDISGFSKQYNCAFIWQKDGVKKLNLYLIINYFKGGKLRFKKIKPEAFEANRFYTVINKKSGEIVPMEVNFNFDDPNLIILPLAFGKRQGREFIWNDLLSLETGSLKLANGRVIEKTLYNRRTRQDEPALFVALTFERREVLDSSNIKPMNLIGVDRGENIPAVIALTDPEGCPLSRFKDSLGNPTHILRIGESYKEKQRTIQAKKEVEQRRAGGYSRKYASKAKNLADDMVRNTARDLLYYAVTQDAMLIFENLSRGFGRQGKRTFMAERQYTRMEDWLTAKLAYEGLPSQTYLSKTLAQYTSKTCSNCGFTITSADYDRVLEKLKKTATGWMTTINGKELKVEGQITYYNRYKRQNVVKDLSVELDRLSEESVNNDISSWTKGRSGEALSLLKKRFSHRPVQEKFVCLNCGFETHADEQAALNIARSWLFLRSQEYKKYQTNKTTGNTDKRAFVETWQSFYRKKLKEVWKPAV

SEQ ID NO: 48973 - protein, 977 aa, synthetic construct
  REGION 1..977: note = engineered CasX variant
QEIKRINKIRRRLVKDSNTKKAGKTGPMKTLLVRVMTPDLRERLENLRKKPENIPQPISNTSRANLNKLLTDYTEMKKAILHVYWEEFQKDPVGLMSRVAQPASKKIDQNKLKPEMDEKGNLTTAGFACSQCGQPLFVYKLEQVSEKGKAYTNYFGRCNVAEHEKLILLAQLKPEKDSDEAVTYSLGKFGQRALDFYSIHVTKESTHPVKPLAQIAGNRYASPVGKALRDACMGTIASFLSKYQDIIIEHQKVVKGNQKRLESLRELAGKENLEYPSVTLPPQPHTKEGVDAYNEVIARVRMWVNLNLWQKLKLSRDDAKPLLRLKGFPSFPLVERQANEVDWWDMVCNVKKLINEKKEDGKVFWQNLAGYKRQEALRPYLSSEEDRKKGKKFARYQLGDLLLHLEKKHGEDWGKVYDEAWERIDKKVEGLSKHIKLEEERRSEDAQSKAALTDWLRAKASFVIEGLKEADKDEFCRCELKLQKWYGDLRGKPFAIEAENSILDISGFSKQYNCAFIWQKDGVKKLNLYLIINYFKGGKLRFKKIKPEAFEANRFYTVINKKSGEIVPMEVNFNFDDPNLIILPLAFGKRQGREFIWNDLLSLETGSLKLANGRVIEKTLYNRRTRQDEPALFVALTFERREVLDSSNIKPMNLIGVDRGENIPAVIALTDPEGCPLSRFKDSLGNPTHILRIGESYKEKQRTIQAKKEVEQRRAGGYSRKYASKAKNLADDMVRNTARDLLYYAVTQDAMLIFENLSRGFGRQGKRTFMAERQYTRMEDWLTAKLAYNGLPSKTYLSKTLAQYTSKTCSNCGFTITSADYDRVLEKLKKTATGWMTTINGKELKVEGQITYYNRYKRQNVVKDLSVELDRLSEESVNNDISSWTKGRSGEALSLLKKRFSHRPVQEKFVCLNCGFETHADEQAALNIARSWLFLRSQEYKKYQTNKTTGNTDKRAFVETWQSFYRKKLKEVWKPAV
